United States Patent Application Publication US 2015/0376612 A1 - sequence listing, part 18

SEQ ID NO: 45450 - DNA, 1759 bp, Homo sapiens
cttgtctctcagcagacaacaacccagtcttagctggtgcctcacttaaactctgcaatccttgctaccccagccccatcaaagttaatatgtgtgtgtattgtccagcagtgacaggaagaataaaggaaatagaaatgaagaggtagaatgatcaggattttgcagttggttgagtgtgcaggataaagatggtaaactcagatgatcaagtttcgtatatggacaggagacttgtagaggttaggttttggaacctaaattcctggattcaaatcccatctctacagcttggtagttgtttgttcctgggcagtgttttttaacctctgagcctcagtttgctatgtataacatgggaataatttagtacccacttcgttaggttattgcagggcttaagagagattccacataaagcacttagcatagtgcctgaatgtttttcattaattattaatagcgaggccattttttaaattagagaacaaataaggagggcagaagtgggagatgttaaagaaggtgattgtcatttagaggagctgagtttaaagtagccaagggcagtactcagaagacaggactactggcctggcctggcctggcctggcctggaaagggttattgcagaaggatgatcctggatccactatgtagctttgcattcattctctgaaactgcttcctagatggcttcaaagctctcaaagctccactagtttgaacctgtaaaatgtttgattaactgagacaacttgggttgcttacctttagctctagagtgtagctgactcactggaaagtttttgtgctttttcaaccactggcgccagggctgatgcctgtgtttgtgtgtgttgttcactgctctatggtgcctgggccagggggaatgaggtaaaatcctgctgttgtcttcactccaagccttgtgcacttggctgcaactgaatgggctggcagcatttctgccttgggaatgtttatctgctccctccatgggtggggcttagtgttgagagtcaagccactgaagaagttgcctgtggccagcctgactccatgtggtcagtgtaattttctattataaggattgcatcctggggttacttaaattcttttttttttttttttttcttgttgcagatcatcaatgctgtggtactgttgattttattgagtgccctggctgatccggatcagtataacttttcaagttctgaactgggaggtgactttgagttcatggatgatgccagtaagtagtagatatttgggtattttcaagggcagggaatctgactgccagcacttcctattaaattacaaatatagactcgtgagttcatttgagctgatatataacttgtcattgcaaatcaacgaatatttgtgtgcgtctaacattctgtcttctaggtgcaagagtctaaataagatctattttcatcttatgttaacttacccacttaaaaatgattgcattatcatagactttctaccctgggccttttggccttttttgagaggaaggggtataaatgccaggaaggaaggtgaaaaggcttgtgcttatctccttgtgtcttctattatgtttcagtatttatttttattctaggagtgatccttttccattctagaaatgatgttgcagattatttgggggaatttagggccttttcccagtgaatggaaatatgtacagggatgtggatgtggggtaagcagggaggaagctaggctcccagcttga

SEQ ID NO: 45451 - DNA, 1218 bp, Homo sapiens
gctgataccaaaagcttggcgttttcactgcactttgcagttctcaccatgagtggttactgtagtcaatcaagtgcctgccctatttgtgtgtgcacatggacacactcacctaggggtcttttttcctcttcagagccatcaccatttcttttagagtcaccgacctctggccatccagctacacatggacagggttagaaaaactcaaggcttgagagtcgctctccatttgctcctttaaggattcaaaaagtcttttaatgaagtgtatccacttgctagaaaattgaacttggtacaagttgtggaacatgtttagttgcataaaagttcagtaaaagctaaacctcggggaacgtgtgtgctcttcaaacattaactcttgccgtccctctttcttctcaggtgctgctacccccgtatgatgatgccactgtgaatggtgctgccaaggagccaccgccaccttacgtgtctgcctaagccttcaagtgggcggagctgagggcagcagcttgactttgcagacatctgagcaatagttctgttatttcacttttgccatgagcctctctgagcttgtttgttgctgaaatgctactttttaaaatttagatgttagattgaaaactgtagttttcaacatatgctttgctggaacactgtgatagattaactgtagaattcttcctgtacgattggggatataatgggcttcactaaccttccctaggcattgaaacttcccccaaatctgatggacctagaagtctgcttttgtacctgctgggccccaaagttgggcatttttctctctgttccctctcttttgaaaatgtaaaataaaaccaaaaatagacaactttttcttcagccattccagcatagagaacaaaaccttatggaaacaggaatgtcaattgtgtaatcattgttctaattaggtaaatagaagtccttatgtatgtgttacaagaatttcccccacaacatcctttatgactgaagttcaatgacagtttgtgtttggtggtaaaggattttctccatggcctgaattaagaccattagaaagcaccaggccgtgggagcagtgaccatctgctgactgttcttgtggatcttgtgtccagggacatggggtgacatgcctcgtatgtgttagagggtggaatggatgtgtttggcgctgcatgggatctggtgcccctcttc

SEQ ID NO: 45452 - DNA, 1060 bp, Homo sapiens
tatttttttagtagagacggggtttcactgtgttagccaagatggtctcgatctcctgacctcatgatccgcccgcctcagcctcccaaagcgctggaattacaggcgtgagccaccacgcccggcccacccaactaatttttgtatttctagtagagatggggtttcgccatggtggccaggttggtctcggactcctgacctcaagtgattcgcctgcctcagcctccctaactgctgtgattataggcatgagccaccgcacctggcctggttacaccgttttaatatgcactgaattttccagtaatgcagtaaatcaaagcaagtttgtactttttttggcagggtggcgggggtgggggtagtttactaaggagtgttgaccaatttggaaaattacgtcattagtggcattgctaccttctctttgaggcactggtacaacacacctgtgctgctttgcctttgtagctgttgaattcatggtaattttatgtataggtagaagtaaagactggtattaaaatactgaactgctttgagaacagcttggtaaataccagctgctctgagcttccctacctcctagtgtgtccatgtatagggcccttcggatttcctgcagttagcaatgaaagagttaatcactggtaccttggggttgaagggcttccaggaccatccagctttatggattgtgccaatgcctgtgctggtgcctgtgtggatgttattattccctgggttcaaaatctattcataatatcatctagtgtagttgtggtgaaatagttacatacagaaatacatattattttattaaaattacttcttaggtctcctttatgttacatttagggcatctattgtagggtatgtctcgatatgtgtctaataggttataacattcatttcatttaaaaatagagaacagctgcttcaaactgaatcagtaaaaataggggatgttgagtttgagagttgggaactactgactggtaaatcagtcggggtcccactgtttttgtcctttatcttgcttcaaattgaaatcatt

SEQ ID NO: 45453 - DNA, 1033 bp, Homo sapiens
tgggtgacagagcaagactctgtctcaaagaaaaaaaaaggatgaaaaaatacattttacagaaacgaataaatagttcaatataaataggttatcagagacttaaaataatggacagaagagaagatgatgatatctgttggctcaccaccattggatgaggaatgatacacaaagccctgaagccagtagttgaaatatgacatgtatttataatatggcatattattatttagagatggggtcttgctatgttgcccaggctggacttaaactcctgggcttaagtcaccctccccccttagcctcccaagtggctagaattacaggtgtgcaccaccatgcctgccttaatgtgccgtattatttgcctttgccgtggctcctagaatttgattatcttacatgtggaattagacagttatttggaggcaatttaatattgtgatatttgcatcttatacatgaaaaatcaataccagaaaaaactgcttaggagcctttgctatgtcatagactgtaaaaccgactataagaataacttaatttcttgtcaagtaaattcttctaagttaagtaaatgcctatgaaatattgttttgtaacaaaaggcctattgccaatgtttggagtttgacttcattgatctgaaggatgtggtttgaaggctatttcttttccctcttagataatgagaaagttagacagctgcttctggagggtgtgcctgtggaatgtacgcatagctttatctggaaccaagatatctgtaagagtgtcacagagaataaaatctcggatcaggtaactaatagtgtaagggttattggtaaagtcatgaatgacaggttaaatatatcattctagagaccataaaaagttattcatacttcatagaattccatagactttcttttgttttcaaacaagttgttgatccctaactcatgatatgtactgtgattttcttctgttcttatggataatctaagaataaggatagggatctaagaataagataaggatcttgtct

SEQ ID NO: 45454 - DNA, 1047 bp, Homo sapiens
agagacggggtttcaccatgttgcccaggctggtctcgataccaattttccatagatccaccggccttggcctcccaaagtgccaggattataggtgtgagccactgtgcctggccaagcactgtttttatatcttagtacctatccatttagacttttcttttttcattggaagtgtggccgatgagggtcatgatttcctttatattgcaaagtatattctaacattgggaatttgttgccccctaaattgtaggctcccggaagcacagaagctgtctctctttattgtggcatttgcagtgtctagccagtgcctggtgcacagtaggtcttaataacctttatttgttgtctgatgaatgactggttgaatattgtagttccttgatggtgagcttcatgagggcagaattgtgttttcttgttcattgctgcaaccataactatagagacaggcagtctgcctggcttgcttttttttttttttttttttgaggcaggatctcactctgtcacccaggctggagtacagtggcgtgatcatggctgaccacagcctccacctcccggacccaggtgatcctcccacctcagcctcctgagtagctgggactataggcacctgccaccatgcctggctaatttttgtagagatgaggttttgccatgttgcccagggtgttcttgaattcctgggctcaagtgatccacctcctttggcctcccaaagtgctagggttacaggtgtgagccaccctgcctggcctgtgcctgcgtttcaaactatttgctgagtggtggatgaatgagtgactagtgatgtattcctggattgctaccttaccagctctttgagggcagcaatcacatgttatacatccttgtgcctcccatagtatgtagttgagaggcttctatgtgtttgttaaataatagttaaaaataatacttatttcttactcttcagagctttttatgcatgcaaattttccatagatatacatatttttttaaagaatggtattacatacattattttgaaac

SEQ ID NO: 45455 - DNA, 1050 bp, Homo sapiens
gctgggaagtccaagatcaaggtgccagtaaatttaattcctagtgagggccctcttcctgggttacatgtgtcctcacatgactgaatgagagaaaactctggtctttctttctcgtcttacaagagcactaatcccgtcatgggccctacccactaatctcatcatggggccctaccctcatgacctcatctacacctaattaccttccaaaggccccacctccaaataccgtcacattgcaggtcagggcttcagtatgtgaatcttaggggacacaaacatttagttcatgacagctgccactacaagggcatgtgggcactaagttgccctggccagaagtcacttctgttcacaattcattggccaaaactagccatactgccccagtataaagaccaggggggctgagaaacgtaagaagcacaggcatagtgggtgggcgccatccaactctgccacgaagccacacacacctgtgcatacatgcccgtatccacaaatgcacacatatccgcatacatatgcatacacaagggtacatacctatcaatcatgcccgaacacatgtaataaatattacagtgacctacatagacacatggagcctgcagaacatcatgtgtccaacaaaaagcacatgcaaaataatccccatgtgagaagggctgcatttcttaaagaagattttttttcaccattattggcaaagttgtatgcttaggactgaaaaaaaaagatgttttgggagaaaaagaacagcaggcaaaagcaatggcaacaaagaagagatgataatgttctctctgtttttgaggataatagagttctggaggcaagcagttcttgggcggttcatatagagagtagtgagacataatctttgcaagatttagcttgagagccagagacaattgttttatttcttataactattttgcatatatatatagaaacaagagaggcaggcagaggggatgatacacccactgcctcaccgctgctttgtggcgccgcagctgtgtgggtgttgatgccgccacagag

SEQ ID NO: 45456 - DNA, 1087 bp, Homo sapiens
ctataatgtatcctgagaggacctttttgggttgagtctatttgggaaactttgagcttcctggacctggatgtttatatttcttccgtgacttgagatgttttcagcaattatttatttaaataggttttatatgctttgtctgttctcttcttctggatctccaaaaatacatgcttttttttttttttttttttacttaatagtatcccataggccctgtaggcgttcttctcattctttttaattatctgttttttttgtttttttttttcggctaacctgggtacagcaggacctcaaaataatgttcagcgttgtttagttataatgttgctgagacaaaaatgatttctggttaggacctctgtctttatggagtttgcttgttctccccatgtctgcatgggttttctccggatactctggtttccttctgcttcccaaagatgtgaatgtttggttaactggtatgtctaaattgtcccagtatgagtgagtgagtgtgtgtgtgtgtgtgtgtgtgtgtgtgtaccatgatgtaatggtgtcctgtccagaactggtttccactttttaccctgagtgtctggataggcttcagccacctgtgacactgaactggaataagcaggttggaaaatgaatgatcacgttactataaaataaaaatgcgtaaagtatatgataatcatacaaatgcacaatatattatgcgttcagaaagcactcagtgatctcaccatattcattgtttttttaactgtgtggcattagaggatgctcgttttcactttgcaaacatttatttcatgatttcattcataaccattgtgacttctgtcattcgccaattcataaatttggtaaatatttattaatcttaattttattaatttagtagtgtactaatttgatactaatttaataatttcattaatctttcttaaatgtacatataacctacatctatttcagtatttgatattagaagtggtttgactctttacaatattggtgatgtttttgtgactagacgtaggctgtaggaacttttgtttatatcagttagcctaggtaaaattag

SEQ ID NO: 45457 - DNA, 1054 bp, Homo sapiens
taggttattggggaacaggtggtgtttggttacatgagtaaattctctagtggtaattcgttagattttggtgctcccatcacacaagcagtatacgctgtaccgaatttgtgtcttttatcccttacctctttcccccaagtccccaaagtccattgtgtcattcttattcctttgcatcctcatagcttagcttccacatatcagtgaggacatatgatatttggttttctattcctgagttacttcacttagaatgatagtctccaatctcctccaggtcactacaaatgccattaattcattcttttttattgctgagtagtattccattttatacacacacacacacacacacacacacacacacacacacacacacaccaccccccgcccccacggtttctttatccgctcgtcgattgacaggcatttaggttggttccacatttttgcaattgtgaattgttttgctataaacatgtgtgtgctttaaacccatgtgtgcaagtatcttttttgtataatgacttcttttccactgcgtagatacccagtagtgggattgctggatcaaacggtagttctgtttagttctttaaggaatctccacaccattttctatagtggttgtactagtttacattcccaccagcagtgtagaagtgttcctggtttactggagccatgccaatatctattattttttgatgttttgattatggctattcttgcaggagtaagttggtatcacattgtagttttgatttgcgtttccctgattattagtgatgtgaacattttttcatatgtttgttggccatttgtgtatcttcttctgagaattgtctgttcatgtccttagcccactttctgatgggattgttttttttttcttgctaatttgcttgtgttcgttgtagattctggatattagtccgttgtcagatgtatagattgtgaagattttctccgactctgtggattgtctgtttactctgctgactgttccttttgccgtgcaaaagctctttagtttaattaagtcccagct

SEQ ID NO: 45458 - DNA, 1032 bp, Homo sapiens
taaaattttctgaattttctaaaatctagttagatatttaaaaaagaaaaaagttatcttaaaagacttgtcttcaagtttagaaattctttctgttgcttgatctattgttgaagtgctcagttgtattttttattttattcattgagtttttcagttatgggattttgtttggttgtttttttaatgacatctatctcttttgaatttctgattcatgaatttttttttataaccttgtattatttatgtgttttctcctgtttctcactgaggctcttcgttatcatttcaaattctttttcctttttctttggatctgttactagagaattagtgtgttgctttggaggtgtcatgtttccttgcttttttatgtttcttgtgtctttatgttgatatttgtgcatctagtgtaccgttcacttcttctagttttgcggattgtcttttgttgggaaagactttttttcttatagatgcatctattatgttgcttttgtagggtgctttgtctttgattcttggtgggtgaagtagtatagtctgcatgatttctttggctggaatcaggattagtcttgtctgtgatttccccagtggcttaggctgtggttcttaggtaaaggctttggtgtggctttttcttgggaggaggaagacaggcagactagttctcaggcaccactggtggcagtgatgggctgcgcatgacagtccttggtgccctgtgtggcatatgcaggtgattgtggtgatgggtctagatgggccaaactttggttgtccaggcagcttttctgggtgccagaggtagaagtggtatggtgagtctggtgggtcctcagagtcttgggtagtgtgatggcattggtggtagcaatagcggtggcaggccaaccattgggtctccagtggcaggccagcagtggtgttgggctgggtgtgccggtccccagtcccctaggtggtatgcataggtgagtgctggtgatagtggcaaactgagcaagttggtatataggcccctgg

SEQ ID NO: 45459 - DNA, 1032 bp, Homo sapiens
tatttttttgtagagatggggttttgccctgttgcccaggctggtctcaaactccttggcttaagtgatccacccaccttggcctcccaaagtgttgggattacaggtgtgagccaccatgatagccctggaatttcttgattatcctgaagcctgtttttatctctttttaatgtttagtcatatattcctttattcatcataaatcccagttaaagggttaaagcaaagtgaaattgagtctcaagagtatttaacttgcctgattaaggcatacaactaggaagtagcagaactggaatagagttttattattatgtgttttctaagctttagtcttcacatttaacaaaaggagagtagtcctgattttacaactttgttgtgagcataaaagtgtaggtaaggcccaagcatcatttcttatatatcgttaatgcctcctttgcatcttctgtggaaagaaatatttgattaaaaggctggaagaagcagctatggaaaatagaaaacaaatagaactggacaatgtaggattgtattaatgagttgacatttgtggtgaagaaattttattttaattaattaattaatttttttgagacagagtctcgctctgtcacccaggctgaagtgcagtgacgcaatcttggctcactgcaacttctgcctcccgggttcaagcgattctcctgcctcagcctcccaagtagctgggactctaggcgcctgccagcatgcctggctaatttttatatttttggtagagacggggtttcaccatgttggccagtctggtcttgaattcctgacctcaagtgatctgcctgcctcagcttcctagaatgctgggattacaggcatgagccactgtgcccacccagaaatttaattttagtatagaagcaatttagtatggtatagaaatttaatttagtatagaagcaatgccagttttactttgggaaattatttatagtgaattagaattctggatcaggagttggaagatcttagtttgaatcttctctc

SEQ ID NO: 45460 - DNA, 1027 bp, Homo sapiens
tttagcttttgatttatgatttttaaaatgtaattaaaatcttagggagttattcaggacatgtctttttattttttatctgcattttcatttaagattaagggatttgttacaagggtatattgtgtgatgcttaggtttgggctcccactgataccatcatccagatagtgaacatagtacccaaaaggaagtttttcagcccttttttcctctccctccttccctccttttagaatccacactgtctgttgttcccatctttatgtccatgtgtacccaagatttagcttccacttctaagtgagaacaggacatgtcttttgatacatgtgaaaattttctgtccaatgtagtgtatgttttcaatgtatgtgattagtatctaagcataaatattgttgtcttatttaacagttttctgaacattgtttgtctgcctatcattgtatcttggaaaaagaattcagtgacttctgatcccattaagtaggttttaatgtggagtaaatgtttattgttgaactacttgcctctgactgtcaaagttctgtagatggaagggctggacttaggtgtctgaacactggtattaactactgttcctgtttgagtatggctgtataaaaattagttttgtttttgttaccttatattttattaaaaatatagtattttctattttacgtagccttactgtacttaatatgtaaaatctacatgtttttttcttggtagtgcttagtcacctgtgttttacttttttccacacggtgtataatgcatattggtttgtttatattctgttactttttccttctatatttgaattagcttctttggcaaagataaacatggaaaagaattaactcagtaatagtgatggctctgtctcagggaaatacgcttattttctatagccttgggttttctagtaaatttggggaatgtgaaggtaaattgaagatacattgaaagcaagtaatggatatatggaagcttactatataaaatactctttttgatc

SEQ ID NO: 45461 - DNA, 1047 bp, Homo sapiens
ttagaattcattgctcagcttagatttgaagaatgtttggaattaatttctggttcatatttttgttaagaaaacaagatcatgtttctacattagcattttgagcagttgatatcagtccagcaaaaatcatgccaaattaaatctagcatttttctaagaatgtttaaaattattcttgtaatgttcgggtcctttttttttttttttttgaggcagagtctcacactgttgcccaggctggagtgcagtggcgcagtctcggctcactgcaagctctgcctcccgggttcacgccattctcctgcctcagcctccccagtagctgggactacaggtgcccgccaccatgcccggctaattttttgtattttttttagtagagacagggtttcaccgtgttagccaggatggtctcgatctcctgacctcgtgatccgcccacctcggcctcccaaagtgctgggattacaggcgtgagccaccgcatgagtccttttaatcaattaattgctttttctctataataattgtagacagctgaagagggatcaatttaaaaaaattcaagtttacttcagtaatcattctagattacagaattgtgctttaaaatagctacattgtatatatcagtactagaaacatccaagaaataggagtctacattacataaaaatataaaatataaaaagctttattataaagaatgagaataattagttgatactcaatatagagaagtcactgtgcttaaaattgtaactttctagttcaagaactttcattaggcctaagttaaatattggtttttttaaaaatgtgagctttgactttgcatttaaaagtgatgaatatatctatgtcgtaagaatgaggggaagtaaataattggcaaacacatgctgaataccttttttaaaaaagtaaccttttctttttggaataattttagagttacagacaggttgcaaagatagtacagagagttcctttatgttctttacccagtttcccttattgttatgttatcacagtatatttgtc

SEQ ID NO: 45462 - DNA, 1048 bp, Homo sapiens
tgtcattcagtcattttttttccattcatagagcacaagcaaagtagatttagcatgattcttaagggccctaggattttcagaatggtaaatgaacactatcttcaacttaaagttaccagatatgttagcccctaacaagagcatccgcctgtattttgaagctttgaagccaagcactgacttttcctctctagctcagatgacatcttcttccaggagaaggctgtttggtctgtgttgaaaatctgttgattagtgtagccactttcgttaattatcttagctaggtcttctgggtaactgcgtgcagcttctacgtcaacccttgcgcttttatggtatggagacgtcttcgttccataaggctcatgaacagacctctgctactgtcggacttttctcctgcagctttcttacgtctattagcctacatagaatttaagggttagggctttactctggattcagccttggcttaagggagtgttgtggctagttcgattgtctatccagaccactcaaaattcctccatatcaacaggctgttttacttccttatcacttgtgtgtacaattttaatttccttcaagactttttcttttgcattaatgactgggccaactgtttggctcaagatgcctatgttttggcctgtcttggcttttacatcccttcttcactaagcttaatcatttctagcttttgatttaaagtgagagacagggactcttcctttcacttaaatacttagaccattgtaatattactaattagcctaatttcaatattgttctgtctcaggaaataggcccaaggagaagggagagaggggagtggctagacagtggaacagtcagaacacacacatgtatcaattaagttctcagtcttaaatgggcatgttcatggtgccccaaaatagttccaatagtactatcaaagataactgattacagatcaccataacagataataataatgaaaaattttgaactattgggagaattaccaaaatgtgacacagaaacacaaagtaagcatgtg

SEQ ID NO: 45463 - DNA, 1050 bp, Homo sapiens
gaaagagcatactatattgttttatacagtcttaggtacctagttaaagttcatgacggtcctgtgagataagatgatattgtctcttataaactctttctaattttcagagaggttaaataagttgtccaaagtcacacactggcctcacaagattttcgtagaggattgtctgatttgaacatctttgattgttttattacttgaaggagcgaaggggacatatataatcttctgttaatcagttttgaaggccctgttaatcagttttgaaggcccagtatgctttttgcctatagttaaagtaaatttccatggagtgaaaggctagctaataaatctgaactctgctagtattagttaatagtatgtagatattattgtaattctgatcttaaaatgatggatattaacattaggtggaatcttagacattatcccagttactgagtctttatgacgtacttttggtttatagccatctgtgtactgcttgaacattttattcaaggatgttagctactttctgggccaaccattattgggcagctctaaatttctttcttttatttaatcaaagtttgcttttatgagaagtttatacttggatttctgcctaagaataatgtttcttctctgatataattattacttatatatatcatgaggcattttcattctcagagaaatgtgtgaaaacacatatttctttttaaggttgagggacttctaagttcccattttttacttagcacagtgccaattgttgattttaactagcaaagttattgaacagatcatttgcaggggaaaaatgcttctgtgaaatctttgagttcagtgttaattagaagttacacgacttggtgctggtaggctggtggtattgatgtggtgtgtgaagggcaggtgaggcagatactgatccttttgcctccctggaagtgaaactgaaggcatcatttgccccagctcagagtgacaccagggtaaattcttttagttttaatggatactgggaccttcaagtctaaaaaaaattgccagtaa

SEQ ID NO: 45464 - DNA, 1053 bp, Homo sapiens
tgcattaaaaagaccactgtagaaggatttgtattcatgtaaagatcttagtgatctctaagatatgttgtttactcatatcaagtaggctgtagacatacacctatgtgtatattctcattaaaattataaatgtatatttgagtgcatgaaatgaatatacagaggtctgcagggatatatgataaactcataaaaagttgttacctgtagagtgtggagttgggagtaaatagtattagcttttcattttatctatttaattttttaaaactttaaaaactttttttcttttcattgagtattgatgtgtaagttaagtagtcactgtgtaaagaaatatacatcttagctttttaaactgttttcatttctaagttgagttagcaaagaactgtactcattttattttggaaaaagtgaactaatcttattttactgtacaggatatgagtaataacaaaaatacatttttggaaccagtttgtaggttcaaactttgcattttgggactctatataaatctttagatccagctgttgctgagaatattctttcaattgctatgaggtgtgttgattttaaaagaatggatggctgttcctcaagtgtacatatggcaaaaatttaatggtatcgctatgaacttgaatggattgtttaatttctttgcatcgagtagtaagaaccacacttccatcatttttatttaaaatttagaagaaggaatttttttttatagaaatgcccatttggtcctgaaatttcatcagctctctgttatagtttgtcaacaaatggtacaagcaaagtctttcaaagtatttgttaattaggccatattcatttttagtcttcgctactatacagtcaagacctacttgtttctatttcctttaatttatcctggagtttgtccaagttgagttttaatgagttgtttatcccactagttacactaggatttatttttccctagagagtaatgtttgaattgatagtttttaaacctattctgtaaaatgaacatatgttcagactaagacttctgga

SEQ ID NO: 45465 - DNA, 1033 bp, Homo sapiens
tttacttttctgaatttataaaatggactgtgctatgaaaaagcattttatttgaaatttcctattctaaaaatattctgtgtttaaaagaatggtggcatatgtattgaaaaattgattaggtaagtgacaacagattgttatttgtaacctcaagttctgtcatttagaaacctaaaattagtggaactaatttttgcatattgaggagttgaagaaattagaatgatgttaagacatttctttgccaaataattttatttttatcaaatggaatgcctataaaatttataacagattaaagagaaaccatcagctaagacagttttaaaaagccagatttccaggtggtcagttttcttgtcttttttccccccgagaacaaaacctcattctgtgctttgtattcttatggagtgcttaaaggattgtgccttcaaatagttctatctaaagatccacgaaatgtgtatgtatttagggtgtaaagttttagcattttattattttgcgtctgaggactctcattacatagtactcagcactgttaagctttgtttaatatgttttgtgtaagtatgtgatcctttgctttacaactagttttcatttcccacattaataaagagattatacaagctgtgtacatttttggatctctcagacttaggttctgataatgtgtgaaagaagaaccattattattatcattatatatatttttttgagatggagtctcgctctgtcacccaggctagagtgcagtggcatgatctcggctcactgcaagctccgcctcctgggttcatgccattttcctcccgagtagctgggactacaggtgcctgccaccacacccggctaagattttgtatttttagtggagatggggtttcaccgtgttagccaggatggtctcgatctcctgacctcgtgatccgtctgcctcggcctcccaaagtgctgggattacaggcatgagccaccacacccggcccagaaccataatttttaaagtctacgtttgactgta

SEQ ID NO: 45466 - DNA, 1062 bp, Homo sapiens
ttattttaaccaataaattttagagaaaaaagcactctaatattgcatcactttgtacttagtttcatgtattttctttccatatgtgttatgaaattgactaatatgagaagcaggcattttgttttttttctcaagttattattttcatatttatgccttttttttaagtttatgtatgtggataatactaaatgatcaccattgggtattattattttaaccaataaattttagagaaaaaaatcactctaatattgcatcactttgttatcggtatcacaacaataattagttatcattcttctcctgacatagctctggagcctatgggggagatatcagagttttggaaagttttccttgcaatatcagtttataaacaaatttatagttattcctttaaaattttatctcagcttttatcactacctgactttgcctagtcaatattttttctaccatatattcaaaaacataactacttcatgtaattaattagcgtaagttttctttgcctctaaaaatgttgaaggtacctgactatattactacctgaaagactgtttatttcatattccattttgtcatatttatggtcttcgatccattgtagataatcatggcttttagagataaaagcaatcatagtcataaccaaatccagtccctgacttttttcaggtgaagaaactgggccacaaagttttaaatgcaacattatacagctttttgatggtagagtttttactagagtaaaggtctagggattagtgtatctttcagtaaactcccttattaatttttaatgtatatgaactgaacttttctaatcccagcttgtattgtttatattaatagtagcaataatgacaatatagtatctgacatttattgagcatttacatgccaaatgcactattaaccactgcccatttattattctactcagtgctcatgattactgtgtgaagtagctagtgatttatgcctgttttacagatgagaaaacttagcgtagtttaataaatttcagggctcatgatgtgtttaatttctttg

SEQ ID NO: 45467 - DNA, 1044 bp, Homo sapiens
tcaaatggacacaattcaggtggcaaatattggaaaatagcaaccaattagtacacaattatataaagacaaaatacaaattagcaaattgatagctccgagtattagtccgttcgcatactgctgtaaagaactgcctgagactgggtaatttaaaaaggaaagacacttgattgactcacagttccacatggctagggagggctcaggaaacttacaattatggcagaatgcgaaggggaagcaagtaccttcttcacatggtggcaggagagagaattgccaacgaatgaggaagtgccatgctttaaaaaccgttagatcttgtgagaactccctcactatcatgagaacagcatgagggaaactgctcccataatccagttacttcccacctggttcttcccttaaaaccttgggattataattcaacatggggtttgggtggggacacaaagctaaacaatatcataagggttgatttgggacaaggtatttctcaggataacattctctaaccatttgcaaatcatttaatgtgcttgttaaatgcagaattctgggccatagctcaggatgactgaatcataatttctttgagagattatgagtcttcttgaataccctagagtttaaagtcaaggattttagaataatgtttaatacaactatcatagaaagtgtatgatcttcttaattattcatacatagttaaagaagcttcaaaaataaaggatggaattatttaaccaaagtgtggaaagggaaaaagaagcaaaattacgttggtgggttttcatgaataattggcaaaatgagtgataaagtcttctgtgatggaatcagattgtgttaaacaccctagatctttcacatagcaactgttgtcctctgggcaaaaattagttaccttccctaatctattgcatcctcaatctgtaaagtgaagataataataatatctataatataggcctgttgtaaggactgaatgagataatgtacataacacatacttaagtcctcagtaaatgttaattgatt

SEQ ID NO: 45468 - DNA, 1031 bp, Homo sapiens
ccttttataagcttttctggacatgttctgcattcattagcaaatatgaaaacttaagagttaaaaatgctttacattttatgagactcagtataattaaatgtatagctaatattatcaaataaagttgaaatgttatattatggtgttagtatattttaaaatcaaacattctcaagtgactcatgttttatttttattattgttttataaatatttcttttcagttgatagtggaaaagagaagttgattcccttgcttcagggtccttctgacactaaagaccttcatagcaccaagtggctcaatgagagtagaaagccagagtctctcttagctccagatttgatggccttcacaatccaagttccacaatatattgactactgccacaattccggtaagtacaaacctatcattattcccttgttttgcttttttttttttttttttccagaaaggcttttaaaattggtatatatttttttttttttaggtatttttgtcaattggcttactctgcagttgtgctttttcaaaattcaaatgaagaatttttgtatcacttttgttaattgaaatgtgtttataaataatgattttatttatatgagagaatttagctgtgtgtatagtggttaacttcagattcgtatatataaggaacaactgagttttaaaatatagcatatcattataatgcatattttcttgagatagtagcactttgtaacccaagtttgtcatgtgtaaattggtgtttttaccttctgtaattttttaggaatgaaaagatttgatggtagaactgagaagaaaatctcagaggtcattatctcatttcttagagttttatttttttctggtagcactttgaatagaatcgatttcattttattcaacactgtaatagcagagctatacctctcatgttgagagaaggtatcagaaggatcaatgaagactgagaaaagaaaaatgtatgataggtagagatcactatcagccatgaattcacttagccagtatg

SEQ ID NO: 45469 - DNA, 1032 bp, Homo sapiens
tgaatcaacttctaatgaggagtaagcatataaacaactacagctgaataaatgaatgatataaaggcttattttttgggttcagcttcatccattataaattatgttactttgagcaagtaaacctttctgagtattggtttctttttttctttacttttttttttgagatagaatctcactctgtcatccaggaaggagtgcagtggtgcttgcatcctctacctcctgggcccaagagatcctcctccctcagtctcctgaatagctatgactacaggcatgagctgccacacctggctaaatttgtgtgtgtgtgtgtgtttttgtagagacagagtcccactatgttgcccaggttggtcttgaactcctacgttcaagcgatctttccaccttggcctcccaaagtgctgggcttataggcgtgagccacagcacctggcctagtgttggtttgtcacctataaaatggagatactcttatctgcttactaagattgttgtgaagattaaatactgtatcctcaagtacattgtaaactttaaaacataatgtggattttaagtattaattattcttttcacaatagtaccctatattaaccagtgattgaaaatgtaaggtttttctgagtcatttcttttccttccttaatctcaacatcccagttaatggaatccactttaaattttttctcaaggtaaaaatttgcaaacctatgattatgcatttctgaagctaggagcaaatcctttacctagtttcgttattctccttccacattgaaatgtaccctggacgctatgatgttaggagtcaggaacagttgcaatagcaacaggaaattactttgcttgcttcctttgaaaggtcccagattctggaaggatgccagagggagaaatcccttgagccttaagggtaaccagtttccctcatttatatagcacaaggtcaaattttttgcattttattactgcttgtatagtaaaagtaaactggtattcagagtaaatagtagcttcatt

SEQ ID NO: 45470 - DNA, 1027 bp, Homo sapiens
aggtggaaggatcacttgagtccaggagtttgagaccagcctggacaacatagtgagacccctgcctctatgaatgaatgaatgaatgaatgaatgaatgaaagaaggaaggaaggaaggaaagaaagaaagaaaaagaaagaaagaaagggaaatcagggtcaactcatgaaatctttttttgttaaaccttcgataaagttgaaattttccaaattcttaatggaaactaatggaagttaatactctagataatgatcttacaggaagagttaagaacaatagtaaatttgaataatatctaaaatcatctaacttcaggtaaaataggtttagttaggagaatgctatatatacttctgtagagacactatcaaagtatttttcagtgtatctataataggacattagagtttgatgatattgccgttcttttttgtttttaccctcacttccagtcagttcctgtcttcttgatttgggctttatttagaattattagctatggttagtgttactttgggctcaagttgagaactagaaagaacatttccttgagatagctggatgagttgacagagatacaggaaatgtcaagaatctaaagacgattcatttctatgtgggcatgagaatttctgaaataatgagctgtagttgacgaaaagcaagcagagcttagtgaataatcttttcaggaagaaagaaggtgaccaggccaaaatgtatcacctctgcagggtgataaatagccactgaatggagaggaaagagtgaaggaggaacaggcaatattaaagtaagttgctggtaagtttttaaaaaatcagtttgatattgttgaatcattaatcatcagttatcctaaaaacaagatttattataatgacttatcctgtgtagaaaaatacatctattttgagtgggagactttcaagatcatttctagtccagaagaaaagaaaaggcaaacattttatttgggcaagtgtcattagagttaagcatctagtgagtggaggaggta

SEQ ID NO: 45471 - DNA, 1079 bp, Homo sapiens
aacatggaaagttcttccatttgtttgtgtcatcttttattttgttgagcagtggtttgtagttctccttgaagagatccttcacatccgttgtaagatggattcctaggtattttattctctttgaagaaattgtgagtgggagttcactcatgatttggctctctgtttgtctgttattggtgtataagaatgcttgtgatttttgtacattcattttgtatcctgagactttgctgaagttgcttatcagcttaaggagattttgggctgagacgatggggttttctaaatatacaatcatgtcatctgaaaacagggacagtttgacttcctcttttcctaattgaataccctttatttctttctcctgcctgattgccctggccagaacttccaacactatgttgaataggagtggtgagagagggcatccctgtcttgtgccggttttcaaagggaatgcttccagtttttgcccattcagtatgatattggctgtgcatttgtcataaatagctgttattattttgagatacgtcccatcaataccgaatttactgagaattttttttaagcatgaatgcctattgaattttgttaaaggccttttctgcatctattgagataatcatgtggtttttgtctttggttctgtttatatactggattatgtttattgatttgcgtatgttgaaccagccttgcatcccagggatgaagcccacttgatcatggtgtataagctttttgatgtgttgctggattcggtttgccagtattttattgaggatttttgcatcagtgttcatcagggatattggtctaaaattctctttttttgttgtgtctattccagtctttggtatcaggatgatgctggcctcataaaatgagttagggaggattccctctttttctattgattggaatagtttcagaaggaatggtaccagctcctccttgtacctctggtagaatttggctgtgaatccatttggttggtaggctattaattattgcctcaatttcagaacctgttattggtctattcagggcttcaacttcttcctgtttta

SEQ ID NO: 45472 - DNA, 1026 bp, Homo sapiens
aaatagaaatatgatggtttgctttacatttgaaagggatttatgggataaaggtccgccttaataagcacactaatttcccagcatcctgatattttttcttatttatttatattgttttgctaatgtcaggatggatagtgggggctatgtaaaagaccaaggacctcccttctcctgggaatcctaatctttgttacactaatgtttaaaatacaacatcagtaatttcttcctcttcttcaattttctttttactcttcctgtgattttggccaattaatgttgatatattttgttttcttagtaaatatttgctatctttgttgtgttacttgtttaactttaatcttagatgattcaaaccatttactaatgtaagatagaatagttacttttggcaattttaatgcaacttattactttgaaaatgttagaagggacccctagttttcctttgtaaattgtcgtttatttggcagagaaagcatttaatctgtaaatgctgctctgtgttttatagaatggtgaaccttacaagtattttatcccaaatagatgtttattaaaattttaacttaaatatttgatgattattatgaataagagtttttaaagcagtcactttgctttgatattcacagtgtgaacaagctaaaattttctacctactttctcttctttttattcttccaggtcacctttgtgtcaggcattgctactttggcaaacctgcttgcctttgacctttggttactcagttttagtttggttttgagccagtgtgtgctgaaatctttaaaactaaacaaatatttagcattcatttgatttaccaacaattgtctttttaaatattcagtcactccacaagaaaagtaactattgtcagttacagactgtagtaccaaagtcagattctggaacattctataaattactaaaaaactatcaggttataatttagattggctcagatgattttaggttgttttagaagctgacggtatttttactcacaatttt

SEQ ID NO: 45473 - DNA, 1062 bp, Homo sapiens
tacttctaagctagcaagttagcatccacaatttcatggatgctggccaaagacatgagactcattgagtggagacaaagaactttattatccacaacattagcaataatcacagtattagcatttttttgtgttagtgccctgagcccagtttccataaggtggcatgaagagggccaagaattctgaatttagggaacttgaaccttttataatggatagaaagcatgcctgccctattctccagagggaggcgctgtgtctcctttgcaagggtgtgagcccacttgccctttgcacagaagcaggatcgtatttctatcttctgagactgttcgctatgcaaatatccttaaaaacacagtagggaacaatgacaatcaccacctctacttaaaagacccatagagaattatctctcaatagtatgttccttctttaagtgaattcttgaaaacgacagtacaccttaatcatctttcctcccctttctctcatactctctgctagatcttctatgtaaatataaagtataactatccttctataaaataatttatttccttttgtgtaataaaaagaattttacatatataattcatcaatatataattaaaaaaataatttttatgattttattttgtgatttgttttttcttcttaacctctaatttttatgatgattggctacttttctttgggtaattttatgtcttttctttagctttatttcttataacgcagatattcccaaccacattgataaagattttatagtttcagtaaatcagaaccatctatcaagtctgttatgggcaagactctgttctaagtgaaattgagggcagaaatattaagaagatccctacccttaaagaatttaaaatataatcatatatgcaaggaaattcaaattagctattgtagtatttaagtcgtatttaacaaccaaaatgctaaaataaatttgtttatggtattttatacataagtattattattttgtgctttatgatttttcctaaaatatgacattaattatgtttattttgtggaatcatt

SEQ ID NO: 45474 - DNA, 1079 bp, Homo sapiens
atagtggaagccacagagtggttgagatttctcaggagaccatacagagcaggatgagaagagagtgcaaaattacattcaaaggaactctttaatggtagagtaaggagaaggagccaatggagggagttcagaagcatgattatgagaagtaggcaacaaagctacatgtatatgtgtgacacaattccaaagagttgcaagaagaaggtgcatgacatgctgtagaatcatcaagaacaatgaggctgaaaaataggctgttagtctgtggtcagttggccagaggacctttagttgttaaggaatggatgtgaattgaagaaggagggacaacctatgtacaccaatcattcaagaaatttgattatatagtcacttggggtatgtgtatagcaatagagatgtaaagagacaaggagacaaaattggagataccacaaaggctgaggataatttatacagtgagatcataggtaagcaagatataaaacccatgcacagatgtgagacttaacgatcaggaaaaatcatttcttctttaagacagaggtaagaagataagactatgtatcattatatattcatttagttatttttctttccacaaacaagtatttaggtgggacaagtattttttttttttttgcactgttttagagaatctaagagatcaaaaaatgtataattttctcatgacaagcctcctatttttctcatacagggaaccagtttttcaggttaactttggaatgccctggctgagaagaggggttcattcagatggttagcgggccctaaaattttattttttctttacaaatgtcatttgaaaatattaaagcatgaaggtagacactattatataatatgcaatttattttatcagggataaaagatggttttaaaaaattttactactttggaacagaaaaaggttgaaaataaaataaagtctatctaatgaagtacatctaaagtaaaataacttgaaaatgtaattcagaaagtcgtcagagaatttaatgaaaatatatgtttactaagttgttttgtacattgtaagaaaaattattttt

SEQ ID NO: 45475 - DNA, 1088 bp, Homo sapiens
ttgccaggtagtattactagaggatgcaaggtcaaattcaggatctattttaagatagagccaacagattatagtaattttcaggatgtatggtgtaacagagaagggtcatggttttgtttgtttgttcgtttgtttttgcagccagaaaggtggattaggtatttattgaaacttggaggactataagatgaagagcataggggcttttgagaaagagactcaagagttttgctttggctatgttaaatttgaaattcctattaactatccaaatggagatgttcagtacgcagttggataaatagtctggagcttacaggatagatccagacaattccctggaaatagaatcctcatagaggatacttaaagccatgacattgagtgagatcctctaagaagaaagtgtttgtagagaagagaaatggcccaagtactgaacccttggacatgccagcattttgtggtctggagaatgaagaattaccaagaaaactgagaaagagctacaactgaggtagaatgggaacatggagatggtagtgttcagaaagaagtgaagactgtgttttaaggatgtggaaatgatcaactttttcagattcctctaatagttcagtgttaaacaatggctctaaaaaactaccacagaaattttagtgactcaacatagcagaattcatttctagttctaggaaagtccattactgagtccacagtatgatagctcttctccaagcagtgaatcagccaccttccatttagccactctgaggatccttagggcctcagattcagaaaagagttttaggaagataaagattttgctgatgacatatcatgagttctagatggcagaatggaggagattgcagtgtgtggagtgagagatgaggtcaggtggggattgcacaggtctgtttagtgatgagaatctgggtgatgaggggtattgttagaattttgggtttttcctgatggctgatgtaaacagaatacaaatggcataaaggaattagtactggggtttctaatgcagaattaggtggcaaggctgtgagtattggggctggagggatgtggtc

SEQ ID NO: 45476 - DNA, 1054 bp, Homo sapiens
agtcacactttgaataatttgttcttcttaatgaatcttagttctgagtataaaatattggaaaacagtgacagcctgttgcagatataagcaaaaaactacctctctcaacctaaaaattcttactgcttcttaaacatctcatgatatgctatctggaagtgctttagctcatttactcccctgttcaaattttttgttgttgtctatgtgatttgttttggaatttaggccaggagaaaggaattttaatggtctcagtggattaatttggtaatctatatataacttgaacattgaattctagagacattcatatctttactttgctatttataacaagacagtgttaatcagtgtgctcactctttctcactcactttctcattatctctctacttcttttctcctctttattccccttaccttactttgtttcttgtttttttttcttgacagatttcagaattcctgccttgccccatgactttccattgagatctaggtagactgtattgtttatatcctgcaaattatggaggagaaacaaacctaaatagttgacgtgattttaagatcacatatcttgaattggtagaataaaaaaagaaacctaggttttctgagtcctcccagtccatgctttcaggaaacttttatttaaatatattaatctcactggtatctgaaattctgtcacaaagagttttttgattttttgtttctattttaaatctcaaagcttcttcaaataagcataagcttcatgaggactgggattgtgtttgttttgctcaccacagaatttccagttcttaatctaagccttaagaagataataggtactccataagtagtttttgaatgatgttttttgacatgttgaaattaggggatagtttaattttccatccctccctcctttcttcttttcttcttattttttggtgagctacattttctgatttttctcctattagcccatattatttatctaataaaagtattttaaaaactataccatatagcaatagatatattgtattttaaaaac

SEQ ID NO: 45477 - DNA, 1114 bp, Homo sapiens
gtcactatttgttattatccgctttgtttctttttcttttctttttttttttattttgttctagccatcctagacaataacctcttaaactggagagagcaattaattttaagtggtttgtttcttttttttcttttttttcttttttttgagatggagtcttgctctgtcgcctgggctggagtacagtggcacaatcccggctcactgcagcctccgcctcccaggttcaaacaattctcctgcctcagcctcccgagcagctgggactacaggcacttgccaccacacccaggtaatttttgtatttttagtagagtcagggtttcaccatattggccaggctggtttcaaactcctgacctcgtgatccacccgccttggtctcccaaagtgttgggattacaggcgtgagccactgcgcctggccaaattaaagtgtttttaagaactgtgttggtcaggcagagagtaaatagattgatttaatacatcatttaatatactaaatacacatcttaatatttataaaactgaagcttacattatgaaactggtgtttatttttactataaaaatagtaaaagtggtgtgaagtggaatctcattgtggttttggtttgcatttccctaatgactaataatgttgaacttattttcgtgctggttggccatttgtatatcttctttaatattttatttctttttatttatttatttttttggatcaggtttcattcttgctgaggctgaagtgcagtggtgcaatcacggctcactgccgccttgaccgccggagctcaattgatcctcccacctcctgagtagctgggactacaggcacacactaccatgcctgtctaattttttaatttttgtagaggtggggtttcaccatgtttcacaggttggtatcgaactcctgggctgcctcagcttccaaaagcactgggattataggtattagtcaccctgcccaacctaatattttcttctattcaaatcttttgcctactttttagttgtatttttagtagagtcagggtttcaccatattggccaggctggtctcgaactcctgaccttgtgacttcttacagttgagttgtaagag

SEQ ID NO: 45478 - DNA, 1028 bp, Homo sapiens
tattactagtttttttttttaaatatttagcctggaaatgattgcatttcactatctccttagattggccccattacgagtaaggaaatgcaatgcattatgacctatgcagaaagaattactggtgactgctttatacttaagacaactgtgagtgtggtagacagtttgtgcaataaatagcacaaatgtatgattacatactctctcagattttcattttcatgaaatgaagttcagctttgaatcattccagctctttgacatctgagcttttcttcttacattcctgacaatatttaggaaaattacttgtgactttcattaatgatcttgcaagcttttctaacttatttaatgtctttgcattccttatagtagctagataaatttttttttaccgatttctttaaggttatctaattgttttccctacttaacaggcaacattcatattactttaatggaagtcagtgaaagcattgacaatttctcatccagacccatcacattcctaataaagagcctttgcaattctcctagaatgtttctcttccaaatagtcccacagctcactctctgaagaattacactttttcagaaaggccttactggagtatcctattttaaaatgacaccaccatcagctagtgtcccattactctgctaattgttctccagagcttttatcaacattgacataaactaaatatcagttaatagttggttatctttctttctaccactagaatgcaagctctatgaaaacaatgagtacgtattgctcagtgctctgtccctagatcctagaatgaggtcacataattttagctcagaatattggttcaacaaaagaatctgccttactagaagcaatctttatactgctgccaatgcttaagacccagccgtttttactcattcattcccctccctcccttccttccttcctttcttccttccttccttccaacttccttccttcctttcctaactctcccttcctccctccctttctccctccctcc

SEQ ID NO: 45479 - DNA, 1069 bp, Homo sapiens
atatttgtgttccctcaaattcatatgttgagcccttaacatccaatgtgatgtttatgaggtggggcatttaggaggtaattaggtttctgtgacatcatgaggttggagccagtgggattagtaccttaagatgaagaggaagaaataccagagcttcctctctcttggtcgtgtgagaacatggcaagaaggttatctaattgttttccagcctcaaagagtgttcttaccaggaaccagatctgccagcaccttgatactagaactcccagagctcttagagatggatgtctattgtttaagccactagtctatggtattgtgttataacagcctatgctgaccaagacagctatccattccatggcactgatgttaccgataggatcttgtcttatagagagtagtaggagtcttcaataccaatttaccctaagtcacacactgttataatattcacatttttagcaaaactatagggtaactactaatacctttgttgttggaagggcaatgctattcttttcagtcccttcttcttttaaaagcagtgattattctagttttgcattgtttacaattgaaataatgttttagagaatcttagagtattatatttctttatgaataatgaaatgttgacaaacaagtcacgattaatccagtagtgactttcagaagtaaataatagttttattagtaacatagatttctatatgtaaaatgtttttcacaaatttgaaatcaattatctcttaatactattatcattattattacattttgtacatgcagttcatttcacatttcctaacacaaaacagtattccaaatgtagaattttagttacagagcaaataaaactgaaggttgctcattttcatttcctttctttctatgcctttcaactgtcttcctcttctatgaagatggactagatatcatttataatgtcttgattttctttaaagtacctattacttaaattaacatcacttagaattaataaacactttatctttaactgtctattttattttattttaagatggagtttcgctcttgt

SEQ ID NO: 45480 - DNA, 1050 bp, Homo sapiens
ggcggctctgcctgatagaatgtagaggaacagattcagcttctttagacactttatcacagaagttgttaaaaaggaaaacataagatatctcttagcatggcagtataagctccctcagcctatctttcctactgattattcctatatactctaggaaaaattcaaaaacaaacaattgactacccccacataaatgcatgttctcaacttgttttaaaataattgaattgcaaaatgactttaaggcagcttttagaaatttttatgaggtgcaaaggaaagcatactaaatgaaaaggcaataaatctcaattgaggaataaaaagtataaaaagagtcaaatggaattttagaactaaaaaatacagtacctgaaggaagaaaaccatattatgtgggcttaaaggtagcttggagatgatagaagaaagagttactaaacttgaacatagatcagtagaaattactgaatttgaaaaagaaaggaaaaaagtttttttaaaaagtgaacagagcttcaatgattgtagaatagaaaagtcgaatattgtgtactacttggagtttcagaaggagaggataaaaggattgggatagaaaaaaaaaaaagaggaaataactacagaaaactttgcaaatttggggaaagagatagtctttacgcatccaagaagttcacctaatcccaaacaggataaacccaaagtaacaaacatttggacacattgtgattaaaatattgaaaacgaaaaataaattttttaaaattttgacaattttgacagcagatataggaaaagacacattccatataagcaaataatgatttgaattagagtagatttctcattagaaaccacaggagacagaagacattggaacaatattttggaagtgctaacataaaagaactgttaacctagtgaagataccccacagaaatgaaagagaaataaacccatttttagatgaagaaaagctaagaaagtttgtcaccagctgctctattctacaagaaatgctaaaggaaattctgcaggatgaag

SEQ ID NO: 45481 - DNA, 1054 bp, Homo sapiens
agatttggaaacagagcagaaaattaatgcacaaacatgtttaacaataccaaacaaaatgctgtaaatccaaaatgaaaactgaaactgcatgaggaagtacagcaaagcttttactgaggagtgcttactaaatttgcagccacagttttcttagcattcttaccaagtataccaagtagtgttaaaaattgaagtcttagtgattcgagatgttattttctctcagttctccatccttggaatatgatattcttctgtctgttggaaggagggtttaatttaagcatacttctactctataaacctatacataaagaaaggctatatatattgccttttatttaataagcatccttatctggaattagtttatgctttttattagatgttgtgttgcattagacagctaaccaaaaacctgatttttttatagcttctcaagttgtaggaatttctattgtagcagatttagaactacttattttgtaaaagcatttatatgaaaactgcacaaacagtgagatatttgctttgcttggtgtatttgggacaaagagtaactatactgtcttcaggtttaactctataattttctctaatagtaaatcccagaacactgttactttgctatgcttggtgcctaagtgttcttgcagtaaacacttgcctgtcattctatgaaaatcttccccattgggcctccttctgaggttgcagggaaattgaattttcttctgactgaaagatgttataaaacaatgaggttaaaataaaagcctcatgtaggagctgaatatacctgtgtttagatggcatgtctgtggtaatgagagccgggactttggtttgttttgtacaggattttaattatcattcctgcttttaagtgtttagagattagtggcttctgctctgacaacctgtctataaaaaatggaatactgaccatattatattgtctttgtttaaattttaaggggtattttgttctgacagttaactactggttatgactcgttagcacaggaaattaatatttttgtttgagaca

SEQ ID NO: 45482 - DNA, 1050 bp, Homo sapiens
ggaagtgtttagatttattttcctctctttgaatgttcattagtgtctgtgaaaaacattcttaataattttaacaaatattcataaagaaaccgtaaatttatcgttaatgttcttcagaaattttttctaaatttataaattaaatgccatttaaaaagtttctttacttagtgttttttaacattttattttaaatagtataaagtattattactgtatgaaaaaatgatatttatattacctcaactagtattcactttttgccttatgttaagggagttaaggatgcagcaattaaaaaaaaaacaccctttcttcatgtggcttacctttcaagtatgcttacattccacgtttaaaatatttttccaaattaaaacatttatacattgaaataccttttatactctttacaggattcaaatgttgctattaataaagatttattatgagttagatttttttagattagtggtcagtagtaaccctctccccagtttagacacttagaacagacaacatcactgtgatcactgtggcctcttccactgggggtataccttaacaatccttctccatctgttattgctcattgtccagcaacatgctaataaaactggtagcacttttcttgctttactatacatctttttgtttttgagtgcagaaataaaaaagaaggggaatcaaaagagaaacagtgaaaatgttgggaacagtgaaaaatgctttgagagcaggctattattgggaaagatgattatactgcacaaccatttaatgcttactttccagggtttttttaatggtcaattaaaaaatacaaaaataatttattttcttatcttccttcattataaagtctaaattaaaagcaaaattagcagtgataactgaattgcatattttttcctctcaccatgtcagtgggtgataggcaacaaaatgagaggaagaaaatggaagcaattgaaatgtaggagtgatgggataatatagctcagactcattactgctttcctatttctcttttttttctgtttatgt

SEQ ID NO: 45483 - DNA, 1016 bp, Homo sapiens
ttcaaggccgacattattctttgtgatattcataggactctactatcgtacctagtacttaggaaatgctcagtaaatattagttggtttgaattcatgaacaagattatgctacacaattatattgttgctacatattgaaaacaataataatagttggagttatggaaaagtcaaataggtatgaaaaggtgaagacttcttattgttagttgtgtatatctagcacaaggcccaacacacagcaggccctcataaatatgaaattcatctgttaaattgtgtcaagtggctgtgctcaccatttttgctcttctccttaatgtatgaacttgagtcctaggaaatgtcaccaaagtagtgaaggtcaaataagtaagaatgataaattatcatctgaaagctatcatgtttctttatctgtattctaccgtttttgcttcaggagattttagtgtgtggccattccttagaagtgaatataaccacaaacctggacttcttcctaagtgtggctcaagttcaactcttacatcagttaatagtagcaaatatgactggactggaaccatcaaacaaggctgcagaggtaactgttacctgattttgatcaggcttactgcatttgttccaactttacattcacagtaggaaaactataattaagctgactgctttctgcttaattattctgtgtttaactttattcaaaatatagtcataagtcattttggattgatattctttattttagaaatttgtttggtctctattcctcttatttatcatgtacctttgcaaaattgctgtggactgacctcagaggaacctctgttatatacataactttattagcctgctgaagttctaaagtatgatgcgagaatcctggtatagctttcatttactcggatacattacagtaataaggcctcttttggaagtgaactttctaagagtactatgggaatatcttcaataaataacttgtaaagcatttgtttcccatgctcagt

SEQ ID NO: 45484 - DNA, 1040 bp, Homo sapiens
cagttgttctgtggcaactttgcttttatatgttttacagattgtgcatcccctctctcctacgcacccctcaaccactgttccattaacccataagacgttctttgaagaaagtgtactgtggcagaaaagtagtttgaaaatctctggaaacaatgagatccagaacctcctccagctctaacaagtcatgattctgatgcattgaatttagaatatgaacttggcctagattactccattttaactccgtgtcgactaaaggaaagctgtgaacaaagtcagttttttcccacatagctgcacacaggtgtgacttagtggaaactgtggaactcagccagatctttagctccctagtgcagtgctctatctccaagccctacttcctgttcttgaattcagtgatttgctaaaatagagacacctggttccagcaccttgcaaatggatttttcctttcagcattttaaagtacattcatgtattgatgaagagctttctctggaaagccatctgtctgaaatctgcaggaaaaaaaaaatctccctagctgtcttagatattcataatggtatgtgttgcttcactcctctactcctgcctcctgttcccttttcctcatgttttcattcattttacaaaacaaatatttatgaagcacctagtatgtgcccaacactacatatgtagcagtggacaagactaattagtccctacaattaaggatattgccatctagtaaggaaacatgtggacaaccacaacaacaaaaactttaaagatttttgagtcatggttaagagctatgaaagaaataaggttccgagacaaactatgtaggatgtgattttaaaatgaactccagagttatattgccagtgttcaaattccagtttcaccatttactagctatgtgtttttttttttttaagggggcagacaggatctcgctttgtcacctaggctggagtgcagtggcgtgatcatggttcactgcaaccttagactcctaagctcaagctatcctcccaagtagc

SEQ ID NO: 45485 - DNA, 1033 bp, Homo sapiens
tgactcccattgtaatcatcaacatttacttaaaacaaatgaaaatggggggaatcatttaaaggcagtgattagctttaatgttacaaaacccaactttgcttagagcagaaaagaggtttacagttgggattaagttgatcttccttggatatgtgacttcatttttttttttttttttcactgaatagcaccttgtgcttacttgtgctgaattttaatcaaatgttggccacattagaatttaatatgaaacaaccaaattttaataagaaagagatcaaggacaacacagagcagcacataaaatgaattaaaaggaattaattgaattgatatttcacatattatctgctggttatacttaatattcattaagtataaagaatacacttccttctagcaagatatgaaagacttggttctaaaagtaagagcaagtggacattgatggtcaaacattccagcagccaatttaatcccttccttttcctgttactatggactgcagacctggggtttcaaaccaggaaatctcttgcccttcccatcacatcttacgaggtgcagagtaggtacagaatcgcagagcatgtgaaatactgcttatagagttagccaaaggtctggatatccacagggagatggtggcacttaccttgcatccagagcaatttggaactggtttcttggttgatttttgctgtcctgacattggatgatgatgatgattattattattattattattatatatatttttttgggacagagtcttgctctgtcacccaggctggagtgcagtggcgcgatctcggctcactgcaagctctgcctcccgggttcacaccattctcctgcctcagcctccctagtagctgggactataggcgcccgccaccacgcccggctaattttttgtatttttagtagagacggggtttcactgtgttagcaaggatgatctcgatctcctgaccttgtgatccgcccgcctcggccttccaaagtgctgggattacaggcgtgagcc

SEQ ID NO: 45486 - DNA, 1028 bp, Homo sapiens
aaatattcgtgaccaagccaactaaaagttctgtattttgtttaattgtcttaaaagttacaagtgaaaaaggtaagtaaagttcatgggtcatgaaagactatgaaatactggagactacagtatctgatttatccacaaataaattgcaacccagacaacactaggtctgttcccatgcctttccagttgtacctcaatcatagcagggaaaggttaagactcaaacaaaatggaagaatttaaacgtactatactcacttttaggtgcttttcttttttcatcctcattgctttttttattcattagttactcatattttatccatgtttaatgatgtctgtctttgggaaacacctctaaaatattaaaaatccttctctcactaagctgtgcaagttagtaaactctagttttggaacttgttttttccccctgtatgtaagaaaaactatatacccctaatccttttacaatgctgttcttaaatctagttaaacacaaaaacagcaactatagctttgactaaacatactttatacaactctaacatgtagtgtccagcaaatgttttaaaataattatttgcatcaagtcaaatcagagttgagattagctacttaatagtaacaattttgttatgagactataatgaacaccaaaatctatttttagtacagttttttctttatgcatactcaaacagtttaggatgataacaaggttagcaaaataataaactgtaattacatgaaataagatttattaacttctagttataaggactgatttcttggaaaattgtgattaagagattgccacatatttttttcaaaaaaattgattttaactgtatttttaaaataaaacataacttaagttttgaatgttaatttcattgtgtagttgaatgtcttaaaaattcatgctttgcaatttggataaaatacatgcaaacatatattcaaagtataattttgataagtggtaaaaactatccaccaccaccaaaaagcaaatatactca

SEQ ID NO: 45487 - DNA, 1084 bp, Homo sapiens
tgtgacagcatttagtgttgcctgtggtcacaggaaattgcccgcttgtccatataagccagtaggctgtttgctaggaaagcttctagcaaagcaaccctgagtgatgagtaactgacaacatcttagatgttcttttactccctggttggtcccctggacttgttggctatgttggcataacatactggggctgagcaagggaactgaggacaggaaaaagcatgtatttacaacccagttaccaattagaaaaatgaaattactaagaactaatagcagtagtttgtataaagcaacatggtgctgtaaagaggcagacagaatctgcaccccagccctgctacttactgaccagctggttgtgtcaaaagttactctgtagtgcatttcccaaatgaaggcaaaaatatttaatttataggactttgagaggattaggtgacataatgtatgcagaatacccgacacattgcttggtacaaattaagtgctcagtaaatattggtctttgtatatattcctttccccaaaatcacaccacatgaatatggaggtcatagattactaaatgtcagagctgaaaaataccttaaaggtcatccttttttatcaataacctttattatccttttctcccattgacctcatggtctaggcacactgcatttagtattagataactaactataccaacttgatacaattttaaccaaaacaaacaaaaactttagaacacctccacaacttagtctcagacaaattcatgatttcttttaggttcttaggaatactaaaaatacctcatggaccaccattactatgtgggacccactaagtgtcaaggaaccttgggttgaagcccatggagctagtcttaactccctcattgagtacagagtgaagaggttaagcggtttgcccagggatactgtatggtggagttgagactagaacacacatctcctggctgctggcctttctgttataccagtctttcaaaacctggattatgtagatcaagaccattttctaaggcactgcagtaaattacttagcaagtcatgttgttttcaacattatt

SEQ ID NO: 45488 - DNA, 1057 bp, Homo sapiens
ccaacctaaactggtttaagcagtttttacgtatgtgaaaagctccaaaccagtgttgtcctgaggcatggaagagtctgtcagatttcttccctctgcgttacgcagcttcagcccttaggctccacatgctgactgccagcagttccaaggccttcattttcttaacctcaagaccagggagcaagaggaagggtcatgttcccaaaagtattattataccttagtggttttcattgaatattatgctcattcctggaccaaatcaatctccagagaatatcaaacataaagtcccataaagttccccatcctgctagactatttcccggcaaaccagtcattggattccgttgtcaccagaacatagctatagctagctcagtgcctgccttcattgcagggcctctgtttctgaagcacattgtgtgtcctctggtcctctttagtgctcacctaagtctggccgactttctctcttcttgttccagcctcccaaatgtttgtgtgatcattggcttcctaattctgtgcaattttactgatatttctgtccccacctttatctttattctcttgagaattctagctatcccattctgtgtccccaagccaaaaaaaaaaaaaaaaataggatttgtgtaatagtaggaaagtgtttttctatatttgttttctaataattcaagtctggaatttttttttcattctctccttgccctagtcaataaagtcaataagaacttgtaattgtataacgttgggggggttaagaagagccttccatcaactctacttaagttctctaagaggtaggcactttgcaagtgatatgcatcatatagaatgatatgaattttgacatttcagtactagttcttttaagacaaagcctcataattttagtacaatatcagtatttagcacaatatcagtattttaaagtggttcctgcataatagagatacctaacatgatccaaattctatatgtattatgttatttctacaaatataagattttgtcatgcttacaaatactcttttttaaatgaaag

SEQ ID NO: 45489 - DNA, 1051 bp, Homo sapiens
attccttttctgggtatatttactttgaactatagcatatagtttttctcataaatctaacctgccactatctgtttttaagactttgtaaacttcaagtggttatgatgtgtgaagtttggattaaactaaaatttttagaaaacacacgttatatattttgattgttttgaattttaacatgggccagtaaaaaacttgagtgtctagcagagtaacatactgcactctgttactgtaggaaatcacagaaaattaccctttcccatcatgttaacaatagacaaatgaagcagctgttcttattcttaatgtagttgcttgaaaaacttgcacaatttaatgaaaatgtctctactcataaaacttaaaatgctcacacatggaaaaagtcataatgttttggcaaatattactttgttaggaatgtgaatgaggtatacctgcttcataactagaactctgtataaacggcatgaaacggtggtggactgccaaccaagcaagacgactctgacaaaggatgaattaatactcttcaaaaatatagatagttctttcccaaacattttttttgataaggatgaattatatactcttctgtatttttttttcaggcataattcttgggtcatcatttctactcagtataaacgattttctccttaaaacaagtctcaaagaaagaagccgcattctgataggaccatgttgtgctactgccaatctggaagctaagtggtgtaaacacagcgggaatccaggcccagaacaatccataccaaaaatatccattgacttaagaggaggtctactacaggtctgtgggtattggccatatttttttcataggttattaactagcctctgttcattttttgaactgtttcactaaattttaaatctttgtgtggtaagaaagggtatttgtcagattgctacttgttaaattttcaacaactttattgagatataagtcatataccagcaatctacctatttcaagtatacaattcagtggttttttagcatattcagagttgcacaatca

SEQ ID NO: 45490 - DNA, 1034 bp, Homo sapiens
gtgcagatctcaatatgtatgtctggttaattctgtataagttgtttgatgataatgttaaactcttgatctgtgccaagactttggtactttcctgtccatatttcatggtcatcttctcacaatattaaagcatgtgagagcagattgcttgtaaggactttttatctctacccacaaaatgctgactcatgacagaaggcatcttggaaagagaaatggcttaagggtgtatggctctttcttcatgtgataaaaattaaacctctggcgagttgtataaagtgctttttaatatatctatatattttttcttcctactcccttaaggtctcataaaagaaatcactgtccactcatatttgggaatctttgagacagtgatccacagcctgtgtatatatgagtgtgtgaatgtgaagaagaactccttttcatttcccaaaacctttattcttgtgtatatagacagtggaggaatcagagaaagcgtgatgatgaataagtccctgaatcatttcttttctctctgctggttgaactctctcctcccaaaaagtgactgtggccttccagatattgtttctctccatttggctacttgggtctgcccttttagatgtatctagatttttgggtaattcatttagtgttataagccatttatacataaatcttgacatttggaactgctttgtcacctgtgtttctagttacacactggtataatccaggatttatccagaaaattctttcctttacccttccctaaggctaaagctgagtttttgtcttctcttccttgaatggaaggaatacttacattttttccccaggtttgcttttgaggccctttgctattttcttttaggtggtgattgaactctgtatacgaagtcctccagggagttggcctttgccatgcagtccttcttgcatacacagtccctgaagtactcaggtgctgctcaggtctcagagttcttggatgatggtacttatgagctctctatgtcgtattgcctactctatga

SEQ ID NO: 45491 - DNA, 1024 bp, Homo sapiens
gataaaatgagttaggacaaggtcttagataccacattcccttactgggaaagaaaaccaacttgcacaactttggctggctcatatttcttgttatacaggcactaagaagcagcggttgccatgaaatactttatttaacctttacaaaaatgttttcttagtacagcaaggcagtttagttaaatgaaaataaataactgtaaaaattttggatttctcttatatccatctattgacttcttttttctaattaaaaattaaagataattacagttgtccacattgccatgatgactaaaaaatgaagtttatgtaaaaatcacttgatcttttcttaggacatgtgttggcatgtcttctattttacattaaactgaattttactgaatagtgaatgttacatctgagaacagtttaaaagaaagtttttattcaaactttaggtaggtttctctattgtttgtattttgtcaaaattgattttcaaacaaacaaaacctgacaatttgactcccagaatatttattcaaatccgaatgactaacagacagcctctccaatttcttatcttgttgctcccatttctcagctcacctaaattattcatcatcatttccttctaacatactgttaactctcccactgaagaattgggtctaaccaaatgcatgatcaccattgactatcattctgttaagagtttgtctgcatagcatcagaatctcctggttgttgacataacttaagcaatcaaagtcgtatttattttacttatttttaaaaaaagaaaatgtgaattatttcagattttatagacagtccctcctcttctgtatgtacatatatatcaaagttctttgaatctgtgcttttcaaccctttgtggtggtaccaagggtaaacagtcttaaggactgtcacacaattctagacttaaggcagctgttaatatcacagctcatgttttttcagtcacgtatcatttatagggaagcctttagaagaatgaaaacaatagata

SEQ ID NO: 45492 - DNA, 1025 bp, Homo sapiens
aagctgggtgtggtggcgcatgcctacagtcccagtttctctggaggctgagacaaggggatcacttgagcccaggagttttaggctatcatgcactattaccaagcctgtgaatagctgcttaactctaggctggacaacacagcaagacctcatctctaaaaaatcttttttaaaaaatcaactgggctgagcacagtggctcacgcctataatccagcactttgggaggctgaggcgggtggatcacttgaggtcgggagttcaagaccagactggccaacgtggcaaaaccccatctctactaaataccaaaaattagctaagcatggttgcgtgtgcctatagtcccagctactcaggaggctgaggcacaagaattgcttgaacctaggaggcagaggttgcagttagctgagatggtgtcactgaactccagtctggatgacagagcaagactgtctcaaaaaaaaagaatcagttgatcttatgtgtgggtctatttctgactctttcaattctgtttcattattttattttttatatttatttatttattttgtactccttgaggagcaaggctaccccctaggcagcctgcccacagtagcctgtttcattattttaaatgtccatctttactccattaccttcttgtcttgattacaatagttttacagtaactcttgaaatcttactgtaataagaggctggaaaaaaaaaagagactggaggtagtacaagtcttccacctttgttctttttaaaagttgttttggctattctaggtcttttgcttattacaaaataacttgcttgtgtttgaattgggattgtgttgaatttatggatcaattttggaagaactgacatcttaatattgaggtttcggatccatgaacattgtatatttcttcattcatttaagtcttcaattttttttacagcaatgtcttatagttttcagtatgtagttcttgcatatttttgctaaacttattcctaagcattatatgtagctcatg

SEQ ID NO: 45493 - DNA, 1048 bp, Homo sapiens
acgagagaaatttcttttctcacacttctggaggctggaagtttgagatcaaggtgctagcagggttggttttttcaaggcctctctccttggcttgtaggtggccgtcttctcccagtgacttcacagtctgtccatacatgtatgtccaaatatcttcttcttataaggaaaccatttttatgggatctgggccccctctcatgacttcatttcaccttaattagctttttaaagaccctatctccaaatacagtcatgttctgagatactgtggggttaggacttcaacatacgaatgttgggggatacaattcagcccatagacaggttataattgttttatgtataactgaagctgaatttctctacattcttatgtttaccttaggcttgcttgttgccagtaactgtttcttttctaggagcatatcagcgcttcccactgtagttgcctataacaatcgagctcaagcagaaatcaaattacagaactggaatagtgcttttcaggattgtgaaaaggtcttggagttagaacctggaaacgtaaagggtaaaaaatattatagaattcttttacatttacagcaggatccattaataaagaccatttgtagatacttgtaatgtttacattaaaaatatttcagataaactcaaatttctgtatgtgaatcaccaacttcataaagttgcttttaaattgaacttgtaagttaagctcctgattatttgtactgaagtagctaataatcccagaggatttaataaaatacatatatattttaaagaagtatctcaataaacaaaaaaccaacaacaacaaaaataaaataaaagagaagtatcttggccaggcacagtggctcacacctataatcccaaaattttgggaggccgaggtgagacgattgcttgagtctaggagtttgagaccagcctgggcaacacagcaaaactctgtgtctcaaaaaaaaaactcaagcttgcatttgaacattctttttctccaaaaaaaattaagtataacttaatatagattttc

SEQ ID NO: 45494 - DNA, 1049 bp, Homo sapiens
gccaaataggttactcaagaacatttcaggaagaggtaaaacctaagccatgttttgaaatagactcaggtcaatgagaagggagagctcagtgtgactggattactttactgtagaatttccagtaccacattgcaggaggaaggaacttggtaagaaaaattctgccactgcaggtatgcttcacagtgcaggaaagagcagacaggagacttacgaagcaacctgaattaatattctgtttttaatagtgacccaagttcgaaaatagcctaaaatttaatcttactacctgccgttagatctcttttgtatcagtttcccatctgtaaaataggaccaatttatttttatttttaaaaaggaggtcagagtgtcccttttgtatcagctgttttttgttcttttttgttgtgtttgagatgcagtcctgctctgtcacccaggctgaagtgcagtggcacgatctcggctcactggaacctctgcctcccaggttaaaataattctcctgcctcagcctcccaagtgtctgggattacaggtgtgcaccacttcgcccagctaatttttatatttttagtagagatggagtttcatcatgttgcacaggctggtcttgaactcctgacctcaagtgatccatctgcctcagcctcccaaactgctgtgctggaattacaggcatgagccactgcgcccggcaaaataaggccaattattttctgtaattaagcagcggattgggatgactatttcaataaacataactttgatcctaattcatacttgtgctaaaacaagggcaaagattttgttagggtggctacaataaaaaaaaaaaggtggacaataacaagtattggtgaggatgtggagaaattaaaaactgcatacattgctgatgggaatgtaaaatggtgcagctgctttggaaaagtttggcagtccctcaaaaacttaaacagagttgccattttgatccaataattctgcaacccctattactgaaagtagaaaacatatgttcacacaaaaacttgtacaca

SEQ ID NO: 45495 - DNA, 1051 bp, Homo sapiens
caacttttaattccattgtctgatgtgagtggttgttatttgtttcttttagtgcatcgccaaaatataaatcaacattaggttttattccattgttaccatgttcttcagcaatatgattcaactgtgaaacttctgaacaggaagcagtttgggtaaccacagaaatgctacactgatgtggggaattttccagacggtcattttctacctcaggaagaatgttaacagtagcaaagcgggtgtgataatcactggaaccatgactacaagaagttttcatgctttctaggtcagaacaactaaattcagaaaaatgactagagtgagaatctgctacagaaggcatactgtcactgagggatggagcctcaaattcacttgagttcgtgctttgttgttctaacaactgtgcatccatgtcctctctcgtctcatttatcttcatgttaccctttttcctcagtttaccactttttgattttttccctgctgttgcttctttggaccacttggtggcactagatttaccttcaggcaagccactggatgaaccgccagcatgacttcgggtggcactgccatcatccacactactgcttccactgttgtgcctgaatttggatggctttgactcaatatctacttgcacctccatactgttgccttctctgaaatataagagtaacaaatacaaacataattgctgacttctttttgttcagatgactgggggaagggtttctatgtggaaaattcagactatatataagctatgagaacaccttaacgcagaacacgttctacttaaaaaacatacttgatataacagaactctttataatgcttcaatgttttaaaatagtggtggacacatttattgcttatgctgttctagacactatgctacctttttttaaagaacagctttattcagatacaattcccctgtttaaagtgtacaattcagtgatttttagttgtgatcagagctgtgcaaccatcaccactacctaacttcagaacattttcatgatcccaaaaagggatc

SEQ ID NO: 45496 - DNA, 1068 bp, Homo sapiens
tccaagtagcagtaaaatatagttacttaacattgtgatttttaccaaatgaacacagctgcgttcccttatttttttcttaacaaaggtaaaacatactgatcattaaaaaaatacaaaaaggaataaaaagatgaaaatcccttgtaatcccacttccagaattaacctctactaacattttgatacatatattttcaggctctttaccctgtcttctcactcccctctgtatatatgttataaaacatgctatcttgtaacttgctttttcttattttacttaacctatcaggaacatctctttgcacatcaataattgtaaaggtagtgttcttacagcttcttaaaagtaggacctttcattttctctggatagacccagtgacttttacctgttccagtgtcagaattctggtaatcttgcctggcatcatgggtgagaggaggggtgttgtttttcaaaggccaaacatcttccagcttctttgtgggttataatcaagattatgatataaagctgtagaagggtaagcagtcagcaaaagctatggctgatggtctctctatttagcacgtggcatttttttattgaaattttctgaatgttgagacgatcttccagaaggagggcaagggtcatgcatgttcttccttggggttcttagcccccactgccaccaagcctggctgtgcagtggagtgccgtcttctcaggagagtcttcgtttcactcctgaagacaagcatataggccccttttggttttaagtgctatgttgctactgataaaaaaagtaaaataaatccgagcgtgacatgaaccaacccaaaacaacaatcaaaaacagactggaggatgtgatgaaggttctagaatctgaaatggtccttttacaggttaacgaaacctatgaactccttctcaggataatgcttttgagctcataaaatgaagttcataagattacaaatgaagccattatattgataacacatttatccaaatataaaaaacataggctggatgaggtggtgcacgtttgtaatcccagcactttggaagac

SEQ ID NO: 45497 - DNA, 1028 bp, Homo sapiens
actacctcatggtactctgtgctttccataaatatagttttttttcagtccttcataatggccactgagcaggaatgatagtgattttagcatgaccatttttaaaaaatgaggcacaatacatatgaactatgcagcttgaaaacaatttagaatctatactgtgctttacttcctttccgaacatagttctaggatgtgcctcttttgcaatggttactggaggtagggtggtgatctgtttttcctgcattactcagtgtatttgaaattcattctcagtaggaaacccgaattttttttgttaaatagagttgaagtatacttactatagccagatttcctatttgtctcataattttttctcttcctggatatggcaggaaataggacttgtttttcttttccaatgtgtattgtaccttttctgcaggttaaaccacaacgactggattaagcagtatgaaacactagccgaaatggtagttccaaggtctagcaagtaagtagaagtctttgtaaaaccatttgtttcctagaattccttttagagtttggatgttggcttaggaaatatgtttgctgtcttgcctttgtgataaattaacctcatgagtgagttctatgaactctagttgtaataattttagacctagaagggacttggcacagtctgtttgacaacctcctgtttatagacttagaagtttgaggccagtgaggtattaatagtttgcccaggatcacacatctcatttgtggcagggctagaactagaacctaggtctttggtgtggtactttttctgcctcactgtgctgccttttgaaaattctttattcattattgcatacctactatgtgtctataattcctcattttacttggcaaaggaagtgtaccagaatggctactggactgccgtgttgatctccagatgttcaccatcactttgagcttagattttacctaatttgtgtgttccttttatttaaaaaacaaacctgtttttattaagcactttttaa

SEQ ID NO: 45498 - DNA, 1028 bp, Homo sapiens
atttttttaataccctcccaacaattaacacagtagttgtattttcatttgttttttatgtaacaatgtctgactatttttagatatcctaacagacttgtcatacacctagcagcaattttcctagtgctcaaaataacatatactctgtcaatctcaatccccgctcctttcccttggagacctttcttcttcagccatctgcccttctgtcaaatgtgttctgattacttctggactagatttgtagttgtcacatggagaatttctcttgtcattcttcagtgttgaatcagctaattcctgggtcccatattattttccttccttgtttattcatatattccttcaatttgtttcaggaatattacatcttctagttgcttcctaaacagggatacttgaaagtttaaattttgtattccttacagtgccaaaaatgtcagtagtctactctctaaatgtttgggtggatctagaattctaggttgaaatgcatttttctttagaattttatagtcattttttcattttcttctagcttctgatattgtcaaatattcacagtttaatttagttacatgtattctgtttttttcccccctctggaaacatttatgaccttctctttgtcttgatgctctgaaatgttttattgatatgctttgtcagtgttcatttattgttttggagaatcatgcatttattctgtaaatatagagaaatggccatgtagcagacactgctttaggcactggagatagagcagtgaacagaatagacaaaatcctttccctctttgaatttacactctagtggtaaaggcaaaaattaaataaactagtacataatgaaatgccagatagtaataaggatttaagagaaatgcaaaccatggtaatgggaaagataagagcaggataattttagataggatgggcaggaatgcctctttgaggtgaattgagtggagactcaaatgagggcacaagactcactatctgggtgaagaggtgaggggaacagca

SEQ ID NO: 45499 - DNA, 1049 bp, Homo sapiens
tcctgcctcagcttcccaagtagctgggattacaggcacctgtcaccacgcccagctaatttttgtatttttagtagagatggggtttcgccatgttggccagtctggtcttgaacacctgacctcaagttatccacctgcctcagcctcccaaagtgctggaattataggcatgagccaccgtacctggccaaaacctccaatactttttaaaccattatagatcccccaaaataatactggtatgtacaaactcaacttagtgataaagagatggaaatatctccatctatcactcaggactgtccataaacaagggaggcaaagagcccaacctgaacaaaatggtgatgttcattaagctggtcctcagcctgcctcttgctggtatacttgcctgtctttaaaaacttgaactctatcctgtcaatccagggaaggatctcatttcattcattttaattatcatcactttagttatatggttgctttacttttcttatggacattagaaaataaaagtgaatagacaagatatatttcatatgatataaagacatatttcatatgctataaagagacaagccagtacttatctggagcctaccaattaagataaattcttttaaatatttagtcttaaaaacagaaattattttaaaattatgaattggctaattttttccaagtaagtgcattttcatgttcacctgctttgtatttaatataaattattgtgttgaggccccattaacagccacaagtttttagtcaacttcaaaaatttctactcaactcttatctgtaatccatttagatttgtatctcttcccatcaatcatgaatacataaggtaatattttatagttggaaagcattgcttaatatattgaatcaataaaaatgttgatttcatatatttaatttttataatctttacagattacaatactgtgatgagactgttcctgtaacttttgatccacacacagaatttcttggtcctcagaagaaaacagaacaagtccaaagagacattggattttggt

SEQ ID NO: 45500 - DNA, 1054 bp, Homo sapiens
tggatacttattttttctttgctgtttcactatgtttaactcacctctttacccacccccaaaatttgagtgagtgatttaggtgcttttctatgttattgatgcctagggaaggtccaactcagtgatccacgtggccctactccttcagcactgctgctttctactgggtggcatctatctacatggcgagtgtgttgcctaaaaggaaattcagtgcttgcagagctagtgttactaatataaccttgtaaagtgcagaattacattggcaattttggttgcatatcataaaagattaggttagggggaaaagggtgctttctagcttttttatactgaagcaaaacaacacactattcattaagataccaaaatgtgtattttcagcttacatcacgagaaaaagcagccaaggattataaccagaaattgaaggagaaatttcagcattatcctcatataaaacgtatagctcgtcatcgacatctaccaaaatctatctatagccagattcaggaacagcgcatcatgaaagaagctcgtcgacgaaagtatgttttgaggcatttgactctattacccttttctgacttctgctctcatctcaccaaaaacaaagttaactgccattcaagggagtagtttatgtgctattatttaatagtatgttagtgatgtgtttgaagacttctacagaaggccttttcttttttcttttttttttttttgagacggagtctcgctctggagtgcagtggcacaatcttggttcactgcaagctccgcctcccgggttcatgccattctcctgtctcagcctcctgagtagctaggactacaggcacgcgccaccatgcgcggctaattttttgtatttttagtagagacagggtttcaccatgttagccaagatggtctcaatctcctgacctcgtgatcgcctgcctcggcctcccaaagtgctgggattacaggtgtgagccaccatgccccgcccagaaggccatttctttttctttttcccaaaaaagggaagcagtgactatctgag

SEQ ID NO: 45501 - DNA, 1023 bp, Homo sapiens
tactcatcctctttgtcttccactgcaaattttgagcagcttataattaattaaggggaaataattccaggtaggaaagctgtttcatcatgtagcaatatgtcaacctttacaggcactgaaaagaagcctaacagaaaggagcatccttctcttaaagccttcccttgagtaatcaattccagttacttgggccagttttcaagtgatttacaaagttggtaaaatagaagtttaccttactttttttacctttccctttcaccacttcactctgatcttctctttttctgcttttcctgctcatgttttggctcatctaaaatctgagtgtaccttagcccagtttatataccacctaaaaaatgaatggactgtagtaagatgtttgcctggcatcttgtcagggcatttggtagtactgccttgaagttgttccacctgctgagtcactggcactacttcctgctacaagctgtggtttccatagtgatgtttcagtgactttcacacaatagaacctgactggttaaagacctgagctgttttctataatcaagtcttttactcatctagaaatgggagcatggttttgatcattttgaaatgcaactttatgagtaaaaatcttacagaataaaatgcacaggtatgttttaaggactgaggttgttagggtagaatcctgaggaagaaaataaggatggtggcaacaggaaagggttacttacagagataaagaaacataagtaaatataaaggatttacagtagcccttcaggtaagaaaagttatatcaaatgccttgttattaagtcttgccacttggtcactgttttgactcttctctttgatggacccagagaaagcaggttgctatgcaatctgttcttttatattccccattcatcatcatatttttagagaaaaggagggggaaagacttaagggttatcatgggcaagaagagttaatcaggaaatcaagacatcttgttcttagggaacattcgtggtcagcttg

SEQ ID NO: 45502 - DNA, 1046 bp, Homo sapiens
ttcacagcccctctccaacttgtttttccagcttcatcttccactccaccctttcatgtatctttacttttagttataataaaatttttactgtttctggagcattgaaggggtaaaggggaccctttcataagggagatatgtatagaataaacaattcagtgaatttatatgtcatatatactatatatcctgaaatatttgaaattggaaccaaatcagtgttgctttcattttaaaatcacctttggaagtaattcagacaacattaaagacataaaactctcattactcattttcttcaacttcaataggaaatcttatggaattgttttggaacacaggcttccaatctgccaccagattttgcagcaggaatttatataatcatgccatagctcaaactgtctcacaatttaccatatgtttcaatatttccaatgttttcaaacactcttctctctttcccaccccttccagttcacatttctcagctttgtcccagctcttaccccacaattctcatttatttctctgattcatggttaatctttgttatagccttccagtttgaagttcattctatactggttctccttcctggactttttttaagtcacttaaaataagcagtgcttaatcctgaatttagaattcttgatttctggcttgggttctgatctctcagatctctcagtacatgttttcgtggctttactacttttttttttttttttttttaacctctgtttaaatttaccagagccagaaacattacggtttagactcaggctggctcctgtaacaatataatattttcaggaaaaattttcctcttagaaaccctgtattcatctggttagagcttaggggaatttctgtagtctaaatctaatcaattaaaatggctttttataagtagctggatttttatgactgcaaatattgctttcctgcttattttccttctaatcctgtgtttacttagctagttcaaggagtcaaggcagtacagtgtatataaggaagggctttggcattagtca

SEQ ID NO: 45503 - DNA, 1039 bp, Homo sapiens
tgcaaaaatcacaagcattcctatacaccaataacagacaaacagagagccaaatcatgagtgaactcccattcataattactacaaagagaataaaatacctaggaatccaacttacaagggatgtgaaggacctcttcaaggagaactacaaaccactgctcaacgaaataaaagaggacataaacaaatgaaagaacattccatgctcatggataggaagaatcaatatcgtgaaaatggccatactgcccaaggtaatttatagattcaatgccatccccttcaagctaccaatgactttctttacagaattgaaaaaaactatgttaaacttcatatggaaccaaaaaagagcccacattgccatgaccatcctaagccaaaagaacaaagctggcagcatcacactacctgacttcaaactatactacaaggctatagtaatcaaaacagcatgatactggcactaacacagagatatagaccaatggaacagaacagagccctcagaaagaataccacacatctaaaaccatctgatctttgacaaacggaacaaaaacaagaaatggggaaagaattccctatttaatcaatggtgctgggaaaactggctagccacgtatagaaagctgaaactggatcccttccttacaacttatacaaaaattaatttatgatggattaaagacttaaatgttagacctaaaaccatagaaatcctagaagaaaacctaggcaataccattcaggacataggcatgggcaaggacttcatgactaaaacaccaatggcaatggcaacaaaagccagaatagactaatgggatctaattaaactaaagagcttctgcacagcaaaagaaaccaccatcagagtgaagaggcaacctacagaatgggagaaaatttttataatctacccttctgacaaagggctaatatccagaatctacaaagtacttaaacaaatttacaagaaaaaaatcaaacaaccccatcaaaaagtgggcaaaggatatgaacagacactcct

SEQ ID NO: 45504 - DNA, 1054 bp, Homo sapiens
gataatttctatagtatgtgagctgaccttcctaatattctgtcagttcatgtctcaaatagaaaatatatacatataatatcattctcaaaggaggtgattataaaaaaacatgtaatgtaaattcgttgtttacattttcatgctcaaggctgttgatttttttaaatgtatgcaatttattttttctccatgcttgaattgtcctgctgcttattattctagagcataacagtgaaaatgccattaatgtttttggtgaagaaaatcagcatgagttcgggtttatgccaagtaggctgtttgttagcattttcactgacagcactcccttattaggactccatttttaatatgtgttcttccagaatttagcagttttttccttctgtggattacttttgtagttcttaatagttttaattagtttgtagtctttggctagttttataatagggcgttataagaaaatatagctttcaattattttcaaagtgagaaaaggctcagaattctctttctgtggaaacatattacacagttgatactattgataatcatattttatttcattcacttcatgatctgtggttgatttacggttgcagtgtttttccaagttacttttaaaaatatcttttgactccattttaagtaaatattacaaatatccattttatatgcccatttaaaaggaatacataatttaaggagaggtatgtgtcctttctatctccctagaaactccatagccttttaaaaactttctataaatgacaggtttttttgagcttttatcttttacatttcattgtcataactttgttattctgaaagtattgtatgaaaggaatgttctaaagatagtagtgcaattaatagtggaaagtgacattaaaaatgcaaaatgaattgtggggtacaaattcagattcttcatttgtatgaagcctgaattgttatagagatcatcaggtctctcatgcttacaataaatgaattaatagtaattacaaattacagtgagacacatagtagtttgccatccctatct

SEQ ID NO: 45505 - DNA, 1029 bp, Homo sapiens
cttttctctcggcttttctaaaaagagttaatggtttaataattagattttatattatctctaggttttcagtgaagcataatggattaattgatggctactagaatttattaaaaaataaaaaaaattctacttcctcatattaagccaaatgtttatttcccagatcttacctaaatgttctttcctgaggccagtgctgttttgaaactattttaatggccttcactggggtgtggtaaaaacattctaattactttgctaaaaacaaaggtttcatataaattgaatttttcttttaggataattgccattcacttttgttttatatgcaactgagtgggattttgcagtttcctctgtggacaattaaagtgatgaaataggagaaagctaataattgctttgtgtggtaatactgacaacttctgcgtatttgtcaatctgtgttaacagtatcgatcaggatgggatcctcatagaggggcagataatgtttctactaaatcttcggacagtgatgtaagtgatatatctgcggtttcaaggactagtagtgcttctcgtttcagcagcacaagctacatgtctgtccaatcagaacgcccaggaggaaacaagaaaatcaggtaaggggatttcaacaacaaacttctctaaatatgttttagaaggtctttatgtttcccggatgaacataaaattatttatttctaacaggttaatatatattttaaagccaggggagcttaacttcagtacatactactttttaatatattttaatccacatttcagacttcctgcacagaagaaaatgttatgaaactatggataattttgcttactacatcactggaaataatatcttttttcatgtttgtaatttaaaaattaagacctcttatatctttattgaaataaaagtgatggctgagacttgaatttttcatgttccaaggaatatgaaaaataatatattttgttattagaaaacataagaatgttactttttcagtaggatgcttt

SEQ ID NO: 45506 - DNA, 1058 bp, Homo sapiens
ttttgtttagggtttagtttgtcaagcatattttcttttattctaatactccttctgagccacctttccctaaaatattcatcttttttctatttttttcatctgtgcgtatatttttaaatttccagagtgttgaagatgaataaaacacagaccttatgctcaagaaaaggtgattttttttttcctttctgttactgtccaaaatttattctttggacataaatataatcattggcctcaaactgtgaactggctacatattgaagattctcaattaataattaaatatattattctcaaaaatttaggaaaattactaggttaaatgttgatacgccatcatattattttcctgtgtggtaaacttgagtgtactcatgacttcacagtcactatatgggaccctgcaagtgacaaatttgaggctaggtaacatacatggtctgaagagaaggtctatctgaaggtagaggactgagaaggcaaacctactagagtaagaacctgaagatggaggaggagatgggatcagaaacatagctggataaactggcttgaaaaaggaaaaacaaatatgaaaatagataagttattagataaggagttgggaagttggctaatactgcctgatggccttaattttctcaatcacataagaagtaagaatataagagtttaaaagttgagttgggggtttgaagatttggaataactactgaagaaaatatgagaagtagcttacaatggacaaattaaagggttgttgaatagttctgcaggttggagacaaacagtttcaagagacaccagcatgagagagcagtgtgatctttctcactagcactgagataggtaaagtgtagaaacagttaagtcacactatagcatttattgaggagtgggagttttgatggatggggttgttggaaaaatagcagtagaaagaaactgagagtgcttgtataaatgtcagtgctaaataagaaggaagacaagttcatgtgggaactgatgaagtaggataaaacagatgaaatccaagaattggaaaatta

SEQ ID NO: 45507 - DNA, 1079 bp, Homo sapiens
attttcctggtctctatgtgaagatctatatgtaattaagttaaagagtcatcatgtgatgaatgatgtatcataatgatttcaatattttgagatggtatttactattgtaaaaataaatgttattgtaccaccatggatttcaagatcagacaagacaacttacctcccttctgaagagtagaaactcagcaaaacggggtcttcctaaagaatagtgaaatgattctggatgatatcacagtaattatatgtaaataataattggcaaaggagaaaccttttataaaggtatgttgaccaacacacatagaggctaagttataactctcttctgtcacactatttgtatgttccattgcctgttaattggaaactcatcttttaaatcactgtttctaaagaattgagtatgacttgataggcatcataacctagtagagagcatatagagggaataaggagacttgaattctattgcttactctgggttatatattaaatatggactctttaaaaacttatccagcagatctgagtcatagtatgtctatctgactgatggaattgacacgtgctatcctaacagcatttctataaagataatatttttaaatgtaagaaaagtacattaaaatcacatggtagatataagacatcagtagccaattcagcctcataggggaatcaagagttctgttttagacatgattttgattttgagatgtccattagacatctaagtacagttattacatgattaagtgcatagatgaattcagagcccagtagatcaaagctaaggatgtaatttaggagtaatccgcgggtagcatttgaagccatagaactggataagattatatatggtaacttgaatcaagaagaaaactaaagactgagccctaagacattctaccatttagaggtcaggaagaagaagaaaattcatcagaggcttaagagaaggcaaccattaaaggaaaaacaaaaaaaggatatcttagaaaccaaatgaagaaaatattttaagaagcaggacatgatcaactgtgtcagggactctgacaggtcaagta

SEQ ID NO: 45508 - DNA, 1051 bp, Homo sapiens
attacatttgctattccatgctggtaagaaactctggcaatcatatacatttttgactaattttaagaagataaatctgaaatacatttcttgattgtagaattcctacttttaatgtccctgaaaatcagaatatagcttactttaaaagcaataaatccatttaatgtagttttctttttttgtaaaaagtattgatgtgtcttgttaatgatggagacttctaattaataaatttattttgtatagttttatttatattaacaagtacatattttgatctttctttgaatctacctggcactgttctatgtacagaagtcagtggtgcactaggaaggtaagatctctgctttcacagaacgtacattctagaggttggcaacaggcaataaacacaataactcagtgaatgtgcaatgcaatttcagattggcataagtatacgaagaaaataaaatagggtaacgtgacaaagagtaactgttgggactgcctgacaatgatctgttagacacaaatttcctagacttaatgctgttgatgggagacataaattaatatctttctttgaaaaatggagaggaaccactgtcaagggtgaggggacaaatgtcccctagagactctcatctaccccatcccctaatggcccagctgaaccatattaccttttgaatggtgtaaagccaggaaaaaagcagatgtgtcagaaatggagttaagttgggataatgtagttactaaggtaggtatagaacataccctcgtggggcttccactctctaaaagatgcacaaatccgtccaaaataattatattggctctcaggaaactcagtccaatgcactttgatttttcagacatgtcatttatttatatgatatttgcattttcaacaaatggagaacaacgcaattgcactgacaatgacatgattctgtccatattatgggagtgaatttctatcacaaaatattgcattatgatattatacaatatatgtaatattaacaatgtaatactttattataatacaataacattaaaa

SEQ ID NO: 45509 - DNA, 2026 bp, Homo sapiens
tctaaatcataaagttcattgcatacgttgtgtagctccagagatgaagatatgggagatgtagatgtatttgatgtgtactgaccccaatttcttacaaaagcaatataaacaaaaaatacatctaactaccatgatatatcacttgtttttctatatttttatgtaatatacatgtaatcatagtatagatataatttcattgtgattataactggaaatatttttcatctttctacatggccttcttgactttcattttgtattcctgctctgtagtctctcagttgatttgttataatttatttaaacattatactataaggcacttgaatagcttccaatttttgtaactaacactgaaatgactcaattagtgcaatagtttttttacgtttttaaggttttcttgaagggtaaatttcaaacagtaagattagtggattaaatgatatatactttttaaggggtgatggtgcaggaggaaaggataaagaaaaatattttaaatttggcattagacttctagagttcctacctcattagaaattctagaatatcaaggtacattttgagcaggaagtgatatcatgaaacaataatttgcccagaggctaaaggcagccaccttcggagagtctgttaaagtgattcaggtgtgcagaaatgatttccttggccgtaggtgggttttgaaaaggaaaggaacatggcaatctactccacattgagcacctgtcctgggtgctctaaggttaaataagagacagaaaattctactctaaaggttatgaaatacttgattagtgaaaatattcatagaataaataatcagataaataaaaagagagtagtgtagattgaatcagataggaagactgcatagactgaatcttaggctgaaagatgaagaaaatgagaggttattggtaggaagaatgcaaagatgtctttcttaggatagggagagagcaaagcagaaaacttggtaggcaattgtaattttggtgggggacactgaggaaatgaataaggtgtcatcttaatggatattttagcatattagtatactctttacttattcattggttcttctatttattggtgacttttggaggacacaaaagtgtcataccttccctgatgtaaagattgtcatattccatcttatttcacagttgaactatatagtcctccttcagtatctgtggagaattggtttcagaacccctagcagatactagattccagatagaaaatgacatagtaatgggctgggcgtggtggctcacgcctgtaatcctagcaacttgggaggctgaggtgggtggatcacttgagatcaggagttcgagaccagcctggccaacatggtgaaaccccatctctactaaaaatacgaaaattagtcaggtgtggtggcacatgcttgtaatcccagctactgggggggctgaggcaggagaatcgcttgaacctgggagacagaggttgcagtgagccgagatcacacgattgcactccacagagtgagactctgtctcaaaaaaaaaaaaaagaaaaaaaagaaaatgacatagtatttgcatataatttatgcaatcctcctgtatactttaaatcatttctgtattacttatggtacctaatacaatgtaaatactatgtaaatagttgctatactatattttaaaattagtgttctcttttatagttgcattatttcgtgtgtgtgtgtgtgtgtgtgtgtgtgtttgtgtgtgtgtgtgtatgtaaatatttccaatccatgattgattgaattctgggatgtggaaacctcagataaggagggctgactgtacatcaaatttaactagaatttttaggtgcaaattcaactttgtacttacgtaaaagatcctgactcagaatcctttcattggaatcagaattgccatgagatacattaactggttctcctgatttgcttgagcagatgagaataagactcagaattttgctttctggttatcctccttttaat

SEQ ID NO: 45510 - DNA, 1062 bp, Homo sapiens
agatcattggcctttcaatttgcaagtctgatctttcctcagcttatattagaaatctcatttgaattttggaatggtgatataaaagacgaggttttagatttgaggacttaattgctgagaacatgtttgctggaaccagataaaacttcttccagtggatggtaagcctgtcttggggtagcaaacttaaggaatgaagtaaattccattatcagatattcaatttcaatatttaaaataggtgattaaatatgatgcataatctctggagtagtttgtaaaagtgaccaacgtaagtcatgaaatttgcggttaaaaagaattctctgatacatttttagatattcatccaataaaatcaacaagcagcagttagttagcatcagtggtttttgtttgcttgttcatttagcaaaatataatgtggaaagccccaaaggaaaccatattgcttagcgggggagaaaaatgatttcccttttagtccagtcagaatggcctcccatcaagacagactgacgtgctcagccaggaccaccttacttagtggcctggacttgggcttcgatatgcaaaacagacagagattcctcagtttgttcggaaatttgcaaacgtaggcacttttctagggaacaactttatttaattcctcccttcatttagttttccgtgcaattcagaatcctcagttttcaaaaatgattgatgatttccaatgccccagagaaaatttcagcctctgttaaaacttagagtataaaagtgtaaaacttcccacatctttataaatgtattgtttaaataattcactgctgatggattaagggttaaaatccaagcactatttttgatatcaaaatgatactatcatatctcaaaatgagtgttcatgctaattccgaatgcagaatgacatattgacttgtgaacacattgaattgaggtcagttgcttcttcattgtgtgtggaagttacggtattttacgtaattcaatcgataggcattgtctatgatagtgaattacctctcttggacttttcatctgtactagggt

SEQ ID NO: 45511 - DNA, 1032 bp, Homo sapiens
aactcctggatttgtcaatattctttgtagggtagctccagtttatgggagtaaagacaacatttttttttttgggttcagaacctctaacttccataggtaaaatgagggatctgtccaagactactctgcagggactgtctgcccaaaccaaagctgtcaagtcctaacttgcttttgattaagtactctgataattaagtattcatgctatctttgtttgtatttgggggcaaggattttggagataataatttgtgactattatttgatatttgtccaatggacctaaattttttttcccagtccatggcagcctggataggaaaaaaacaaaacaaaaacaaaaacaaaacacttttttagctctgaagcccaaatctgaattttaggatgtaccacacttgagaaaggaaaattattttctagaaaggaatctaacagggtccttcattgatggaaagagccctaagactaccaactacttctataaggtaggagagaaaaggaaagagaatcagggacagaaaacagttgcctggagcctctatctgcaggaaagctgttccttaggaagggaaaagataggcaaagggagaaaaggagagggaagtgggaccacagcaggtgaagactctggtctcttactagtgcagtagcaaagaaggaagagagaatcgcacctttctctatgacctttgtatgctcagtgttccaactgctggtaactctggcagaattggtgtcctggaatataaccaagcagattagaactcccttcaccagttgagtagtgaagataggagtctgtaaagaggcagatgaggccttggtatgcagattagatgttgtgggcttaactattttcttatatcatttatcagtgtctttaatgtagacaaaagtacaaactgaaagaaaattggcttataatcatagctgagataaactttttgaggtcaacgaacatgttcctctgtggagtctacttcttgtccaagggtttgctgtggtttatctgttctttcttct

SEQ ID NO: 45512 - DNA, 1032 bp, Homo sapiens
tggaatgggttcctgcagattagaaagctggtcactgcattagctctggtgaaagataaaggtggctcaaaatagggacacaagaagtagagatggtgagaggcagtcaggttgggttatgtttcggaggtagagcttttaaggacatgatggattcgatgtgtgcctgaaagaaaatgaaggatcaattacgactcctcactttggggcttgagaaaagtgtgcatttaatcgtttagttgctattgttccaactagatacaacttccatgaggacagggactttttctcctttattcactattcatacccactagcacaaggcatgctaagctagagaggaggtgccccaaaatatttttgagtagttattataaaacattaacacatgatttaaattatttgccgaatacatttccccttaggttgtatttttttattttttgatagcttaatattcagaagctctaactatatttagatttgtgatacttgttttttttgttttgagacgaagtcttgctctgtgtccaggctggagtgcagtggcgcgatctcggctcaccgcaacctgtgcctcctgggttcaagtaattctcttgcctcagcctcccgaatagttgggattacaggcatgcaccactgcacctggctaatttttttgtgtttttagtagagatggtgtttcaccatgttggccaggctggtcttgaaatcctgacctcaggtaatccgctcgtctcggcctcccaaagtgctaggattacaggtgtgagccactgcccctggcctttgtgatgcatttttattttgctttcttatataaatttatgtccatctatttattgcttcgtgattctttcattgtgtctaaaatatcactccctgctcaaaagtttgattaataaccaattttgcttcttatagttattattttgtgtttaattctttaaaaaatctgaaatttatttttttatttttatttattttattttttttattatactttaagttttagggtacatgtgcaca

SEQ ID NO: 45513 - DNA, 1030 bp, Homo sapiens
gatctggagtagggtccatttctaatttgcctttctaacaagttaccaggtgatgctattatcaggtgatgctaatgctgctggtccaggtaccaaacttggagaaccctgtgggctgataaactgcttgtaatcagccaatgaagccaggcatcattttggaagcagttattttattaaaatttctttttggaatgttttatcaataattaattgcataggaaaagaatcgctttaatagggcagaatcagaatgggtattctaaaatggaggattataaaagagaaattgacctacttgatgaaatgtgggctagatacaaattgtattaatttagaagaaaaaagtttacatatgcaatgactaaaacccgatgctaaattttttgttgattttcttctctaattaaatgtttccccctcacatctttgtagtgaattgattatcttttcttcatttcattcatgtaactgtattgttacacatgaaacaaagaaacgtatgctgaatgtttttaaggaccactcttaattcatctttgccctatgaaacgatttaagaaacttggtcgccaaagcccttttttagtgttgtttggctactgcttctgttgttgttttaatttaacctgtaccttgtctgattcactctagcaaaagaaggaaatataaatccattctggagttaaaagactccgtgccccatttaaaacatccttttatacctatatttaaaaataacttagaaatcacttcctttttacttgtactagcttaactttgttatataaacatatagggtattatacactaatttttgatgtaaacgtatttgatagttttgcagaatgcagtttgttagataagaatagtagcaatattttgatggtgctttgaaatttctaaagaaaagtgtatatgtggtatctcatagaagtctataaagttatagattttgattaattcatttatgccacataatatatataaggagttctgtgtttaggttcagatcctttcctttcttact

SEQ ID NO: 45514 - DNA, 1045 bp, Homo sapiens
ctggaaatctatcatacagatatatcaaacactttgcttactatatatttaacaacgcgatttgatgtaatttctattgttgctatatgattagctcaagacactgtattttaggtcttacgtaaactgtaatttttttcaatgcaaattatggcccaggcaagttagccaatactgagaacctatgttacctgtttctggtcagcatggatatgtatatgtggccgtatgtgatcatgcatgtatagaggcagaaagaggactacataaagaattttctcatttcttaaagatacagtgacctaagaaggagtgacctaagaagggaaagaaaacgtgcacaagttagacaaggaaatatatatatatatatatatggaaatagtgtcaaacttgggctgattaaggaaacaatgcattcactcccaagcttccttatggtaatgtgcatcattctaatgtggaaaccactcaccagcacgcatctgcctcatttaatctgtgcattctgtactcctatattctgtattggtggctgactcctaaagggaataccaaaatacaataacttttaacgagaaacaacaattctacaaaaatgcaaagtgataccaaaaaaaaaaaaaaatggacagggaaagtagcttatatgctaaggaaaacccaactcagatgtgttttatttacaatattggcagttgtgctgggtgacttttaaggtgcccctaaaaatatcaaattattaataaaaggaatgcatattgaaaaattatgtagtatgcatcttattttcacactgttaattgtcaaatgtattagatgtattcattcacctttttagtttatttcacaattgtttaattatttttctagccaatgatagacctaggacagttcaaaacagtgtgggacaattctgaaacttggataattcaaataaatactgggtgtcgcttcagaattctgaggctcgtttgacaggggtttctgaacacctgagcactggggcagtacggtttatctgagaaagatagttctgaccttt

SEQ ID NO: 45515 - DNA, 1033 bp, Homo sapiens
gtcaccctaagagagatgattttctctaaaaatagaacagagtcaaaggatgggaaaattatctaaagaatttgaggcatagagctgacgtcatttaagatggatcaggatttatctttttttaaaagagtttgattgacgacgactccacaacctttcttgatggctgaattaaataatgaatcaactcccgtctgacgtgtttcattttatcaaatgcagattccacagtggaaagtactttttcccttatgttattcaactaaaagatatgttttgttatcactattgctcacacctttgttagctgttatgattaagtggaacctaaacaatctttaagaaaattatcttacatgtaaacatttctatggtgaaattctttcatgtttaaatgtttgtgattcctgtttaagtatacttcaaattcctatgaatctttcatggtttgagtgaaaagctagacacactaagctggtagggttcaagccaatataaaagtcattgtctcattatttcagtacctctcaagtctgttttttaatgtaattgttctttcttccttataaaattttacttggacacttctttgcttggaatctaattcacagaacatttgctcttcactattctggtttttcatctgtctttgcctatattttatttatcttatctgtcttctttttagtaaacatcttttcttttctttgattgtcctcacaaattttgtgttttatcactctcacaagttcttcagtttaccaatattcttatatgtctaattattcaataaatatttatcttgcatttattgtaataattgttaaaagcacttgggagaagttcaaggtgtaacatcatgctgtctgtattctcatttttttgatgtcatttccctcctgtgggcttctttaattattcatgtaccatatttgagtcactgatgcaataattaagcatctcatagaatggagagtagagtatggtttaaactacagaacgaagtgtacagattttagattctggcatgtta

SEQ ID NO: 45516 - DNA, 1063 bp, Homo sapiens
gtttttataagctatatatgtgtgtgtatatatagtttataaaaatacattatatagttttctatagtgtgtgtgtatgtgtgtgtgtatatatataacttttgtgttacatgctctttgaaggaaagaaaggatgatcacttttaatgattggttattagcagtattacagtaatagcaatgctggattaaaaacttgcaattgaagaagagaagctctgattaactcaggacaacatgtttattcatttatctctaaacaaacaaactagcaaataaataaatagctaactgcaaaatctcatgattttagggttcttcatgtgtgggtgaagtgaaaagtgtcttattcatccaggtggccttgggttgcttcttaatgagagaatgtgatggaaattttctatcttctaaggctgttacatttttttttcccaaaaaggaagataatcttatctcttctacagatgactgcatattttattgccatccttttcaaattgagaaatctgcatttacctcttagcgtctacacttaaatgcttgaagaatctagcccaaccaacatattgtaagtgaactcttgaatgagctgatagccatgaattttgtgaggaatgcacatgccagaattaggaaagtacaaaatccccgcctccccgctaggctgtcttctctgttccctttgtttcttctgagggcttcgcagttttgcagaacagccttcttatctctctttccttttctccttgggacttgccttccacagacctcttcagacattcttgcagaattgttcccataagatctctattttcaattggctgtataccttccagttttatggcccatccagaacagctcagttcactttctgaagaagaaatgagaaagtgcaaaatgttaccaaatctttcctcctgtgttttcaaaaaaccacatttgatgctttctattttatatgcttttacagaaattctctttaaaaatcaaatatatgcttatcattattttaataaaaacctctgctgagtaaatgaattttataggattgggggaaaaa

SEQ ID NO: 45517 - DNA, 1033 bp, Homo sapiens
tgtttctttttaagactgtaacatacttgagggcagataactttttttaaaaagtcatgttactcctttctggcttctgattctgcaccttgtacacagaaggtagtggctcaaaatgtgcaaattcttccaaaacatttacataatgtggtaatgtctataattagttttaagataaatacactttagttaaagtctgtctaaccagtgaaatatttaatactaccatttttgaagaacaatgattaggagtcagccattataaacaaggaggaaattgttggaaaaacttgttgcatttctatttttgcagctcattggcttgttactggaagtgaaagaatgtttattatttcaggaagtaaaggccattagaagcttatttgtctgagagaatctacaatattggttttctataacctgggatatgttatgaaacatgtttacaaaaattgtgacttcaggcttggtgagcattttttttttataatagctagtcctttgccagatctgtaatgtaaaattcgaccaatttttctatgtatcagatatcatgcttattttaaagtatttttctgtttcaatgctgtttttattacactgcatagatcaaggaattgaaatgctagtgagtcacttgaactccccgttgagcatcaaatagtggtaggtaaccactagctgtaagctcagttattgctgtgataatcttttgagagtgggtgattatggtagtacattgttttcttgccattgcttttctcataggtagctgctcttagcttcatttgactaatggaaattttaaattctgcttcatggttcacaggggagtagagagcaaccatatatcttatgcccaggtttctgaactgcatggtgcttgaaagaaaagagcagcatttacccagggagcattggtaccttatctaatttgccacttctttcttcctttcagaatcatttcatcttcctatgcctgcattcatgcacgtatctgccacttacacggaggttatattgcataactgag

SEQ ID NO: 45518 - DNA, 1062 bp, Homo sapiens
atggcactgtgggattacattttttttttttttttgagacggacttttgctctgcctcccagtctggagtactgtggcaggatctcggctcactgcaagctccacctcccaggttcacaccattctcctgcctcagcctcccaagtagctgggactatgggcacccgccaccatgctcagctaattttttgtatttttagtagagacggggtttcactgtgttagccaagatggtctcgaactcctgaccacgtgatccacccaccttggcctcccaaagtgctgggattacaggcgtgagccaccatgcctggctgggattacattttttaaaaatccagttcacagaagtggttgcaaaggtcagagtaaaagtggtttagtgcggactaggagaacatgttacatcatagtgggagagcctgtcacatcatactttcagtgtaagaatatttctaaaaaaaaaattggggctatattgcttcccttaattttctctatttgttttgctccactgtattaatctgcttgagcttctataacaaaattccttggactgtgtggcttaaacaactgaaatttattttctcgcagttctggaggctggatgcccaagatcaggtgccagcatggtctggttggtggtgggggctcccttcctggcttgcagatggccaccttctagctgtgtgcacacgtggccttttctgtttgtgcacacggaaagacgggagctctgctttctcttcctcctcttataaggactctaatcctattggattaggctcctaaatttatgagctaataatctaaccataattacttctgtaaaggccctatattcaaatactgtcatagtgggaattagggcttccacataggaatttcggagggacacaagtccctcccaaatgttcagttgagcaaccaccaatgggtctgttaagtgaatggtattaatatagtaagaatgtatcttaagtaggtaagttagcatgtagttgatatccaggtaagaaccagacagcaacccctttattagattgacctctactgaggcca

SEQ ID NO: 45519 - DNA, 1033 bp, Homo sapiens
gcccatagaagggcctggcttcatgaagtggcctcagttccagcgagtcatgtgggcctaagccttaatcattgaccacatgtagcctcaaatgcccagggtaaccaacgacagagtccaacagccagcctgcagggagcagcagcatcagtccaggggttactgagaggttactggttactgcttgtttttttttgtttgtttgtttgtttgtttttgattgagtgagaataacaaagtccgatgtgttttttagaaaggctgtcattgtaattaaccaggctagtacatctgcagtcctgggttctctggaggctgagggaggagatctcttgagtctaggagttcaaggctgcaatgagctatgattgtgcctctgctctccaacctgggtgacagagcgagactctatctctataaaagaaagaaagaaatattgtcattgtagcctctgtgtaacggcctgtaagcctggatgttaggagactaaagcaatgattttggcaaaagatgatgaggacttgaaagaaggcaggagaagcagagactgagaagagggaagagcaactatagactctaaaagaagctgtaggactttgttaaagatttcaagagcaaagacagataagagtagcaagtaagaaaaggtggactactgggggaaagggactctgtagaactttgatagttaaggaaggatagggtaagagaatccagacaaggagactgaaaagggactgtcaaaatgacaggaggaaaactagaagaagcgatttaagcttcttttttgtaaaaatttaaggcattaccggtgaattatgacttatgctgaccatctatttagctaagcatggcccgatttagatactagagcaggttcaataacacggagatctatcacctgagctttggatgactcacatgaaaagctggccaggagatgagaaaatggaggcctctttttaaaagcttttcagaaatggatctttctggttgtcattattccttctgcttgactcataatcctacttct

SEQ ID NO: 45520 - DNA, 1067 bp, Homo sapiens
ggtagcgaaatacctgcactcatgaatcatttgcagataatagtggtttagacattctctgttcaaattgataatgggtatctgatccaaagcgatgcacatttttaaggtctatataaggagctcatgggggaaaagtccctttctttcagatctcatgtacatcatcacgtcagtagttagtatcctagatgtagaaatgtagaataaggcaaactggagagctcttctattgtttgagtctccagattactttataaaaagcacatctactccagacagaatccctctttactttgtgctattagcactcttgtgaaagatggaagtgtacatttgcatttttctttgtgcctgcattcttcaagtatttgaatcagtatttatgaaattgtctttttgaaaagttatatttttaattataaaggaggagatctatgctttaaaaaggtattgaatttgtttagaatatttaaacattttatatggtgctaacattctatttcattaatgtatggattggtttatttgaaggattttctaagggtggaatacatgattcacttcagggagtaatcttgctgtaatcactcactctcattctgcagagtgcataagctgcaccttgggagctggttgaaaacgtggatttttggattatactcacaaagatttgaaattagtaggtccggagtgtcttttttttttttttcccaagattaagtgtcactttatggcccaggatggagtgcagtggcatgatctcagctcactacaacctttgcctcccaggttcaagtgattctcctgcctcagcctcctgagtagctgggattacaggtccccaccatcacacgcgtctaaattttgtatttttagtagagatggggtttcaccatgttggttaggctggtcttgagctcctgacctgaagctatccacctgccttggcctcccaaagtgctgggattacaggcgtgagccaccgttcctggtcgtgtctttttttttttttttttttttttttttttaaataagggagccagataggccttaaaatacatcat

SEQ ID NO: 45521 - DNA, 1034 bp, Homo sapiens
taaagatgcttttgcttccattttggtggcttaccatgggcattattttatttcttaattgctcctcctaagtttgttgtgaaagtgagaccacatagataaagaactcaatataatgtctgctatattataagtacttagtaaatgctgtaagttttatcttcattattttaaaattgagaagaattgaggaaggaaatggaaaaaaatctaatggcagccagtaagatgaataaacattttccattgttttaaatatggttgtgcaagtatttttttttactaatgcataagtgcattccttattttctcctttctggaactctataatatcaggataatgtcagtggagcagttaatcctggttatctagaaatggaatgggtgacccacctttgatgttgccctttacagccacatacctctgcctggcttagctataaagtaggaagtaccagtgtggggttactgtgggctgaatgtctccattacctttgggggtagaatcagctctgggagctctgttcctgtttccttttggattcagtatgatcttttctgcctccctttttcttcacctggaatgaaagtggttctaggtgaaggctagtactagattggctaattgcgattatcaagcaaatctgcatgttgaacgagactagtttttatccatatgttttattttcgtctttatttattcccaattacaaaacactaagataggctgggtgtggtggctcacacctgtaatcccagcactttgggaggctgaggcgggtggatcatctgaggccgggagttcaagaccagcctgatcaacatggagaaacaccgtaaaaatacaaaattagacgggcgtggtggtgcatgcctgtaatcccagctactcaggaggctgaggcaggagaatcacttgaacctgggagccagaggttgctgtgagccaagacagcaccattgcactccagcctggaaacaagagcaaagctcagtctcaaaaaaaaaaaaaaaacaaacccaaaaaccactaa

SEQ ID NO: 45522 - DNA, 1029 bp, Homo sapiens
catatttggtgacaatggatgcatttataataaaatattgtttgaatttgaaaaataaacctatcttgcaaaatatataagcaagataagaattgaattaaaatgcattaggtgatatttgatctaaggaatagtctggctacatatatcgggcagagacatggattctcttgagataggcaactcagtctctgatgcggtgaaatccacaattacccccaaaatactcacggtttatggaaaagaaagaatttctatgggaaatgtagagcaaatggaatgcttggatgacacagagaatatttttcttcttttaatattttttttccaaaaaaaaaatcgaaaccacattttatataaaaactagtatcaaaataaaaaagcatttttatttctcttctccctccagtttgaaaacacttcgttacataagattcttcccattgaccctttgggtccttgtgcagcctcagtttaggtctgttagaggagccactgctctgtggggtaggacttcaatctcagtggaaatgatgatgctggaatcaaactttcaatcttctctaaatttcttttttattggcagcttgaatggcctactttattcttttgcagtagggccttccattaggtatttgttttgttgacatgtgaatgctcttttgtcaaagattaaccacactgcctcctcacaggcaggatgccatttaagatagtcttttactaaattcttagagtaaggatgtatgtcaggccagttagggggcaagtttaggtgacagctgatgatgagtaggcttggtactctctcctcattgagctgttgagaagatggtcacaaaccgaagtcagaggaaatgcgtgatctatagtgtacacagttgaatgagatttaagaatccttaatcccgttatgttttaaaacctttagtaactcaaaacatgttacaaagcggttagcctggagagtcaactgaaaaggtgaaagctcaatgaagggtgagagaaaccctagtagttcttagaaac

SEQ ID NO: 45523 - DNA, 1051 bp, Homo sapiens
ctgcagatggcagtgactagtgccattattgcctgggaaagtctgtaaggggactccagagaattcatcacctgttccctggtcttgttccctaattaactggatttggacatgtctattcatggtcaaacttagctaaaatggtgacaaaattgcttagtttattttactccctctgctctgttcttattctgctcttttctgtgctcttatacccctgcccttccttactcttcaattctaaattatagccaaattcttctaaaagtagagataacagtataacccaggtttggatgtaaccttatacccctctctgtcttttgttccccctatttttcttctatataggaaataagatgttgggactaataggaccaaatgacacagagaattctgaggatttgcagaaagtcacacagttgatgatggtgcctgcattagagacctgggccactctatttcatgggggcacgggcattagttgaagtaaatgagaatgtattaagaactctttgctgcaagctgtggaaacacagttgaatcagcttaaagaaaaggataaatttatttattagaattgcagagtattttatggataccaagggcaggaattcactgggcctcaagatttattagtactgaagattcagaaaccctcaggacgccttcaacatttgttatggcctctgatttctccaagttggcttcattctccttcctctcacgtccaactgctccttcagtagacagaagctttgaacttgatagctcatacttgcatctaccagtgagttatgcccttgactttcttgattctgtcattgaaaaccctaaggaaaagacttactgtcccagcatagcagaggaacacacctaaggctaggaggtagagaagtgattttcagaaaagtaaagatatcggaagacacttcataagtgctcactacaattggtgacaatataaactgcctttagaatatgaaagcctcatgaaaaaaaaggattggtttttgttctgtggatgcaaattacaggaagatagatttta

SEQ ID NO: 45524 - DNA, 1703 bp, Homo sapiens
tccttgataatatttctaccattcagattagtgaaagcagtaaagctttacagcttctgtcgtcttaaaaagatatcatgagacaggggaataaggacttggattatggtttgggagatttagttgtttgtaaaaataaaatgattagtacagttattattcaagtttttaatcaacggaagcaaatggcatctgtttgttatcattctttctacagaagacaaaggctcaggtcccaatggtgctgactgctggtcccaagtggttgctggatgtgacttggcaaggagtggaagacaacaaaaacaactgcattgtgtacagcaaaggtaaatgcaagattgtttccctctctctttggaagtattaaaacctgagcattgcaaaacagcaccagaagagctggaatggaagtacaaagtataaattgatcctcttccttttttcccatttgagttcctctaatgtgtattttcagtaaagccacctgtttttcttttttttctgtacaacatgaaacaaaaagtgacataccattaatttacttagtgccttatacatttacctaaccctgtatttgagtggcttgactaatatctttctcttgctgttagtatcattgatagccaggtttgacgaaactccaatttctccttttagacattatctatcaaaaagtaaaatccttctaaatttaacaatttgtgtcaaggtgcatggtccaagaggctctacattctagccagtttcctgaagtcatgcatgatgagaggatagctggaaatgaaacctttgcaaagacagaattcttccccatggtgatttctgaagggcaggaggcaaactctaaagaggaagctgatgacttgcagggcattgcctttgatttgctcagtgtgacatcaacccagactgtgtcatgtagctgcaccctggctacaaaggagcagcagctccatgatggcacattgtggggctggggctgactgtccatagcacaggaccttcctcacgtgtggtgtagttttggggcacttttctccacattcaagtcttggtcctagctctgtactcttacagtataatccctaatctcactttttcataaatattacaaaaccttgtgcttctcatgtttaatttctcttggctttctttttaaaccaaatagacctactgagatcaaagatgtatttgcacattgaacctagaaaccataaaagcatacaagggaacaagcaaataagcaccccatcaatatattaacatataaaacactaatcataacatcaaagactcttaaaaacttgctagaaacaattacaacttgttctataatcattacaatttgtacacttataagaggattgtctcttaactaccataagcctttgaaagttgaaacaccagaaagagggaatttgcaagctaaaaaaaaaaaaacaatctgcacaccaggatctgattatacttttttccttctataattactggtcccatacccactaattttctaacccggaatacctgtggtatgctggtgggagctttcagctaaaagggatgtgagattttctcaggatatgccaatataatctatcaaagtgaaaagaaatggtatagggaatcagtttaccaatgccgacattcagaatacaaaagataccttggaatgtaggaccacttgttggggacaaatttct

SEQ ID NO: 45525 - DNA, 1028 bp, Homo sapiens
aaaaaaaaaaaaaaaagaaatcaaagcagactgcatcactagattttcctgtaccttcagtctatctgttatcttcttgactgtctaaccaaagtgatccaaagatgaatgaatttaaagattttctactggtcttggtgtgtgaatatacatggacttcttcacttttcaggtctttatttctctttgtcttattaattgccttccacaaagcaatagagctatcttaaaagtactttgaaatccctggatgaaaacagccaaagccctgaaaaatatcagcattattatatcagttaataggcaattgaagctatgaaaggaataaccagaaagacaaatgaatggccaagaggtaaaacaattatttaaaggagaaataatgggtaacagtaaccagggttctgagaacaggaataaaatgtatcaggaggagatggatcttaaaggaatgtggtacacttagacttaattagagaactgtgaaaatggacacttccagacaatatcagatagctttggtaactctttatgtgaattagttaaagcagaaagaacagtcttagaatatgttttgatctgtattttatagaagcattgccagagaaatacatttttaagaaacttctcaaaacctaaatggctgatatgttaaaaagaaaaaaaaaagcaaataaataataaaatcctgagaaacaagaaatcatacagtgaacagcaattggctgttatgccctaaccttcaactctgaaagtatgatgaactaatgtggttgatctcttagttgaaacaaatgttcagaaatgttggaacggaagcacaggagacatgagggagtgtgctggttttctggccagccaaagcgtccactgatattagaggatgagcaattcatttaaaaatacaaaatcaaataaattgtttttaccataaaagtgagaggggtggcataaaacaaacataattacagaattactaggttttacaaaaggtttctttttttcttggaaagggctatacagatatt

SEQ ID NO: 45526 - DNA, 1047 bp, Homo sapiens
aaaattaaatttccaatttaatcaagtataatgttcactctaagatggtctctgtcattgtgatttgtttttcagtagtctggaacagcgtttcaattttttgaaaggcaaaggtaattatgagaaattgggagtcagtttgtctaagtaaacacccccacttgaaatttccgatacgtgtccccttgggattctcagtaaaaatcagctcgttatggttaaaggagatgaagaagatttagcctcacacaaacatataaatggaaaagaggagtattttaatagccttttaagataattgtggatattcctttatgattgagaaaatcaacaagtaatttcttaaaggttggtagattttgaaactgtatcgatgacttttgtactccattgcattacaattcattggtctctcttatgcattggttgttttgaaaatagtgattcactaagttatgcagatcttgcaaatgctaacacattcattataccatatcaaataatcactttcattacacttatactgatttaatcataaaattcttgtgtgtgtgtgtgtgtgtgtgtgtgtgtgtgtgtgtgtgacagagtttcgttcttgttgcccaggctggagtgcacaatctcagctcactgcaacctctgcctccgggttcaagcgattctcctgcctcagtctcccgagtagctgggattacaggcatgcgccaccattcctggctaattttgtatttttattaaagatggggtttcttcatgttgatcaggctggtctccaactcccatcctcaggtgatccgcctgccttggcctcccaaagtgcttgggattataggcaagagccaccgcacctggccataaaattctttaagtattggtatactgtcaagttttctgaaattctcatttttacttgaaagatggaattttatttttggcataaaatactttaaattgtttttgttctttaaaaaaatcagttcagagggacctgattagtaataggcagagaccttatcagttatgttttggaagagtataaaggct

SEQ ID NO: 45527 - DNA, 1030 bp, Homo sapiens
tcctaactattttgaccataacattggaatcatagttcatctactcaccaacacatttatattttagcaccaccaagctttaagaagtgctttgtaccacctagtgactttggcatattgtttgtaaaaaattgagttgtggaagataactcaagatagtaaaattccctgcttcactatgaacaaccccaattgtagtactgaaatttgtattatcttcacatttgtcaatgaaacttttttcttctcctaaaacttcagttttatttaaacacatagaagagaaattcgagttctgaatgtttctgacctggaacaaacaatatatagtatttgactgtttcagcgtcagcattcttttcatctgttttgttgaaaaaaagaagttgtaaaaatacgcatggaaaaaatgaccattgattatatttttatattctgatatttagaaagaaatatatttaaatatataagagcaatatttgaaaataccaaaatatctgaatggacaagtaccaatgaaagatgggacaaagagaataaatttaataaattaaaaataaagggaaatttcatgcttcactatgaagtaaatgtcttagttcatgattactttctgaaaaaatggttaagagttatagactgggattgactaacttttgtgaatgaaactttaaacttgtcaaaaagtgtctaaaatgcataaaatgtttttaacatatttgagtttaattaatatagattcatttctaatatatgaaaacttgttaaagaagtatagaagaaaccaaaatatactgtactttaaatacagaaaaaatattaaagatggactagtttttcagtccaggtatattagatatttcacattgaatctcttatcattctccctttgtcaccaacagaacaacacagcttacatcaaatatgctcccataatatttcaagatttcaagttcaattctttcctgacataatatgttagaatatttctctttgaaatatattttctcttgtactgtgaaatcatgtc

SEQ ID NO: 45528 - DNA, 1037 bp, Homo sapiens
aatataaagtaattaccacaaatacaaaaaagcatcagtatctgtatttatttactatgaaaagaacttaatgggtaagaaaaccactaaaagtggaatggaaacctttatagtgggtgtgaaaatataatttgcacatgcaaaataattcaaatcattaaataggtatgaccagagcattctttatgataatcaaaactcatgagtcatcagtgacttctcattattatgaagatagggttatataaattttttatattatatgactccttgttagttcttcagccatacctttctctgccccatgtcctcatgtctctaccctgccctcttgccatcagttcccagaatccatcctaccatgctgtctcttacctcactacaatcccattcctcacaacccctttcagaatgcacagagtgtaaattagttacaaagcataccatttagttctgatgacattctttgtagcaacactttttggagaaaggaaactgtacattgatttatattctgccatacaataatagtttgtctgtagattataagtagcactgtgataaggtacatgattgtgtgtgtgtattaagaagagtttcatcctttaatttactcatctttatagtgggaataataatgttcatctgagtgttggattcctcatatctgaaagtaggaagagtaataactaccttgtggtgttgtagagaaccttctggtatgtattcatggtacaccaggcattgaataacagttagttccctctctggtcccttcctttttccccctgtaaataagtagtgtcagaatatacttataaattactatggtccaaaggacattaggggaaaccagttggcataactggactctataattactctcttgtgtgtgctttgtgtcttttttttcaacactgacatttataattaaggtttagtgtctgccttccccagtggattaaactctatgaaggctgttaccctgtgcaggaggccttctcagtcactgctctatctccattgtctgatacgtg

SEQ ID NO: 45529 - DNA, 1056 bp, Homo sapiens
gaaatatggatgtgatttaccaaactccagataggtaccatgctcattttggaatttgttgtaaacaaacacataaaaacaggacaaaaccacttgtattcaagaaatggaaaattgttcaggatggaagaaaatgtttatgagtaggagagtaaagaagagcactaggaagctacttccaaggcatgtgtgaagggctttgaatactaggttaaagatttttttcattgatgagtagaccatagaaagctagaaattctttctgcacagagcaatgacattttttaaatgatgtttccagagaaagtatgggagtgtgcaggattggctggaaagtagaacgcagacagaggtgataggtgggcaactactgaaatgggcagagcatgacatgagaagagcctaagctacggtcgcatggtgcccttctgttgagttggaatagaaacacaagtgtggagatattagagaagaaggtttattttatggactctgtttttccatcataaaattgtcacataaagagaatactgatccagtcctccatggagagaaccagtgattcttggatgagcaaataagttaatggagtaacagcaaagccccatgaataatggctttgccctcacaaaaataaccttgtgtagagaaggtcaagtgtacgtgcattggtgcaggctattccgcagcttgtcggcaactcgcgttgggacttctgacaagcagctgcatcctaagttacattttgaagaagacagagaaagaggagcagatgaagttgttaatgctgaggtctcagccatttatttgttgttgtttctttgctctactacactacatgcccaacatttaggaaaatatacttaggaaagcatagccaagcgcactgaaacacagaagatgcacatatccagataaaatatttcaaaatcaagaatatactatatgtgctcatcataaatctaattttgttatccattttaaatttttttgaattccaataggccatatattttctatatggacagctgtaacatgtgcttcttgctactaaat

SEQ ID NO: 45530 - DNA, 1049 bp, Homo sapiens
aattatctgaacatcttgccattaaaattaaatgtgagtgaattttgacatattcattttcctttgtaataaatggagggtaatatttttattttgaaatatttatagtgtaaattactaaaatggtatttctctcctattctaataaatctgtttttacataagttctagaggttaatggctagattttaaattgctttccattttgataataagtggatttccaagagagatgatgttattaaagagactttggtcactctgattctctctttatatgagaataattcatatttgtacaaacttaaaggtataagatgaagccacactggtatttttctaaacatatagtttggagtattgttttgaaaggaatttctttttcttaatgatatagttcttttgttaagcctctattctaaaatgtttttctttttataaagattgggtatttttcctgatattcatataacacctctcaaaagtgaataatggcaatgattccactgaaaattaactttgaattaatgcgctgtaactgtgatcaaatattgatcagttttctttattttgtgcatggttgcaaagtgagaaatataatgcaaactctcaaataattaatttgattacattgaaaaaaattaatctaaactagctacacaaagtcataaaataaaaatgttgaacactcaacattcaacgaatattatttattgttgtcttagactaatttcattattgtttatgataaatatttttaaagagcaatattttaggtatttttgaaaggtctactaaactcagaattattattgaaaaatgaaatgtaaatacttagatctttgataacaaagtaattaaaatgtatgattttgcctactgtgtataataagggcttatatttgatcaaccataaaagttatttaatcattttaaccttggaatactaccccacaaaacactacttaatggaagttagctgagacgcattagggtatcaaaacatcaagtcggcaaagcaagagggcctagaaaattcaagcccagct

SEQ ID NO: 45531 - DNA, 1030 bp, Homo sapiens
tggtatataactggggaaacacatccaaactaggtgtgagtttctttgtgtgtatgtatattagaagaggacaaaaaaagcttccttgaagagtgatgcctacatcagctctatttgaaggataaacttagataagcgtagggtgaagttttctagccggaaaaacagcatgtgcaaaaggcctgtggcaagtagtgcatggcacatttgaaaagcttaaaggaggccagtttggctagaataaggacaggaaaatgatttggaggcagcctgagctgtgtcgctatacatacaccatggtatccctgtgatctcacaacttcatgtaggaattgtttgcttctcttctgtggcaattcttgacaaagtaaatcccaattctctcaaagattttgcaggagcagtaacggttatagaaacgctatatcttctgcattcatagaatattatgcacatcacaagctctagctcttcttctcatatccaacttgaatgtcacattttaccccatctcagctctgtagcttttaatgtgtctttataccggataaccctatgcaaactgtattacagtattggctatctatagtgtccttccatacagaagctatattgtatcatcatctaaccagtacctcacagaattactgcctgatagtaaattaggtcagtttagcacttctcaataaatgtttgttgaattgaattgtcttaaatgtttcagttcttcagataaaggcatcatatagaacatcttgttagtacatgtgcatggagactattcatgcatgtatttactgaagtaaaagaaataaacatgttgtaactgtacttaatcagagaacacatataaaatatttttgaaaaaattaaagcaaaacaacttactaatattatctttaacctatgtgttacacattatagtaaaacagttatcgtgatcacttcagagctgtgctttcaggataggatatgttttatttcccagaatttgtcatttgttaggaatattttagcttgcttcactttt

SEQ ID NO: 45532 - DNA, 1120 bp, Homo sapiens
agtttgactattagaaatggagtttctattcaggagtgtcgttcatataaatatttttgcacatttatagtttttatttttaaaattaatgccccaaacaatgctataccacacacacacacaaacacacacatcatttcacaattgctttacaattttataattaaccacttagccagattttggatataaacaaatccagactcaatggcacagtactgataacacatgatataatctttaaccttatgataatgtttcccatctagctaccttgttaaagttgagtagatctttattggtaaaactagtatttgtcatgttaatttatgtattgaaagagattttttaaaattcctcgtcaaatttgtctaaatagatgagaattatatgtaagaaatagacatatttatagaatatatagagaaaaaataaaaataacatatcaatcatgatgactttatttctttctttttttttttttttagtttcccctaatctatccagcttttaaaactcaatctgtgatctgacaaacaaaacaaaacacaattctaataatttgggactctgtgaaatttcaaaattatgtaagtctcaagagttttggtgttttgaagcccataactattttctagatttctagcatacagaatattagcaagtgcatatttattccaaaattgcagcggacaatagaggtctgaaagctatacaggaccaatctccttccagaataacagtctgaaatcaatgatataaatcactccccagaaggagaccagggccaagaacagagtagcaaacgaaatgtgttttctagggccaataccttctgggacaatacctcaagcaggtgattttttacaatctgccctagttaaagcttccaggaaagagttcttgccattccaagtaaataattatgagaagagagtagaactaacatttttgaagtgactattctgtgttcaaccttgtgctatgtccttcatgtaaagtgatcttatacaacaatcatcttccaatacacaggataatccccattttccagatgaggaaactgtgtctcagaaggattaagtagattgtccaaggtcacatagatgctaaatattta

SEQ ID NO: 45533 - DNA, 1034 bp, Homo sapiens
cagcttttctgtttgactaaacccaaggtaggatacctgagccccatggcctccaacacattaattcaggttttccagaaagctctgagtgcttttatattcacgggacaaaactttctgagcttatgcttcagtagaaatccgggcctgatgacaatgactctgtttactttcccgaaagaggcatcatgagcttcttaaaaaagaaaggaaattatcttaataggagacattttcttacaaggaaaaaaaaaaaaagtactgtggaaagaatacaagccacgaagcaaaactctagcggggatctgttacaagcttgggccagagaatgccctctttgagaagaggggagtttagggaatgcaccggtttaaccagtctggctttgctttccttttctgtgaaatggaatgatagtacttcctgtttgccacagctaattatatagattaatgaggctgttcatgtttctttgtttctaagttccgatcagacctatatattatctgttgaatttacattaagtaataaaggatataatatttgaaatgacacataaatcacagattctactttaagctcattttcaacatatttgctaaaagaggatactgtaatttagtagttttacaatatagcatggccaacatttactagttttttacattggtgtaaggacatggtttataacctgatgtgttcaaagatatgtatacttgaagagttctcttcattattcataggctataaacaattcttatttatctacttttactttccattctaaccaagtaacttttgtgagcctagtcaagacaaaaatagtcacataagtaatcatataccgtagctcctaaactagttatttttgtttgtagctactgactatttatatgcttttatttcctggtattcaaggaaaacttactaagtgaatagggaactaactactgaagttggaagccaggtttcatacccagaaatagatattccatatcctataaaatattgacataatacagaaagttctttgg

SEQ ID NO: 45534 - DNA, 1103 bp, Homo sapiens
catgataataaagtctctgtctctataatgccgatgttttctgcagtattttatgaaagcgagtgggatggaatagaatgcagtggaatagaaaatatgcaaaggtggatactcagagccataaatattgacagatggaagatgcacatagctgatttgagctatagtgtcaaataatacttttttattgcaagaaaaactttctggaggaaaaaaaacaaaacaaataaacaaacaaacaaacaaaaaaccaccccagaacaaaagcaattgtgtttattggcagaaggataaaacctttactaatctgtccagattgaaacacgttcttttctttccccttcagtgaccctgaaaaacaaaacatgagaaagatgcatttatatatatatgtgtgtgtgtgtgtgtgtctatgtgtattttgtatgtatgtgtgtgttatatgtaataacattgcttatttaatctcacacatatacagatatacaatgagttgggataagctagacaatattgtacgttaacaatcaaaccccaaatctcagtgttttagaccacaaaagttcattgctcactcatgtgaacttactttatcactttgtgttcatcgcagattaactgcacctctcctttacctcatttcattctggactgaggctgacattgtagcctatacctgtaatactacctatcttttaacagagagaaagataagaacatggcagacctcatactagatttaagagcttctgctcacatgaatcaattctttctacatgtcattttgtcaaagcaacttaatgtcagcatgggacaagtatatataatcctcttgtagaaaatatttttgaatagtaatgcaagctgctacagtatagtagcacattagagtgatacacaaaactaatactgtatctgttggagagagtattggtgggtgttgaatgtgttgtagttttcagaatgtaattgtacccagggcaactgttccatctgatactaggtgtgtacttttttttccaggtggttggggtgatgttgatagtaacagaatcttgctttgtggcattagcctcatttattctcatatactctttctcttt

SEQ ID NO: 45535 - DNA, 1050 bp, Homo sapiens
tcagtaatatttaaaatttttatttgtcattgaaattaactcatttaatatatatgttaaatcccaagataaaatatcctagaccttctacaaccagatgttatcctcctaacaaactaatttgtagttgaacatctgtttaaagcctggctaaaaattgccttaaaaatccttcttttctgatactaagacaatgtttttactcatttaatatttcagaaatgttcagaaaagcggttattcattcactagtgggacttgcaatcagtggcaccttagaatggaagaaatatagcagaaacatactgggtgatgcagcaaagaaatgtgttgaaatctattacatatgaattgttattttctccatttcgtagaaaggaaactgaagttccaaacacctgtgtagcagtgggtagagaaaagactcggattccacttttcagagaagatcatctctacttacacttaacacaagtccttaattccacaggagtaaatccggatgagccaaattggaaacaagaggcatgtggagtagatcagaaaacacttttttcacgtgtgtgtattatttttaaacttcgacatgaactaaagaataatcatgaaatgtatttcttcaaaagcctttaaaaacagataatctataggttagaccatttagagaggtaattcgtctgggataatttgtgtaactttctaacagtttttgtcaaataaaaaactgtagtaagtcgacagtgcattcatgatgtgcattcactgatgtggctcaacattggtaacagtatgtagagaagaatctgacaatttcagaaatataggcacacatatcagatgattatatcaatgcaaacctgttgctttggttatatgagggtacacttcaaaaatacacaactcaaagcttttttctttttctctgtcaaaatagacaaacccaggttaataaaaatagccagggagttcagtctcccaggaagagcagtctgaagaatgatgacatacattgtgccttgaaggctacaatcaatctttattgaaaagaat

SEQ ID NO: 45536 - DNA, 1020 bp, Homo sapiens
caacagaccctggggtctacttgagggaggaggttgggaggaggaggaagagcagaaaagatagctattgggtactgggtttaatacatgggtgatgaaataatctgtacaacaaccccccctacacgtgtttacctatgtaataaaccttcacatgtaccccaaacctaaaatattttttttaaaggaaaggaggttctatacaaaaaaagaaaaaaaaaaactttagaactctctggcaatacatgttatgcatcctgtgttagtccttgggtaccgtgaaatttccttcttttttttttagagcacctagtgccctccatcgtcatcaaccacccactgctgcggatgctgagcccccatctgttgagtgcttaccctgtgccagaaactctgtattgcctgtgcattttctcactgatcacttagactaggcttgggcaaacttttttctgcaaagggtcaggtaataaatattttaggcttttggaaccataaggtctctgtcacaattactcatctctgctgaggaggggaaaatggttccataagacaatgtgtattgtgttgaaataaaattcacacactacacggtaaaggaattagaactagaatcctggtcgttcaacttgaaattttacaatcttttcataattcctgctaatagtgtgacctcctaaactgtaaaggaaattttgtaggttaaaaaaaagatgtatttatcttctgtaagtggatagcaggacctttaggaaaagaataaaagtaatagaagaccaaagaggaagagactcttgggaagaattttttatttcacagaaatctttctcccccaatagaacaatgaattgcttgtcctaatattgtttccttacctcttaacatattgccatataacatattctgctaacagtataaagacttggctgtctttactttgctattattctttctgaatctacaaaatttttctttaaaaataatctgcatgtgttctccttcatttatttccacactttt

SEQ ID NO: 45537 - DNA, 1062 bp, Homo sapiens
tcagtacatgtgattctttaccactcttgtttttagtacaagtcagtccttgagtcaccctgaaatttgccagtcacatttatttacttgatttatatttttcactcagatctgaatgctttaggaatatacccataaagagaaaaacttaaaatatattttacatttacatttttatgcaaatatgcatagattattttgattttaattgctctttattaaaagaagagtgccttttaaaaattaagtttactataaggtaaaatcctcattcaaggtgaaagcatttgtatttgaggatctgaagaagaatacatttaggtgatgttatctaagtgcaatgtatttttgttacttgtaaaagaacagtaaataacagacatatgtatagtcattagttatcatgattgtgattgatcttttaccctagataccaagtatataaagtcagttgctttgctgtctttggaattataataggtttgggtgaatgttctgtgattgctgataattatcgtattggtgggaatgtaccatctttgaccacatcgtctgtcaaaatttcagtatgtctaccagtctcccttcacctctcactcgtccaagaagcattcccaaggtaaagcagtcttattaaaatggaaggatgtccctagtgtgttgcgtagaaaacaacaaccatgatgagtgcagggatactctggttaggtaaattttctcgtgtttacatggatcttaaatgttaaccttgcctgcagcataattccaataagacaagaaaaaggtaagtaaactatattgaaaaaagtgactcttgttttccaagctaaattctgcctctggcaagacaagtcaattatttttctagtcaatgaagatagaaaaagaataaagtaaccagttgatttctgcttctgattagaaaattttgttttaatctcagccagagatgtttcagctttgccgcagggcaattttaaatacagttgtcaagggaggacttcttgagaaaatgacactagaacaaattcttgaagggagagagccatgtgaatatagggc

SEQ ID NO: 45538 - DNA, 1038 bp, Homo sapiens
ccttctgaacagcatttttgcgcttgttaggacctaggcttcctgcttggtgtggaccctgattatgattactacactcaaccccacagcccagctctgctagagggtcccggcaatccggtattttcttttctaaagtctcctatccaggtctgagaactataggttttttttttttttttttttttttttaaggagagagagaagttagggggacagggggctatatactaggcactgtgttaggtgatctgtaatataattccaataaatgtttataccttttctggctctggcagctgggtaatcacaacattatatatgggaaaactaaggctaatgcaggtgaaataatttacccaagtaagcggagggaaatggtctgaacctctgacagctaacatccaaagtgttggcccttagctactctgattttgtgcatctatagtaactttgggtggaagagtactttttctttttttttttgtaaccctgggtgcctggaaaggtaggaaggaagtggggagacttgaagaatatgagaaaggaaagattggtaaccatatctttggagagcacattcatttcatttcagggtatctattctaatggaaatcatattttcccattgttaataataaatgatcatgaaggcagttgttattctttgagttgcttgtataatgatgcaagaacactgttaatcagtattttaattaggtttatagcattaaagttgtttttatatttctctatgtaaagtttccatgagtttcacatagttaacatcattggtttctggatatctaattcattttcagcactgataataggccatgttgtattagtttggaaatgtattatctatgatatgtattatatcctcttggcagctacagcattgtgttaaaatgaagcatcgcctgtaagccagatgtgtgcccttgtcattgcctcatttgaaatactgcattatgaagaaattgatgcaatgctcacaaatctataaggattattttgcatgtgtttgattaaaat

SEQ ID NO: 45539 - DNA, 1391 bp, Homo sapiens
cttggagagtatatgacaaggcctaatgccactaaatatcaaaatgaagacttttttgatttattgggattcatttttgaaaatgcttacaggaattcacacacacacacaaacacacacacacacacataagaacttttttaaagaaactaccaacaaaatctcaatctgaaaactgacaatggatagataatttcctattatttcaataacaatctgaggttagaaggccaaaacaaatttgagtttgcatttgcacttggcctcatccatttctacgaggaaaagaatgtaggtacaccaaattttctgtagattgaattatagttttaatatccctttaagcatatttttggctttgatatttcatttgccagtaaagagattcttttgttgccaagcaaaagaattaaatgagtttgttttagcttggaagctaacactcctgtaacttacttgcttttctaatcaaatccagtgattattaagtatcttttatatgtgaagtggtgttagacgttggctattagtaactcttccttagaagaaatatgtaattccttcaatattcagtaaaccagttcattagtacaaactcaacctggaaccttctttcaaaagtagacctgagcctttagaaggcagtagacttttagaacattgaaagactttcaaggtaattcctgaaaatggatgctgagccaagtgaggatccaagtgcttataaacttagccaagagaatagtcaaaaatctctgatttgaaaacctaagatgtagctaagccaatataagatatgacttagaaaggagaaaatcattatatggttgacttactggtataagaaaaagaggagtgatggaatgtgtataacaagcaactttaaaattaatatcccagagaagacaacaataatttctaacgactctattttgtattaaactcaaagcttctgaggcttcatctgtttctgttgcatctatggttttatatgtgttccccagaaatgactcatttgttcagaaatgtttatattcatccaattattcacctttttattgatttaatacaccattattgagtttctgctaggtacctggtactatgctaagtgctgaggttataacagcaaataaaccctgcagtgtttttgccctgatgtaattaattacataaacaagtgtctaattatatttgagatgagtgtaataaagaaaaagcattttatgatatgggactgatttatagagaatttgatctagtgtacaggaaagagacaactgccctatgaaagtgacacttaagctgaaacttgcatgtgggcaaactctctagtttgggaaagtcctggtatcttcaaggaattaagagaccaaagagaaggctggatg

SEQ ID NO: 45540 - DNA, 1008 bp, Homo sapiens
aatctggcacaagttatttaccatcattttaccttaatacttacatgtgtacaatgaaagagagaaaccaaatcttgtctttcagagttgtttttcttcttactctctttttatgatcacaactgaccatagaaagtactgtataagttttctattgctgtgaaacaaaataccacaacgttagcagtttaaaataacaccgatttatgaactcactgctctgtagttcagtccacacggtatgactggattctctgctcagggtgtctcaaggctaaagacagggggctagctgggctgtgttttcatctggagtttcaaccaggggaaaaattgcttctaagctcattcttattgttggcagaattcagtcccttgcaattgtagggctgagctacccgttccttgcttgctgtcaaccagggaccactctcagctcctaggggccacttgcttttcttgtcatgtggtcccctccaccttcaagtaaagaacttcacatcaaatctatttcatttggatcctctgcctcaaccaaccaagaatactctctgctcttaaagaattcatgttattgagtcaggatcacccaggtaatttttctgtcttaaggtccacacaacctaatcacaggaataaagtccatcataaattccagaccctggagttatgcaggtatgtacaccagaggggtgggagatcttggtgaccattttagaattctgcctatcacattttacagcaccacctgatatatacacatgcaaataccaatatatctcagatgaaatttcttaaaagcacttccattactattttgactacttatagaatggaatattctatagaatatgaaatagaatacaatattctatttcatttttttaaaatacagtctcaactcactaagtttatttcatagtccattaatgggctatgacctgaagtttgaaaaatcactggacttgatatttgaaatccttcagatacttaaacttctattattct

SEQ ID NO: 45541 - DNA, 1030 bp, Homo sapiens
acttactaggcacaacagaactcatatgcacgtgcaagaagtaaaagctatgataaaattatctggaaggggaagcgggttgtttacacaaagtaacatgatagcagatgagcaaagaggaaggtacaaggaagaatatttactagagagtttacagcatgccaaacatagagtaaaaagtgaaaaccttttagccagatttgtatacctgattaaatatctactaagggtattatttttaatgtatagagttatcaaaaacacattccttgctttctgtttctaacacttctagttctagggctcagtggctcttaacaatgagcaccaaaaccctgcttcatgctgtgttgctgcctgtgctagctgagggcagaaggtgcagtgagaaaatgtaagggacttttgggggttggtcggaaagagatgaggaatagttactgggcatgaagataattggaaaagaagaaaatattgactaaacatgtcaaatactcattcaataatgaaaagtaagaaagaccaacaatatgtgagtggttgagagaggagaggcagaaaagggaaccaggagagtggaagtgcttgaagctttttagatgagagtaagagctgacttaaccctgtgtatgtttgatcattactaatcctccttataccctagttccttcctttatttccttaatttccacatctatataaatagaatataaatacaaatgtaaatgtattatctataaatagagataaacgtaagtattacattatcacctgtggttttctcaaagctcacaactattctatggcagttcttgatggcattaagtgaggatgttaacctgttgttttacatgcatatggatggaacacaaaattaaggtggcaatgtaaagcctttagaaatattcacccttcaactgtttaagcaacccactttgcatttatctattagtcttttgtttagctgccataaaagccctattaaaatgtttttgtggtcttaatttttaagttgttgcaaattgaattg

SEQ ID NO: 45542 - DNA, 1052 bp, Homo sapiens
taattactgtctttaataggattaaaaatagaactggaataattctatggtaagttgatgtcacttattgtgacccaagtttcaattataattgttaacgatgctattgctgagtccttgtttggcttgactgccatgcagtgtttttctgatgagtgaaggagttaacaccttttggacaattttcagaattgaaagaaaattacttggtttttagtagggtttgtaattattatatccaaggttggtatcttctagaggggaactttttagaaaattaatattagactctctcccagtctattgaaaggccgtattaaatctctatcatatactcttcaatgctgtgatcatgattatattcaaacgataacccacattcttcctctttgtggtcatttgggacacaggtggcagtctcacatatgataaggaatttgaatgttagcataaaccattttagtggcaaaaaacacacaaatgctttatataaaaaaagagtcaattttaagggtatcaaatttgtctatgaagttaagctttaggtttactggcagatgcagatgtagtgactgtataatagattcatgccttagtttctaaacttacaaaatctgtttgcttagtttagtgtcagattgtcagtctgctttattgattccatcagtggtttggcttatcatatcagaaatttgagtgctgacttctggcctcaagcgatcctctggcctcagcctcccaacgtgcttagattacgggtgtgggctatgatgcccaaccctaacatttctatcttatgaaatagttgacaggtagatataatttgttactggagaagattattttttcattttgttcttttaagatccaattgttattttctgagtttattaacatagctagccttataatgagaacacagctctcacttttaccattttgcttaaagatttgcagatgtgtcgtgctcatatacttcaatgtctctgtgttttctcaggatgttacagttctgcttcttttatttcctaaaattcaataattttatctgt

SEQ ID NO: 45543 - DNA, 1034 bp, Homo sapiens
cgtccactgcaacatctacaaaataggtccttaggaagtgcagaagtctggaacagttctttcccaagccacaaccctgaaaacatggattgctgggtatgcagattctcctgggtccctttcccataaacaccgaattagacactctgaggatgcagcccagacattctgtatttttcaccaggcataatggtgatggctgatattagaatggtgaaatttatcccacctagtaagaatctaaactgaaaatggtgatgatgcaaaaaagatctgtcaaccagttaaaaaaaaaaaaaaaaaaagagggtgtgtgtttgtcaggagggatagtctttagtagtatggccaaaagcttaagcctgattttcagggctctattgttggagtgggtagttcatcaacttcctaagtaattcaaatctttttccccccaatatattaatatattggtgattccaagaaagagggtttaatttatttaatgcctgggaaaactaaaagaactacaaacagatgtgaaaggaagagaataaccacatctcacaggaagcaaaatttctgtcaaaagttactgttctttccctgtctaggttctttgtccctgaaaggtagatccgcaaactaaatccctcaataacgttgcctaaacaggactgggatcatagaatgtccaacactaacatgagttcataatggcacaacgaacttaaaatgttactattcatgttttaattatgattgcagtcttacgttgaaggtatctccgccgtccttaaacataaaaaaaaaaaaaggaaatacaagctgcaaaagttttatgtaatgcactccaccctcttttttccccaagccaacacacacccttcaaactttttgacagttattttcagacccctcctaggctcccgaactccatgcaactccagcagtctcccctgggccatttttagcctctgctctgacctggcgggaggctgggtgtccaccctttcccctgcagtcctgaaagtccggtccgagcgcggacgggg

SEQ ID NO: 45544 - DNA, 1570 bp, Homo sapiens
gaaatgggaatagcctgactcatgtgcccacatgtgtctatgtggaataatcttttaggaattacacctttcttctggaatacatgttgatggagcagccactatatggaagatctctggttttgagatagaaaagagagctaagaagtacaattttggctccaaacacttccacctggaagacatatatggttcattgggcaaagcaagttggccatgtctgacatcaataggatggtgaggtatattttatattcctcaacaggaaggaatacaggcttagtaacaataatatagtctatcaccatgactaatttagaaaccattatattagtttgacagatttgaaaactgctggtgttaactgtcacaaatatgaagttatgtagggaagcccatttcttctgtcacttacgcagtctgcaggtctttgatctcttcagaagctctatttgtatgtctctcaaatgtgttgtgcgtgcaaatcaatagtaaatctgtaggtccggactgagcctcagatcttacattcacagtaagcttctgggtgatgtcaatgcagctggtccctggaacacacttttaaatagcaaggctctatagctctttaatatcatggatcttttcacttagaagagagccaactttaaggtctagatggaggaaaaggggcagtaaaaaggaacattaatgggtatgagaccaagaggagtgtgaaatactttcaaataaagggaaagaggaacatgcagaagaagtctcttggatgtttcacagagatcagataaaaaaaaagtggaaaagcccatcaaatttgccatttaatttattcattttagggtggggattgtgaactggggaagagaagatattacaatacattgtggattctgtaggagataatggagtaaagacagtaaaagtagatttctactttcaaaaattcaactgaaaagaagcagaaagatggagtagtatctagaaaaagatagatactagatttgagggaaaattgaggggttttgttttgtttttgttttgatcgtggataaggagtcaatagtgaaatgttgaaaatacaggtttttttccctagtatctcattattgagagaattattagaaaagctacaatcagcaatctgttttttttttagtttagaagatacttttaaagtgtttgaagttttagtatctatattactgtttttgaaaatactgacttgcagctcaatgttttaaatagtcaaactttttatacatagctattatcaatattgtaatattcagttattataggagtcttttattacattaaacctgatctcatagtacgttcattgatgatttccagactttctacagcatacctttccatttctttaccaaaatgatttttttaaaggttttatactgctctgttaattctctgcttgaaagtccttcaggagttctgagtctagtaatagcaagctaggtaattcagactatcctgctgagaacaatttaaaaagctggacacaaagcaaacattttattaagggtatcagaaagctaagtggtatgggtag

SEQ ID NO: 45545 - DNA, 1049 bp, Homo sapiens
tttgcatttatctaattatgagtgagattgaacaacattattacatgtttaaggacatttttacatcctcttgtgaattgtctgattatatcttttgtgcatattttcacctgcattattttttccctagtttttaagagttctttaaatatttaggatacaaaagtagaatatgtgtatgtatgcgcacgcgtgtgtgtgtgtgtgtatctctgcatactatttttcctagagttgtaatggatgaaccataattctttctctacttttctttatggaaaattaatggcagttcataatagttttggtagttcaaagtatagttcaagttgttgcttcagaacattactttattagatgcttgccatgtgtcaggcccctagttaggcactgaggaggctttgtggaagaaaggcaatgttttggaggttacaatttagtggaagggatttaaacccaaatattaacttaacactgtgtcagatgctgtgaaggagacataaagatgctatgtgactaataacagggacttgggttagctgggtgatcaggaaggttttaggatagttttttaaagcattgcagaggtaattgtcctttttggggattttgatattattattattttttagtgcttgtttagaaccattcacccgacagctgagatgattaggtcaacataaactcttgtatggtcaaaatgccatttaagtttagatagagggagaacaatgaaatagatattttctagattatatggtcttaggttgaaccataaattttctttgaaaactatagtttttaattttggtaaattttgagggtaaagtaaatgtagcattttgccatgtttactatcttatttaattttgtgatttatttagttttttagatttcattttaataatttttatgtttaggtaggagtggtgttttattaattcagtgttgttattacatgaagtatagatgaaaaggttaacactaatacaaaatttaaagggaagcagtttcgctaatcttgatgataatgaaacattcaaggaagt

SEQ ID NO: 45546 - DNA, 1045 bp, Homo sapiens
atcaaagagattatgggcaatagttagaaataattcttacaacagttgattgtgtaaattttagttgtattttttttacctaggattatattcattaccaggctccaggataatatttctatgactttctgcatatctcaagtgcctatatttctatatttctaattattgggttttatgtctcccatgctgtataaatcccttagaaataaggatattatgttttattagatatagtttacattttcattacactaattaaaataatgtctattagtattgttattatatgtttttcccagaaattgtcagtttatattaccagcaaccactgataaattttttgaatgtccagcttagtagtggtttactatgaagctaaaaatatgttcctggctttgtcggcataaagactttcattggtaataattcgttttcacttaaaaatattgcattttgagaatttccatggaaaactattttttctttatttttcacttttttttgttcacatatggaggaagaaatatagaaggagatagaaccaaagtaatggtaaaaatcataaaaatagctaaaatgtagtattgcaacaggtataattctaagcactttaaaagtattatttatttcttatctcaaatttatgaggtaggcacttggcctgggtttctgtgtttgtccctccagacttactctgtattctctagtgtcctttgggtggtagactgcatcagtgcactctctcttgcccttttgcttctgttggtggttttctttctggagcagttgcagaagataagggggaaggaaagagagaataagatggggacatatttattctcctagctccttccctgtaaggttactccagagtgaccacattcttcagcatctcatcttatcttttgtcagccctttccacagagccatctctaaatttaggtatctgtttctcccccttacctctttagggatagaggagtcttctgttattgttcaccctgggtttttgtacaccatatgtacctttgtaaatagttcc

SEQ ID NO: 45547 - DNA, 1138 bp, Homo sapiens
gaacattctacaaatgaagttgggactttatgtcataaaactgatttaaataatcttgaaatggccattaaggaagatcagattgcagataactttcaaggaatatcaggtcctaaagaagacagcacaagtataaaaggtaattcagaccaggattcttttcttcatgagaattcgttacaccaagaagagagtcaaaaagaaaatatgccttgtggggaaacagcagaatttaaacaaaagcaaagtgttaacaaaggaaaacaaggaaaggagcaaaatcaggactcacagacagaggcagaagagctacgcaaactttggaaaacccatactatgcaacaaactaaacagcaaagggaaaatattcaacaagtgtcacaaaaagaagctaagcataaaattacatctgctgatggacacatagaaagtaagtgttatagagtaaatgaagttagttcatccaattgtatggtgtctccgtctttcctcactgactcaaaagccgctgtaccttagggcaacctgaaggataagtgagtgacccttgaccggtgattctctggggacaagtatatacagtctccagtgtctactgtcttttcttatcccacaggtggattgtacacataatgagcatcattgctacccaccatgtttaaacattcttggctcactacatcgtatcattaaacaatttatttcttgagaaattgcacaaaagctgtataatacctttgatcactccattttctcttaaaaagtttttggtgtgttaccattaaaaatgtcttttttcatatataacattttaattgccaaagttgtaatcccatcttttataaaatgtacagttaaacctaaaagtgtacttacagaattcttccacgtatcgagaagtttcatcatcatcatctaattattttcttttaaaaacctgccctcaggacaaataaaaacactattttatctgtcagttttctggtactgtttacttctgaaaattacactattttcagtcttttatttctaatatactgtgcttctgttaataaattatgggttaaatggggtataacaactaacttagctaacatttctgatattctattagaatgtttatcccagactagtccat

SEQ ID NO: 45548 - DNA, 1038 bp, Homo sapiens
aacttggaaaattgtatataatgtctcaaaataggccattaataaattgtttacttgtattttagatcattagattattgtaggaatgaggtcaaagttgtgtatctaatttccttttccatcactagtgtctttaaagaagaaaagctttataatatacaacatctgaactagtcaaacacatgccaaggaaaatcttaatttggttttctaaagaacaacctgacagaatatagccaaataaaatgtttaagttaatgccttcctgatagtagaccttttatattaatataaaacaatatattttgtgtatattttaagtcttcaagatttatcaagatattttacaaatataattttttaattctggcagcacagaatactaggtatattaatagtcacttctcctaacaggacagatcacttgtatgccttcttcattcagtggagtccagaaatatatgcagaagatactggcgaatataccagagaacctggatttatagtagtaaaaaagattgaggagtctgaaacaattgaggattctagtaatcaagcagcagccagagaatgggaggtaaggagaaaaatatgaagattttagtcatctttttagtttgtatgaatttatagctttatggtagtacaaagtataagtgatgtttccacaaaagaggaatttttttaaaggtcaggttcactatccgtgtttatttgtggttattgaatgaatctgaatagtgactttaatactatatttgtcattctgcttttgctttaaaatactagaaaacccactagcaataaaatgacttttattgagtgtcttatagaatatttagtttaggaaagattaacattatggcaaagaaggaaataattttaattttgctgttatattaattttcataaaacatcgatttcacatctgatttgttttaatttcatctcctccatggaggaggtacggcagtcatttaacacatctgtgcatagtatttgcatagcatctatacaaattactactcctttctatgt

SEQ ID NO: 45549 - DNA, 1032 bp, Homo sapiens
caatactttacattttaggacagctctgttagaaagttatttgttacaataagcttaaggaaacatatctttgtaaattggattcatttatctttattctgtcttccaatgcaagtcaataacaacaagaaacattttctatttactgcgatagtgtgaaaatgtttgtcttcccttttaatcttgtttcagaattattttttccagtacttcaactgtttaactttatgaactctattcagatcttattcatatcagtaccctaaaatatgttaaaagagttcataaactatggcaccccaaattactaaaatgtacacttgggatagcaggaaaaattccgtaatatttttaaaaattttaatttccaaatatgaacattgaagaccagtcctattgaagacagacagaaacatatatttactaagaaaaagaaaatttagccaaattttaaggtggtcaggagtaaaagttcctaatgataaatcagttcctaagtatttggataaaggatctgagaaatactattcttactgctcacgatgtgtaaaggactgaatttcctctttttgtagtgttactttgtatgccacatgataaagagtactttggtgtgggtcgggcgtggtggctcacgcctgtaatcccagcactttgggaggccgagacaggtggatcacgaggtcaggagatcgagaccatcctggctaacatggtgaaaccccgtctctactaaaaatacaaaaaattagccgggcgtggtggcgggcgcttcttgttgtagctactcgggaggctgaggcaggagaatggcgtgaacctgggaggtggagcgtgcagtgagccaagatcatgccactgcactgcagcctgggcgacagagcgagactccacctcaaaaaaaaaaaaaaggagctatgcctgaattaattgcgtcaacatggctgctattgataagaaagcatgtttttaaacaatcaaggcacaaaatgattaaggaaacctttcttcatagtgaaccaaacttatgtt

SEQ ID NO: 45550 - DNA, 1066 bp, Homo sapiens
gcagcacctgggaatttgttagaaatgcaaattctcagaccccatttgagtctgattaattagaaaccatttttggagcccagcattctggtataacaaatactccaggtgatattgatgccggctaaaacttgaaagccactgatttaggtctctaatgactagttctgtccagagatgagagccagcctcctcagaaacacatggctggaaggatacctgagcaaaatcaaggccacttcaggaaggagttgtaagggtggatattgaataggcaaccaacagaatagactatgccatgcttggtggtttttggttttgtttttaatatctcatttaaacctcattttggaacacacgtcatatttgttattttagaaaatgtagctggaagttatgacaagctttcaaaatgctgcttccaccaccaccaccaccaaattatataatattgctgatggttgttaggagagtctgtgatggaggggtggagtgtgaccacaatgcactgtatgtagaagagaactttcctggtgtgaagataatgatggtgttcctatgagggactgtgggagagattttagggtaaatgtagtggggctgaatgagaggaataggggaaatggttggtatgtgggggaggtagggtgttactgtggggtgtgctgtgccctgtgtgagtgcatgctggaatgtggaggaaggagatgggagtgggggtttggttgggatgcagtattgcgtgttagaaaggtagtgtgtgtgtgaaaaggtggcatcatgtgtgcatacaacaaagtgaagtggaaggagctgctttaccttaaaatggaagaaattttcaaatgtatcatcatgatattgatattctgattaaaactgaattctagatagttttagtttatatgtatttgtagtttatatttaatctttaaaaaattcacttctttgcttatattcaaaatatcactggttagtgaagtatatgtaggcatagtgaatataactaccttttcaagaaattagatgttagaaaatgcaatttaaaaacagactgtgtaacagg

SEQ ID NO: 45551 - DNA, 1026 bp, Homo sapiens
acacaaattatggacttagtaaagaatatacattatcattactattctgtttacaaattgtcattgtgaaatttccagaaacatttaatgactaagcttaatgatgtaagtcatgaaagcataaaaaataaattatttggatttaaataacaagttattgactggtttctttttctttacctgtgtggctttactgtggcttgactaacacaaattgaatacattctcatgccaataaaatctaaaatgtaaaggtataaatgaattttagtgaatgtgtgactattcttaaaacattgagtgcaatattagtatctcgggcacattggagtgtggcatgtaaaaccttcattttaatctcaagaaaaggaatcaacaccattggttataaaaataaatgaagaaaataggaacgatttggtaacacaataaaaattcttttagcaaatttgtacttaactagctcaccagaataaccaatgcttttcattccttccataaaatatgtcaactgatagcaacagctacttgaaagcttgtagttattacagattttctaagcatcagtggtgcctattctcaaactttttatgttactgctacctgataagtgtaataatgtagtcaattaaatgttacataactatgaaaaacgagtgctaaaagaaagttttattgaaaactgtaatgaacacattttaaaaacttgataaaagtaagttgctagaaattgctactatgttaggtttaggtaaaacacccataaaaggttagaaaaagatatttaagaatattcatgtctagtttgctcttggatttctcaaatgattttaagttctcactgtttaaagaaattgaaactgaaaatcataaatacccattatggtcatggtttatttaagaactgtgatcagtaaatatatatgcaaagaaaaggccttggccctatgttaaaatattatccaattaacatacatttctgtttaatggtaaaagttaatggcatttgtgtccgattttttttca

SEQ ID NO: 45552 - DNA, 1132 bp, Homo sapiens
aaaaaatcacttgccaaaataatacatacttcatagaccactgagttctagtttttattcacactacaacattctctttaacgatgttgcaggtattctcaatttccttttaagaaaaatgaaatgtgaggagaattctggttgtaatagatgacagtacatatgatctgcaggtttgggcatatgctttcatcattaaattatctgataaagttacaagtcacaaaggagaatgagaacttaatgattctattggatttaatatattagcaagaaaacatactatttacatatgtgtagcttagtaaggcattaacataagtacaaaaactatgaaacagatgcatatttcctcaacatactgtgtcaggtatactgttttataatttggttgttttagccttattgcacaccaactcccaaaatataggttactcttgttcaaaaggaaaaaaaaaattgtgattttctttgagtggtatatgttattaattaccattagcatttgctcttataaagggcaatgattatagtagacaatattgtaactcagtagacttgttgaatatgcaaacttactgtcaagtgacctcaaaaaaaaaatgaaaagatagaatacactagtagttcttatcctcttttgtaggaaaccaataatagccattgtggcaataattcatcagttgattttaaagcttcatgttatgcaaaaaagaatcctgctgttatacatgtgacagtgactttgtgctgaaatttcagctattccagataaacattgtatatcttgtaaattaatgtttaaaggtgtagttttgttcttacagaaagtgttgattgccaggttgcttatagcactttaagttattctaaaaatgaaattataagccaaatatttggcttaagtagatttagttgtatagcacttacatatttagttcttttgaaagtttagataattatttaaagaaagcataatgctaatggaaaagaaaatctgatgttctattataatatgctattgctgaatatgaatagaaatacagggcatcatttccttgtctcattataagttagtaacaatatatagattaaatgtttacaatatagggaattgtaaataaatatatca

SEQ ID NO: 45553 - DNA, 1068 bp, Homo sapiens
atattaaacaacagtgttgatttcttactgcaaaatcttggctctgtcaacacacagtccccacttccaaggaagtcacaatctaatggagaaaacaaacctgtaaacacacagttttaaaaggcttgtgtcagggtatcttccgtaagctgagtcgtagataaatggatgttatttttaatgctttttaaaaaatgttttaaatattacataatttttagaaaatgctattatgaaggtatgttcattataggtttcctagatgatagtagcatatataaaatcctgagggacgagtagctgtatactaccaacagacaaggtgatttaactgagtaattggaccttaccctgtggtcattctaaagaggattgatgtaattaatttggaataataaataataactactacacaaatttgtaggaacaaagaaaacattttaaagtgctttgtaaactgttaagtactatataaaaggatgtgttactattagctagtgctaatatgattatgtccttcctctgtatgatctggcggttgcccatgtctccagctttatcttgagcccttctccctctcactttgtgagctgcctatgctggcctttgttgaataccctaaattgccatgctgcttcttaaagctggcacatgctagtccttccactgggagtgttcttccctccttgcctcactcttgcccccattaaactttatcatttatcaattccccacaaagctcacctactacaaaaaagccttacttgaccactctactacccccttccctttcctcatcccccaccaaaattgaaaaaaaaaacccaaacaataaaatgaagcaacaaaacacacctgcaatccttcgattatgtattctattctaatactattgaagcacttacccaattgtgttttgttttaaaattttgtctctcctaagatgaaagggaccaggcctgtttcttcactgtcacttccctagagcctgacacatgggggcggagctcagtaattatttgatgactaaatgaattgttaatgagattaataataaacactaacaca

SEQ ID NO: 45554 - DNA, 1047 bp, Homo sapiens
ttgaactcgggaggcggaggttgcggtgagctgagatcgcgccacttcactccagcctgggtgataagagtgaaactccgtctcaaaaaaaaaaaaatcagaaggatatgagggtgagcagggactctttaagttcctgagataggagcttgcctttcatttttgaggagcacagggatgctagggagactgagtaaattgggtgagggagagtggagattaagtcagtggcatagctggggagaaggcagatcatgaaggatcatgtaggctgtaataaagtcttggagttttattctgagtaaattgggaaggcactggaggtttttgagcagcaggagaagaactaagtgtacaagggaagaagcagggagacaacctagaatgctatggtaatattctagagaagagatgatggcttgaactagagtagtaatggcggagatagtgagaaaggtgaattctaggtatatgttttaaattgaacccaataggatttgctcataaattggatgtgtagtgttaacaaggcagctgagtggaaggatactacagagattcctagtctgaggaaccagaagaatggaattgccattctcagaagaagaacaaacaggatgaattggtagaaaatcaaaagttggattttggccctattaagattgaaagacctaattaaatattaagatgagaatgtcacatagtggatgtctagggatagtgaaagtggtttgcagggaaagagaatttgtttgggatgtgacatttttaacctgagaagttaaatgatttaggttgaggattgaagatttgtaaaagtggatatggcaaaaggataagaaaatattttattgcacctgtgatgccattagttgcatatacactgccacttttttgccatcgagagaaagaaaacactgggggcatgccaattactgaatcgttaaaatgtggggagaacaacggtcttacagtcaatgaaataccattgtcattttgtagtttagaagggcctgataggctgggatcaaagaggtgggtagcctg

SEQ ID NO: 45555 - DNA, 1058 bp, Homo sapiens
ggtaagaagttgaggttaaagaatggattttggaatttgaagatttcgaggtgcagctgctccaggttcagttaatactttctagatgttgtacaagacccatgatattcctgttggtagaggacggtggagagtatataacgtggccaaataatagagcttcttgaaaagtattttagcccctccacttcatttaatttcactcattaaatgagacccagatgaaatgaaaggcctagaatttaagtacttgcatgagatcaaagaactatttagcatttgaaccaagattaggccacagttaaagttttgtaactggaaggcagggaatttttagttgaacactgaaactttgcttcatacattcctgtctaagatgttatacattgttcaatttgaaaacacttctgtttcaacagcctcaaagagttgctgagagctaaattaattgaatgtggctggaaggatcagttgaaggcacactgtaaaggtaatcagtttcatttggaagataaactaatcccatttttctgatcaggattggtttgggggttgcttattttaaggtatattgagtattcaagcatgattttaaacaaatatggaatttaatcttgtaatggtttcctcttggtggcatatgtagacctaattcccaaatttttagaaattttctgtttctgttaagcgtgagcacttaagattttctctggcatcagaatatggaatctcatgtctttcagcaactttattgtttcttatgttttaacttaaatggaacactttagggttggcagacttatagaaattatctctttcctgtctttaacagtgaatatttgaaaaattcatctatgaaagctcttagaatgcacttaaaaaaaaagtagaagggaagcttattaaattgctgggtattgttgatgataccatttgatggattatacatgtcactaaggggagcctcctttctgtctcagcttttgatataatggaactctggatatttttaatgaatccccattgtaatggtttctacaaataaaaataaactatat

SEQ ID NO: 45556 - DNA, 1050 bp, Homo sapiens
ttcaaaaactctccttttcttcatctcttttgttcatgtttctattagccttttgatcttttccttatcagtgtgaaacaactgtatagtagaaagatcagcccttttctggaagaacatttcctcagtttttatcttttggccttgcttatggtgatttttcattcagcataaattgttactatgttttaatcaaatttatccatctgttatagcctctgtatttaaaaatggtcttctttactcctaaagaattttctcacgttttcttctcatcaacatgcagtgcatttaggcattggatagttcatttaaaatgatgaattgcaagaagacacttttctttgtcagataactttaccttttttttaattgaacatgagggttatttatgaaattcttatgttgtttaccctgagcaaaatgtcagatcttaaattctcatgtattaattggtaccttcttactcttatttttttatttttgtttttcagccctggtacctgacagtgtaaagaaggagctcctacaaagaataagaacattccttgctcagcatgccagcctttaagattgaattagattgtgttgttgtggttttatttctgaaagtaaaacttgccataaattagaaaacaatttcccaaaataaaatccttttttgtatgatggtatacagttttcagtaatgatgtatacattgtattgatttttttccctaaatgtgttattttaataaatatctcatgaatgagtttgaagtttgcttggattttgaaatgaatgggactttgtctttattactaattcaccaaatttgttgagcgcaaaagcaattaatgtagtttaagtatttagtatgtacagttctctgtgttaacagctgagaagtaagcaaccttttctgactgcatatggtgtattcctcttttgagtccccataatattttataaattgtaatgccccatcttgtactacagttgtcttattcgtattgtttataaactttgagggttaggactgggtcttactcatctttatgtgccttc

SEQ ID NO: 45557 - DNA, 1037 bp, Homo sapiens
ttcattatgggaatgttttaaagtggttaggtgaaattcggaataggtatttctgtctatactacaatagtgttgtttttatatttaaaaaaaaatcctaagaaaaatcctaaaaaaaaaaaatttttttttctgtttgagtaacattctagaatatgcaggaagtcaagagcaggtaagtcatttgctttaggacatcatctgtagacttcagttccttctgttttgtcacacgatcatacccaagagctatgatgtctaaaatgtgtgctgaggcacctcagggctttacatgaaattcacagggatgccatagaatattttaaattttgcagtgaaacatagtgatagcatctgttgaatacctcaactcaaagtagttcacatttgcaacattaaatcctgcagtatttttttatgatggtgttctttaatgtttgagataagtttttgtttacttatatttttggtgacatctcattgcaaagccaggattttaggttgtaattaaaagcgagtactgcaccaaaattaatgtagaactgaaaacaagaatgatggtctccagtcttattctaaggcataagaagctgtgcagtgttcaacaggcacacaaatttcattaataagttcagtgattgtggttatttaagaataaaataaaaatattactttttctttaaatgtgtattttttacaatggctactaagcagttaggatatacttaagttttttgggtgtaactaccttattcagtggaattgttaggtgtttctgtggcctaagggtactgtgaaaaagttacttacatactaagaggagggtatagtaaaagaggaaatggacagcaatcagctctttttttaatatatatagacatgacttagaggttacacacaacaatttttgcactgcctgctttccagagcttagtcatatggccccctagctgcaaggaaggataggaactgcagtctctggctatatgaccatttgatagctgctaaattgaacttattgctaaaagtagagtggt

SEQ ID NO: 45558 - DNA, 1062 bp, Homo sapiens
atgtggaaactaaagtaccgggaggttaaataattaggtcagtgttgtaagtttcatagtgaaggatctggccgggtgtgatggctcatgcctgtaatcccagcactttgggaggccaagacgggcagatcacttgaagtcaggagaccagcctggccaacatggcaaaacctcctctctactaaaaatacaaaaaaactagatgggtgtggtggctggagcctgtaattctagctactcaggaggctgaagcaggagaatcgctgaaacccaggaggctgagattgcagtgagccaagattgcgccactgcactgcagcctgggaaaaaaaaaaaaaattcgtagtgaaggatctgaatgacttccagagatctggctctagagtatgggctcttgaccgttaggttatgctgccccttagaaaacttatatgcttatgttttataacaaataaatgtttagctgatttattgatttgtttatggtggaagtggaagagtaagcagggcctggggccggggctggggccatagacctctgcaggctggatttttagaattcaggatccctgtcagcaaatatttaaggccagaagagggttgagaccatctgccttatagggttatttagcttaatttctgtctgtatcattataatcctaacttatgatattttaatcttctaacttcatggtctatatttcctgaaacatttttgataaattcttttgtttctacagaaactcaaacagaagaatcaacagctgaaacaaattatggatcaattacgaaatctcatctgggatataaatgccatgttggcaatgaggaactaagctgatatttaaatttcctgctttacacatgttataccattgttttttccctcaagtattttttccctgtgaagaagattatttatctgcttttattttagtcactaaaactaaagtttttatttttacattgtgatttttacattaaaatattaactttttttaatgctattttatgaaagattattgtaataaactttgatggggtttgtattttggttaatct

SEQ ID NO: 45559 - DNA, 1035 bp, Homo sapiens
aaattattctaggttctcagcttgaattttgctccttttatgaaattttcttgcctatcttagttctgtataactaaggggagtgtggctttatgaggatgattttatcatgagtaaaaatatgtaaagctcccacacggatttccttaccatttatttatttatttatttctgttcttaattacctatttctgttctgattctcttaaaagtacttaataattactaaacacgatgagcttttctcagttcttatctgctttgactttttgaagtatttcgcttttttgaccaaccgtactttgtaaaaatctttcctcctttagcttctactggcattatacaaatgcatttactgactttgatagttatcttttcttttattcctgcttcttgtcctttactggagaatgtcctttaaacgttctgaaaatggagatgccaaaacagaccaatacctaaaaactgaaggaagtttctttccatgcaaggaagggtctgctccttttgataattttgtagttcccgtgactgtacaatctgcacctttctcttctttcattagagaacctcttgtctctcggtgtcaaataacaccattggggaatgatttctaatatgtgtatgctactctagcttgttttccaaggcctagtaatactcattaattttcaagttggtataattttagtcaataccactattattgcaggaaagattttctttgatttgtacctcaaatgtatatgtaaaagagctcttgggagtattccaggggttctcatgataaattttacttcccccttgcgtgtttagggtttcttatacacacggtccttgttttgtatgatagtgttgttctttataattgattgtgcaaagcaatcctaatataatcaatgagaaaaattagaattgtcccatgacctttaatatcttttgtcaaaacattaaaaattctcttactgttataaaattttatggaaataaaaaaatagtaaaaataaaatttattttgtaccctgtaattttaaa

SEQ ID NO: 45560 - DNA, 1005 bp, Homo sapiens
cagcgcccttgaattttgaggaatacagttttaaaatcagtagcttatacagtacagattttctatttttctgtataagaaacaggagagatactgaattctattttagcagatgttgaatttcaaatgtaggtaagatatctatgtggaaatttaaatgtagagtttgaaatttagatacagatctctaggtaatagtcagggctggagatctagattttgagttttccagcagttttgtttatctattgcgtaataagccaccccgaaacttagtggcttgaaagagcaaacattttatttgcttatagtttgcagtctgagctgccctcagcagagtagttctactgatctcacgagaagtcattgatgtgggtgttttgaacttgcagatgatttggaggctgggttcagtggagctggctggctttctctctccgtttagtcttagagccttttccttgccacatggtcttctcagatgatctctcctgcaagttagctggaatttttccatggtggctcaggacaaacatatagaacttgaaactaccaagactttttaaggcttaatcccaggactagcccagtcttacttctgttacattccgttatttagagctagttacaagaatagtctaaattcaagggggaagtacctatccaaaggtgtgaataataggaagccaccaatgtaaaaagtctaccataggtgcctgtaagttaggaatgtagaatgttagttaggaatggttgaaaacaacaatacataaagaacatggctagagaagagagccaaggatagggtctttagaaatatagtcatccctcagtatccactggggattggttccaggacccctgtggataacaaaattcctagatgctcaaacccctcatataaaatggagtaggagttgtatataacttctgcacatcctcctgtatattttacatcatctctagattacttataatgcctgatacaatgtaaatgctatgtaa

SEQ ID NO: 45561 - DNA, 1128 bp, Homo sapiens
atatttgttaaataatgagtgaagtatatatttctagttagtaataactgttctccagacagataaagaaagactttgaatggactccatccatgtagtgtgaaccaaaatttgtgctccaatttttatcagtttcctaggtttcatcctttgatgaaataaaaaatatgtgtattaatttgaaccatctgatgtttttttatatatcaaaaattgttacttatcagcaatttcacatagtttgaacttaaatggacaaacaatgcccaatttgaagtatggtttaattataatagtaaatgaatgccttttaaaattggtattcaataaaatacccagaaattatgatgatacaggaaaaatgcaaaagcactgtacaaaaaaatgaaattaagtcaaccttattacatttcaaaagaaaaatgcctatatgtaaaacttttattgagaagacagatgaatagtgaaaaatggctggcttgccgtgtttacagagatattttatgaaattgtcaaaaaattgaatgatcatctgcaacctaaacaaatcatagataagtaataaaaaattgtatctcccattattgaaagcctactatgtgccatatgctgtggattcattatctttaattctcgaaacaatactgagaagtaggtttttaaaaaaacctttatattacaattgagaaaaataaggtaatcaaggaaaccaagaaccttatctaatgtcacagggtggaattagaatttctacctaattttgaatgtatctaaaggccatgcatgatttcttttgtcacatcatgtatacttttgttgaaaataatttttagaacttggtcttttcggccttcgataaacttaaacaccccttcatgctaaaactctcaataagctaggtattgatggaacatatctcaaaataataagagctatttatgacaaacccgtagccaatatcatactgaatgggcaaaacctggaaggattccctttgaaaactggcacaagacaaagatgccgtctctcaccactcctattcaacatagtattggaagttctggccaaggtaatcaggcaagagaaagaaataaagggtattcagataggaagagaggaagtcaaatt

SEQ ID NO: 45562 - DNA, 1041 bp, Homo sapiens
tcagaaaaagacatttatgcagccaataaacatatgaaaaaaagcttatcctcactggtcattagagaaatgcaaatcaaaaccacaatgagataccatcccatgccagttagaatggcgatcattaaaaagtcaggaaacaacagatgctggagaggatctggagaaataggaacacttatacactgttggtgggagtgtcaattagttcaaccattgtggaagacagtgtggcaattcttcaatgatctagaaccagaaataccatttgacccagccatcccattactgggcatatacccaaaggattataaatcattctactatacagacacatgcacatatatgcttattgctgcactattcacaatagcaaagacttggaaccaactcaaatgcccatcaatgatagactggataaagaaaatgtggcacatatacaccatggaatactacgcagccataaaaaagaatgagttcatgtcctttgcacggacatggatgaagctggaaaccgtcattctcatcaaactaacacaagaacagaaaatcaaacaccacatgttctcactcataagtgggagttgaacaatgagaacacatggacacagggaggggaacatcacatactggggcctgtcagggtatggggggctaggggagggatagcattaggagaaatacctaatgtagatggtttgatgggtgcagcaaagcaccatggcacatgtatgcctatgtaacaaacctgcacattctgtacatgtatcccagaacttaaagtataataaagaaaaaaaaaaacttggtcttttcaattttatgtcttgatatttgtggaaataatttatcctcatgtagcagaataatagtatctgacaattttataattctagatgtttgataattttagaactctaaactccaatattgccttatatttttaaaattggaattcttttgaaaagaaacatgttaaaggcactcttggagaaaatcatatctgattgttttgttgactaacaattcttctaataaaaa

SEQ ID NO: 45563 - DNA, 1037 bp, Homo sapiens
tctcccaaaattttaatttagttttgtttattctgtgtctccatctcgctactcttttttttctgctgtttttaatttactatagaagaaatcttgatatatacaaatttataaaatttgtcaaggatatgttcttcatgatcatttatcaaaatattaaattaagatttatttgagtactgtgtcctgaagggcttaaatctacacagagctttattaacttatacacatacaatgttatgaaattctgattcactgtaaaaagtatttctcttctccactacctacctactcccataaacaaataaacaaatctatctgtgactcacttttttttactgtaaatttatgctcattaaactggggacattgagactaggctgacaaagttgtaggaggtgagcaccatgaattcagaaacatgtttttttcaagaagatttgggtgtatagtatgagaaccgatttatgttcaacatagattatggtgtagaaacaaagtcaagtaacattttaaagtaaatatgaaactacaaagaaagttctcttacgttattgtgggcctttagaaccctggagctctttctctgatacaaaggaatatttggaaagaatgtgttaatggcatgggagcaaaacaatgttttttaaggcaagttaaaatattaaccactgttggcttgtttgttttttcacttatttaccctatcctggaatttaagatgccattaattgtaaaatacactgttttattaaacagctaattaaactctgctgtcatactctgacaatcatttgatcacaccaggctctcattgctttgaaacttccttcatctattccaagagatttggcagttccttctgccttaattggtattggttggtttgtgataggcagtattttgtgtatttcttagttacaaaacaaaaacagcttcattgtcttatgggtgtttttctttgttaggacccataaagcatttgcttattgttttgtaagaaaatatggaattgtggtcattcatccaacaataaa

SEQ ID NO: 45564 - DNA, 1051 bp, Homo sapiens
acactcctcagcaggcctgacatttatgcccccacagccatctcatcccccacagcctggttcactctggctggtgaaactgagcaaatacaaagctccctacacaaccagatgcacaaagctccccacatacccagacacagcacaagcacatggtgttcaccatgttaagaacagcaatagccacagaaaaagtaagcacctactatgtgctaggcactctgctaaacactttcccttcacaatgtcatttaatctgaccctgaggagtaaattgagagtggcagtgtaattccacttaaaaggtaggaaaaatgggctagcttgatggctcacgcctgtaatcccagcactttgggaggccgaggcaggtggatcgcttgagctcaggaattcaaggccagcctggacaacatggtgaaaccccatctctacaaaaaatttaaaaaactaaaaaatgaactgggcgtggtgacacacacctgtagtcccagctacttgggaggctaaggcaggaggatcgcttgagcccgggaggtcaaggctgcagtaagccatgatcacgtcactgcactccagcctgagtgagagagcaagactctgtctcaaaataataaaaaataaaaaaagataggaaacgaaagctcagaggggttaagtacttattcaaggtcacagaaagaaggtagcaaagacagaattcaaactcagctcagtctgattccagagctttctgttattgtacgtaagtcttctggaagcctggcccacatcagcctggaagaggtgtgaggagaagggacggttttagatcgtgctttgggatagtctgattgcttttctgataaggggcataggggtgcatgccttcctgcatgagtgtgtgtgcacgtgtgcgtatgagagtttagtcaaaacaggagagaattacaaatccgcctctgttatctacagctcccccaaaccacccctcctcaaaaagaggccattgtaaagcctctatcagtgtctccaagagaacattctccaggggcattgcgccctccgccct

SEQ ID NO: 45565 - DNA, 1075 bp, Homo sapiens
cccaaagtggatgcatcatttttatgttcccatcagcagagtatgagagagttctgattttgctgcatctctgtccacccttggtattgtcattagtcccattttacaggtgggggaactgaggcacagagaagggagggtcccatggctagggaggaggagcaagacacacacacatgcctggtcattggactacccagggccaggactagaggaaagcaaatgaggtacccagcgtgcaaaatttaaggtgacacccactctcaggttcctacaagtgcagggtggcacccgagagtgtgtccttaaattttgcttcctgggtacctgattcgcagcgtacctcaccccggtccaggccctgccaccacccagctcctagtgtatagggcactgtgctcactgttgtgggggtgaacacagagatggccataccgctgccccttccctggaggtactcagtgtggctggagaacccatgcatctgcagtccccacagttagcctggctggacttgcagagcctgaatcgctgctcacagggttgctgtgagaattacaggggatcatacctgtgaagcatttagcacagtgcctggcacctaggcatgccctagaagttctggctggtgtcatgttgtcattggcatatgtctgaccttacctcctgtgaggatacctctaagtccctataggttgagggacagctatgaaaggagaggccatcacccagggaccaggaagtggcctgggatgaaggaaactggacatccaggccctcttcagccccactgatcctgacctgggcatcataagtcccagccacagagcccagcactggctccagttgagcttaggggttcttctctgggctgtagacactccatgcctggctctgttatctccaaagccagagtgcattgccgtgctccccatacatgagaaaacacctgctggatgatacttggggcagccatagtgagccaagtaggggccctatcatggccttttttgtaaccagctttgtctgctggtcttcaagggttcagttcagggaagggagcactaactgatct

SEQ ID NO: 45566 - DNA, 1032 bp, Homo sapiens
actcttccagagttgacttttttttccatcttttttttttttctaacaagagggaaggaagaagtcttattggaaggaatacatgttgtgtcatctgtcaccaatctctcccctcctccatgccactgaggttctaaaataccaaatttgttcatgtttcactaaccgcctaaaaacctctcctggtcactgctttcctaggggtcagaaacccaaatgctttcaagagctttgcaggtagcataaaagagtgaaggggtcaagggtagaatagtaggaagcagtgggagtgggtcagactagagagcatatctccagtctaaagatatttagattttttaatggactctccagtccactacagactgccagttgtaatttctgacccataggatcaagtccaaattcctgaccctgacatggtggctctttgagagctgagctctacccaccaggcatgttttgctctaaagccttccacctcttccacataccccacacttcagtcatatcagactgacccctgaaccccaaatgcactgtcctctctcccctttcattctttctcttaagaaagactcctgtagttccttcttcccagaaagactatccccaagcttagcaaaacctacttttttctactctggagatatttgttctcttctctaacaggccagtgtaccatggaaataacctgttagaaatctaagctggtggattttgatctgtttgtacatctgcatccctgaaatactatgagccacttctccaccccaagggaaatcttcctgtttgtctccgtgttcccagcaccagcacagggctggcccacttcataggctcaaaattaatgtctgtggaatgactggatggttatatgaatgaggaagtggctctgtcactacagcctataggaagttctatgctcctgggttggcacaggtgcagaatgagttgctgctcgctgctgcccctggtggcaggtcattgccacagcctggaaggactgtcactggactattttgtaacagg

SEQ ID NO: 45567 - DNA, 1102 bp, Homo sapiens
tccatttatttatatatttatttattttttgagacagaggcttgctgtcacccaggctgcagtgcagtggcaccatctcggcttgctgcaacctccgcctcctgggttcaagtgattctcctgcctcagcctcccaagcagctgggaccacaggcgtgcaccactgtgcctggctaatttttgtatttttagtagaaatggggtttcaccttgttggttaggctggtttccaactcctggcctcaaatgatccacccacctcggcatcccaaagtgcccggattacagacgtaagccaccacgcccggccccatttattcagtcattcattcaacaaacattcattaagtgcttggtaaatgcctggtgtggtgctgaatgctggggaggcaaggataaggaaaacctggctcctatcttctgggagtctccagtctcctgggaggcacataggcaggtgcacaaggtggcccatgtagtgaaagaattgctaggccggaggtatgcaaaaagcagctaggacatagaataagcagtgcctgaaaagacacaagaaaggagcccagtgtctcccagtgaggtgttttacttgcattttcacacttgaacatcatcacaaccctgcaccatttcccagctgaggcaactgaggttctgggaggtcacctaactcccttggggttacctgcccatctgtagcccagccgggactcaaacccaggtctgtctcactcaaaagcctgttttctttccaacatacaatgccgtgtctggagctgaaactagaacacagggccatggattcccttgtgcacacagcggccactctgttgcctgaatacgtgcatagcataaaaccagccccagccatcccccagctgtagactcagtgtgtgttcctgcccctggaaggttacctctgaagtcccttcatctaaactctttcattctgtgacactaagaatcaggctgtcttagtttgggtcccccagatgcacaccccaaggcaaagcttcaagtgcaaatagtttatgtgagaagcaaaggaagcgctgggtgggggtgggggtggggcagcaagtgggacctggagagaaggaag

SEQ ID NO: 45568 - DNA, 1032 bp, Homo sapiens
tatcacatacggtcattacatcattcagtcctccaaggattctgggtggtagacattcttgtccccattttatagatgagaaagctgagatgaattggtgaagcctaaatgatttgcttagtcatactactgataaatttcacagagagagaagactggaaccccaatccagacccaaagttcgcactactaatctacactggctgaacagctgcactctgaatatagcctttgcaactcccagaggcaacagatcatgaaagcccacatgcataaagagccaaggcagcttcctggggtatctacttagactcaaaaaatattaagtaagccagttgctaggattggctctctactaaaaagattgtttttattctccgggaactggctggctgcatctgtttcactgttggattgctgaagggttgacacccactggccacatttaggagttcatgttgatattactgttgtgaaaaagcacatattggtcctcaccatctatatgactgtgattatttttctctcttccatttcacgcaacttttgctcacagcctacttggcataattgacacattggctcaggccaccaagactgccaacttggagccttggattagttagatcagttatgacagatgtgattatttacaagaaaatagaagtcactataattaaaccttccaaggagtacatttgggtggagaatgagaaagcacaagtttaatctggcatgatgtgtttggatttcagccctgagcaggttcttctctagctcatgaaaggaggtattggggtgtctggcaccctctgtagacactgccatctctcaattctcctgacacagctattgataaatggaaagaccaggtggtagagttagcattagttggggtacccagtagaagtgggtttagttctcagctcagccactggtccctggcatcggtttgtttttttaatcataaatggggataaaaacataatccctacctcatcctaggtctgggaaaattagcagtgataaagt

SEQ ID NO: 45569 - DNA, 1033 bp, Homo sapiens
tgctgtcttgggattgatacggagaatagtcaccagacgacggggctgagagagggatgcatttggggtggcagaatgactcctgattttatgcatttttataagctgaataagaatggaaggaaaactaaaggaagcttcaactccacgagatggttttatgggtgctttagagcctttaaaaataataagaataaaaatcagctgtctccgaatattaaaggtgtctctctggttccgaaaggtcagccaccctggcttccaaatcaaagccaacggccaggtgcccacacaggcccgtgccttgagcctcctgccaaaaggtttcttagtgtgtttttatgtctccctgacatggaagcagcagggatgtttccccagcccctaaaacctctgcacattgtgctcacccagcagagggtgatgattcaggaggagtcagaaataaagaaaggaaggagtgtgcagccctcgccatggaaagccacacagccgttcacatctgggtagcagtgaggggtgggcaatgttctcgcgaattctagattctggaggaggggtgcgctggttctgcagggaccaggagtccctctttgtgtccttggatctgctggcaactcctgggaaccagctgccaggcttcctgacttgctgcccagccctgcatggacgggaactagagttctgctgggcgctgggatgggatacaatggaggtgcctaggggcttgttgggggctgggccagctccgtgggcatctgtgcctcctctgtgagcaggctaagctatagtaagggcttatctcctttgttttaacagttggggctttggcttccatagcaatgatttgcaaatagggtaatttattggcttctctcctcctgccttgataaatctcatatcttacatcctttggagcctcatttgaaatcaaacacttaaaaaaaaaaaaaaaggagcactcatgcctttgttatcttttggacacttctcaaaagaagatccctggaccccataggatgcaggcaacaca

SEQ ID NO: 45570 - DNA, 1071 bp, Homo sapiens
tagcttgtgtacttgtgtacttataagttcacctgtgcattggctcactcgctgatctcagctccatgaggacagaggacagagcctgtcccatgcaccactgactctaagtgcctagaacaaacagggcctaggaaatgctcagtagtgatttgctgcatggagagatattgtccaatgaaccctcacccacagcccatagaactgaaattctaccgaacatgctcggggacgtgctgttctctgtcaaccctcgcaacaagttgtcagccattgtacagtgcctgttcccctcttccatcaaaatacaaagtgtcagaactggaatgtaccttagatatcatccagcccagtgcttatgtttttcggagaaagaaacagagggtccaagaggatcactggtaccaatatagggccggtcccctgggtcccccatctcttggtctgattgtcctcctgtattagttttctatggctgctgtaacaaatgaccaaaaactgatgatagaaaacaacagaaatttgttatttgacagttctggagtttgaaagtccaaagtggacctcactgagctaaaattagagtgttggcagggctgttccttctggaggctctggaggagaatcattttcttgccttttccagtttccagaggctgcccatgttctttgacttaacagcccccgtccatcttcaaagccagcagtggtcagttgagtctttctccagccgcatcattccaacattgactctcctgcctggctccttcattcataaagacccttgtgatcacattgagcctacctggttaagccaggataatctccccatctcaagatcctgaacctaatcgcatctgcagagtcctttctgccatgtgagggaacataactgcaagttctggagattggaatgtggacatcttttgagggtgatggcactattctgcctgctgcacctccagtcacaccatctgcctgttggtatatcctcttgcacatgcacattctcccctgatgacccccacaccttctgtgccccattgtcacagtacttgtcacattgcttta

SEQ ID NO: 45571 - DNA, 1053 bp, Homo sapiens
gcataggcagattgtgaagtggagccctgttggtgatgaagaagtgggtttgacactagggagagtctgaatgtgccacattgagggacggaagcatgttaagttttcaatattgtcagagctatttgaaccagagcaactccatcttgaatggaggctgggtaaaatgaggctgagacctacttgtaaggttcttgtatcagttcaaaccctgagcgtgtgccgacagacaacaggaggcggtgtggagcaacttgctgttttaatgagagcctgggtgcacacgggctgaggcctaaaatggcgtcagcaccaagtgaggacggggcaaaggatttatagtgtcctgtaaacaggaagtgtcctagtctgatgtaactgctacgttgtacccagatggcctgtttcttgatcttcaggggtacgtgtcttccagctggccttcttcctgcttctgctattttgctggcgcacactgctggcacaagtagccttgcaccttgggactgggcctgagaagggaggagttattcatccccttaagctttcaggccccggggagaatcttacattcctgtctatttggttatagaaaagggaaaagggacaactttcttaataactacttcaggcgggacatagggggtggtgtgggcacgttggaaaaagaaaaccttaatttttaggtattcttgagagatgggttggtattcaccatgtcgttgtagcaggagcatcgcctgcattgtctggaaatatgtctgtgcctgcaagacagttatgttgagaggacaaggaggtgtcgacagggagaagcatggcctcatctgctgctttatgaatgaaacaccgtgtctggattaaggaggggaggtaattactgcgtggctcagagtctggtaaggatggaggccctaagacaaaagtttggccatacatgattttaaagggactataaaaagagggtgcttttggtgttgcacagtttcatgagggcaaaagggagatgttttgtccacaactggcgggtttctagagccagcttggtgagtt

SEQ ID NO: 45572 - DNA, 1047 bp, Homo sapiens
ctgggaagatggcagctgagaagacaacgaggaggcttgcaggggttaaagaagatggttgagaggaagaggtaagggctgggaggggtggacagcagtctgctggatttaatgaggaaaaagaggtagggtcgggaagagaaaggcgatcagggtggcaagaatggagaaggatttgaacaggtaagaaagaattgcagaggttgggttgtgatttgagaataaaaaggcctggacataaggaacttctcatttcttcagttgtcagcaataattgcttaagtcagttaaaattgtaaagttgaatgtttcatttgcgggccatttggacccattatttaattcgtattgtggccagactgaattgcgaaaaagacacagcacttagggcagatatcttgcctgaggcctaaggtttttagggtttttttttatgaggcagcctagagggctgtcctttggagtggaagactgggaatttcccacaacagagggtaggctgagagaacaaggaagaggagaacatcctggacagcaagagggggacaataaaaggagcaattgtcactgctgccattttcgttcccagaacaggatctaatggcttagaggcacccccctaaggccagatgatcagcaagtgcctgacacacaccggaaccttcttggaccaacgttggatttttggaccagagaaatcaagagaggccatgtggattttcccctgttaacagggctcccgggaaaacttaccagtaggcgagatcagtgaccgatgtgcatgcacagagaggcaactggaggctgaggagcttcctttgtccggctgctgtggcttgctctccggggtggaggggtaggtccacaggggatgcagacctgagcccctccccggttttggcacctgacttaaggttcttgtatcggttcgaacccggagagcgcgcgttcgaaccaacagacaacacgaggcggtgtggagcaacatgctgttttaatgagttcctgggtgcaggcgggctgaggcctaaaatggcatcagcacca

SEQ ID NO: 45573 - DNA, 1124 bp, Homo sapiens
aggtgcctgccaccatgccagctatttttttttttttttgtatttttagtagagacagggtttcaccatgttggccaggcgggtctcgaacccctggacctcaagtgatccgcccacctcagcctcccaaggtgctggggttacaggcatgagctactgcacccagcccctagacaaaacaatttctaagtctaccttcctgcatcctactttgtggtcttatatcagcaatcttgttttatatcagagggacaaggagtagtcaaacctcattaatctggaccactttaggagcaacccaagtgagtgaaaagtcttcagcccagggtgtttcctgcaggcagttgagccttcttaccattcagtccacagactcagctcagcccagctcaccaactggtgctaacggaggagccacaggacctgtgcttagcaggtctgaccacatggctgaatgcacctgacctgtacttttaagccatttactctctttgcatgcttaggaataaataccactgaaactctaacagaagcagtgtgttttttgaatagaaaatcattcaatgggcagctttgcttctatttcaaattgccagggaatttgaattagagaaactttgtactagctgggaataagctgtttttccagagttatatgcagaaaatgagacaaaatagttcagaactaggtttcccctgagtttcctgatctgtaaaatggggaaataatacatctcacagggttatttgggagagtaaatgagataaaatgtggaagagacgtagcgtgcaaactcgctcacaaaagatggtcaagaaatgctatttcttttcccccgtaccacctcccatctatcttcacactgaaagcatagcttttttcttgcaatatgttcaagaaatgatgttacagatagattttttaaaatagcatcatacttttcaaatgactcctgttagtttttcagaggctcttcctttttattgctgatgatccttcagtgggaaatgtccacttaattcttcagcctgagttcctctgctctggtcttctgggtggaatagctccaagggtcctgacatgcatgtggacgaatgtctttgtgacacgattgagcctttta

SEQ ID NO: 45574 - DNA, 1024 bp, Homo sapiens
tgttggctcctccgtgcctttcagagcatccgcctggctcttttatgagattacagacgctttcatctcagctttggcccggatttcctccttcccagcaaggctccaaagactggcaacgaggcgagaacaagaagaggaggctcattcctggctgcatccctgctgggcagggtgacccggcctgcacatcttccagccgcatccttttgagccatcgaggctgagaagggagcacagaggaccaggttaagaggggcccttccccttggcgcctggaggaagttgcattgcatcctgggaacgctctgatcatcccctttgctttgtgcctttcacttcaatccagtggagaggggcttcggtgcctttctttttctttttctttttctttttttctacctagaggtacttttttgaggctcgagactgagaacgtaacacatctcttgcacttttgctttatgtgtatgtgtacacacacaccctcagttctttgctgtacttgctcaccgtcttgctcttcaggtttccttttctttaaaagcccaagtagtttccttcccatattgttctcagtgaaagaaaaaggagcgtctcttctctcctaaatcctaattccttccttccatccatcctatcgtttaaccttttcttccagagccaggactttgtgtctgctcctaacatccacatcccttccagatctgtctccacactccccaccccttctggcttcgtctcctgccactgtctcctgacctccatccaccccaaatccacacccttccctgacccagccttccttttcatgcctctgttcttttgctcatgcatttctcctgattttcaagacccacattcacaactgtgcctggctcaactcttatctctgtgaaaccctccagcacctctgtccccagtcccccccaccaggcagccagtgacgtcctccctgtcatccagcgcattcatcccacgcagtgttataattatgacctgcgtttctcagggctcccagcct

SEQ ID NO: 45575 - DNA, 1050 bp, Homo sapiens
ttcttcactctaaaaaggcaccgagaaaccatttcctgcccctgccagagttgggagtcctggccctgtccccatgagaccacacagcatctacattatgatctgccagaacccctgacccaccacaatgtcctccatccccaccacacccaagcccacagtggattctgcaaccatgagaatccctctccccaaaccctcatctctccccaccccatgttactttctaccatggagccctagcagtgctgcctcacacagtgatttttattgagacaaccctgtccaattatacttgtcccatcctcttgaaatcagacatagatctttgaaacctaggccaaaggatgacctgatgaagatcaggcataaggccgcagtcagaactgcatttctgtctgatgactaacatggtcttcttaagtcagggtatgtgccttcctaaggatgagttacttcccccaaaaccccttgggccttggaatttaaaaaatcactatcaagcctgtgttgccaaaattccaaatgtgccgtgacatgtctggatcctaaaacaaacagaatataggctacagaggcacacacaccaccactgtgcattcctcacccacagcagacatcaccagtcaatcacagcataggttctcctagtaaggccatcaggattcttctcaacacactgcagacctcacctctactctgaaggctttctggatcctcttgatagaaatgattccactcttttcttacctttcatagccctcaagactctgctactcttgtctgggctcatctagattgtagtaataagactaatggctaatctttactgagctctcactttgacccaggcaccattctaagtgcctcttattaaacttatttaatcctcacagtcatgtgaactaagtaccaatcccatgtgacagatgaaaaaactgagacacaggaattacactgttccaagtcagagactgtgtcccgaccgcctttgtcattccaatcgttcaacatttttattaggcacccatgtgtgccaggcactgcaat

SEQ ID NO: 45576 - DNA, 1050 bp, Homo sapiens
atggatattgaatagtcacaaagtacccccccacaaaatacttattaattatagaagaaaaaaaattatacaatgaagaagcctagcaaacactgccttaatcaaatgactaaagttaatataactagtagtggaatgaatcaaaatttgtgtgccacctgataggatgcagtgaaaagaacacggcatcatttctgtgatattcctcccaagatatataacctgaatctaatcagtgggatcatcacacaaagctaaattaaggacatctaataacaaaactgtgctgatatctctacaagggacaagatcatgcaagttgggtaaagactaaagaactcctaatctgagggggatgaaagggacatgacaaaggcatgaatctggactgatccttttgctataaagaacttattaggaaaattggcaaaatttgattggagttttaggattagatggtggtaatgtataaatgtaatttattggtgctgatggttatattgtgattatgtaggagagttttcttattatgggaaacttgatcttggtaacttaaatagttaaagaaaagatgtgacatataatttacttctctgtgattcattaggtaaaaatctgtaaatcattgtttctgccctttaccaaaaaagtaatgggcccaacttttctaccctttattcttgcttaacttacctcaccaattcctaatcttaaatcagtaccactgtctatttgctaatacttctgaaaaaaataaaaataattgttgattgatttcatgactaatgaacttcaacatcgaggactctttgcacttcatttgcttgtctacggttacttaacgtttcctattctccaccaagtgttgcaaacctttaccaatttccttgtctccttgcattggactctactgttattctgactgccaggcctcctgattcatgggaaaatagataccttcaagctttcctttctccttccccattgcagcctcaagtatattgtaagttcagcccccattaccttattcataaagttcagccctcatta

SEQ ID NO: 45577 - DNA, 1050 bp, Homo sapiens
ttggagtgcagtggtgtgactatagttcactgcagccacaaactcctggacctaggcaatcctcttgcctcagtctcctgagtagtaggcgtgtgccaccacacctggctaatttttaaaaattttttgtagagatgaggtctcgctctgttgtccaggctggtctcaaactcctgggcttaagcagtcctcctgcctcaaccccccaaaatgttgggattacatgcatgagtcactgtgcccagcctagaaatggttcttaaacatgaaaagatgcttaatctttctcatagaaagagtaatgccaattggaactacgttgaagtaccatttctcacctagattaaaggttttttaaaaatcattgataatatgcggccaagagtatgaaaaacaggcatccctttacgcgagtcataggaacgtaaatagacactttttgtgggggctaatttggcactgactttcgaaattgcaaatgcacgtattcttgactcagcaattccactttaggaatttccaagtctgtattctcatgtgaagaatgatacacactgtgtggcacatacagtggcattaagcacagcattgcttataaaagactgaaagcaaatgccctacgatagagatcatgttaaagaaatgaaggtggctgggcacagtggctcacgcctctaatcccagcactttgggaagctgaggcgggaagatcgcttgagcccaggagtttgagaccagcctgggtaatatagtgagaccctgtctctacccgcaagaaagattagccaggcatagtggcatacatacacctgtaggcccagctactcaggagactgaggcaggaggaccacttgagcctaggagtttaaggctgcagtgagccatgattatgccactgcattccagtctgggtgacagagcaaggccctgtttcgggaaaacaaaagaaaaaaaagaaatgaaggtgtatcggtacgaagctatcatatccatctgtaaaatgtaaggaagttctgcatatactgatataaactatttccaagataccat

SEQ ID NO: 45578 - DNA, 1100 bp, Homo sapiens
acaagatgaattagttgggttcttgtgtgtgtgtgtatgtgttacttatttagtggttactgtccaattaaactttatttttacttcatgatcctgtgatacattaatttggatcttccagcaaaacaagataatgtggaaactttttagatatttttaaagaagcaagctaatttattttcaaaggctaatttataatttattttggattttgaagaaaaaaaaaatccaagcagagtttgttccattgttgaagcattctttttctattgtaagaaaagccttcattttttaattttatgtcagaatttcttatgattgtgaaactcttacattttttaaataaattgtctttgttgtaaaacttgagtaaagaaaagctttaatgaatttgcaaaaaaatatatattcttaaagatagatacactttttttaaattcttgttttaattctacctcataattgctttgtcaggtaaatctcgatttaaacaccaagttttcttacagtttttttttcaccatcggaataacctggatataaatgttgtgattagacaagtttatcatctcatggagaccacgcctactgacattcatccagacagcatgcttaatgtttttgttgcactgacaaaagggcagtatccagtatttaatcaatatccaaagtttattgtggactatcaaacacaggaacgagaaagaataaggaatgatgaattggattacttaagagagaggtaattatggaatagtttttctttttctgatacaatgaaatatgttataaacataagaaagttttaatgaaaaatacatttggctgagcgcggtggctcacgcctatagtcccagcactttgggaggccaaggcaggtagatcacaaggtcaggagttcgagaccagcctggccaacatggtgaaaccccgtctctactaaagatacaaaaaattagccaggcatggtggcacgcccctgtagtcccagctactcaggaagctgaggcaggagaatcacttgaacccaggaggaggaggttgcagtgagcggagatcatgccattgcactccagcctgggcgacagagtgagacttca

SEQ ID NO: 45579 - DNA, 1034 bp, Homo sapiens
aatgaaacagtttcagctgttttaagtctgtaagagtacccactccctagtatagtcaattgtactgcatcagtcttaatatttgccaagcagatagatgacaaatcgtctattttaatttgcctttttttattgttagtgaggttaagtatcttttctgttacttatcttccatgtgtagaattacacattacatatttgtatcatttgtccatctttttgtcaagttagacttaactttctgtcaggttagcttacttatttccaaaaggcaagtcaattgtcccaacaccatttgttgactattatccaagtcatttgccaactgatggtttttacatattaaattctcttacatatttgatctccttcctcgctttttctattcctaagccagtaccacactgtttgaatgacagtagctttgaagtgttttaccaactaggcctagttctcactcattagtcttccttttcagagttttcctcagtattctcaaatgtttatcattccaagtagactctaagaattgtttcacttttggaattctcacctctcccaatcctattggaatttttattaggattacactgactttatgcactaatttagagtttcaagcctagttttgataaaatactaagtattttttaagtcttttttttttttttttttttttttttttgagacagggtctcattctgtcacctgggctggagtacagtggtgcgatcccggctcactgcaacctccacctcccggattcaagcaattctcatgcctcagcctcctgagcagatgggattacaggtgcctgccacaacacccatctaatttttgtatttttagtagagacagggtttcaccatgttggtcaggctgatcttcaactcctgacttcaagtggtctgcccaccttggcctcccaaagtgctgggattacaggcacctggcctaagtctttcaaagtatttttaattcaatagtattagaaatctatcatctctttatagcatgatacttcttgttttgtt

SEQ ID NO: 45580 - DNA, 1430 bp, Homo sapiens
taccttgaaaatgactcattttccagttctgtaagctaggggcaggtgatttagatttttaaaaaatgtattttaagctaattcatttttatgtggatgagaggacatttaaaaaaatgtggtatgggtcatgatagacttttaaaaaatatataaaaaattgtggatggggccattatttcaggatttttctgtagtttaccactatcttgtattctttatccaaaataattaatagcccttttattttgagggaaatcttatgataagtttctgtatcatccaagaagggtcaatttaaaaaattttttgatgcggcacaggggtgtacttggggatgtatatgctgggattggagtctgtaggagcaaagatttcagaaaatctttgtgtttttagcataatctgtgatgggtgctttatagctagtgtcttattcttacatcgccatttgatctgatgtagttccttttatatgcagcccaacttcatttgtcagacctggtcagtatttctgcagggctagagttgactcggggtaaaattactttttttttcttctttttaaaaagtcaccttctctagtggcaacagtgttttaaaatttgaatggtgggagatgtggggtaggagtaggaggggagcccagggagcccaagaatctcagaatgaagcaatttatattacatacttggccagtgaagaataaagccaacttttaatgtgggttttagaaatttgtgttcactcgtgtattgattgataggttcaggaccagttattacttaatgctgagagccaaagcttacaaatttcataggtagtgtattaagagacttattttgaaacagaagagcaaaacctcaagctagattttagcaaaattgtgtgcttgtttgagtatgcatgtgtgtgtatttgtgttccctgagaaagagacttttatttagcagtagagacagagaaaacctttaaaagtgtgctattttgaatcctctaaatattgtcagtacaacgaccctggcattgatgctacgaagaggatggtagagtagtttctctacaatgagatctactcttaaccccttataatgttaagacagatgaaagtaagataagcacatacattctggttctaccgtgggttctggcttagcctgtgataaactaagctaaatgcaggaagaaagctcacccttgaacaacatgggtttaggggtgctgcacccctgtgcagttgaaaatccatgtataacttttgacttccccagaagttaactactaatagcctataactgttgacttccccggaagttaactactaatagcctataactgttgactggaagcctcggccataacacagttgatgaacacatattttgtatgttatatatattgttaatatatgctgtactacaataagctag

SEQ ID NO: 45581 - DNA, 1039 bp, Homo sapiens
gttgtatttatgcgtagctgaagcaatggaaatgagtatgtgggcttctttttggtctgcatttaattttctccagggtacgtactaaatccattgagtggaaggcttagaaattttacttcagtctaaagtacctcttaatggaactctcaaactgtatcataataagctagtgaactttcctgttactgacaatattcatgtagagtttgactaaatttctggctagagagattctgaattggcagatggatctaattccaattcaatcacaaggaacaaatattactaactagcaaatgttggtacttacagtaagtttgttctctacattctgttggtatgttgcatattttggcaccttaattgatggctatgtgcacagttttttgtttgaattatagagtgataaatatgtagttcattgagctaatgacatgtaatcactggtttcaacataaataaatttcaggagacttgtgaattagttaatttggacagaacttaattaaaaatattttgcttttcttagatatgcactttgcctgagaaatgcgctgttgataagatcatcgattcaggccctcaactctctggatcactagattacaatgtagtacatagtaagtggttagtagaaatggtcttttgtcaacataaaaacttgttttaaaccatcaataattactagcaattacttatcaagtaggtacaaatagtactagtttctaaggcatgttattgtttgaaatgtgaccttagtcttttgttttccagtgtggctataattagtcacatacactagaaatttatgcaactgaatgataagaaaaattttgtacttcagagtatatgcaggaaaccgagatttaaaaactttaattctttttctcttctattttactttttctttcgtcacatagcattcatttgtaagaatctttacagaaagccaggaattagtttttttaaaaaaatcactgttgtgtagtgttccatctaaaacaaggtacttttgtttcttcaggtttgtataaca

SEQ ID NO: 45582 - DNA, 1034 bp, Homo sapiens
aagataattggttttgagtttgacacagtgttaatatatgaaaagcagcagacctttgtggggatgctgaattattgaatactcaatattctttcactgaagcacgaggaaatattttggaacatcatttggacaaatgtcagttgttcaaatgaagaaaataggattggggtacagaatggtttgggacttttgggtgctctactgtcatatctgtgtttattaggctttattaggttagctttatagggtgatggtttcaaaactcaagtctctttatacaagtgtttccaaaattgacttaatagtttttccctttcaactttttctgtcaaaaggtaccattgtcttaattatctaggtctaaaatcttacctttgtctcattctttcctttttccactatgttcagttagtttccaagttctgtgaattaggctttagataagtctctcatgtccatttcttcccctttctcttcattttaaattctctgtgactgctcttcttgtctgggtcttgaactttaaaccttaaacatgtgctgttgcaaccattccctgcttagcctttctggcctctcctttctatctccagtctgtcctacatattgacaatagctaattttccttagatatcacttactttttttttttttaatttgaaaatccattttcaaatcaccttctcatgcttactagttgtttctgctctggcataatattggcatatatgtggtttgggttgccgtggtgccagttcttatccattgactctgggagatctttcattatctcccattgattgacagtattccatgagcctcttagtttgaaattctgaggaaatgtgattgattacttgccatccagtagattgggttggctcccattgagataggtacttactcctatctcatttgtctttggccaaatagttgactgccaaatattgcaggagcattttctagagaagagggctatgacttaagcagtcatttcaaagcgtatctactacagctctccttttttatgt

SEQ ID NO: 45583 - DNA, 1053 bp, Homo sapiens
tttaaaaccacttatttaagccaaggattatgcattttctttctgtcatcattactattgtctgaagtcttttccatgttaggactgatttattggcagcttctgctaactgctagaatcctaatattgtgtatgccctttaattataaggagaacctgatttggcttctggctcagatgtaaatgggagtacagagtcatttgaaatggtcattgaggaagcaactatagattcagcaacaaagcaaacctctggtatggtgctaaaactttttccaattttattagactaatttctgaggtttaacttttatgttaaggcatttgcatgccatttgtctattcttattattcatacgacttttaaataagagttttctaggaagcctttttacatacttagaaaaataattcaagtattataaaattatgacttgaaaataatcttattcctgtggtaaatgttttgattcattctctcatcttacagatatcttgcaatactcttttttgggcaaatgactactttgaacattggatgaaagctatgtaccttctcagacacatgtttataccctaaaaatgcctatcctgtttagagattaactgacccccttcaatttcttcctcccctgccaagcccactggtggatatcagtggggcaggaggaatctatgaacttcaggttaagaaacccttgtcagttatatataatatatacataagtagatatatatgataaaaaaataagtttatgtatcctttcttaggtgccacaacagaagcagattgggttcctctcgagctgtgctttggaattccactgttcagttccgaattaaaccggaaagtttgtaggaaaattgctgcacatggcctttgcagaaaagagaggtgagggtttatattcgctgtcatattttcatatcaatttttaagctgtcagcaaatagttaccatatcttacttttattccacacatgagcacagtaattgttctgtatatatttgttgattgaatagagatcgctagtttaagggttttgctgtat

SEQ ID NO: 45584 - DNA, 1044 bp, Homo sapiens
gcaagatatgaaataaacattaattttattgtacaaatgaagacattgagattcaagaagttaatggacttgcacatttcactcgccaggtcttcggagaccaaagcttgatctctttgttctgtgccagtgctttattcaacagaaatgtgttaagtgtcttttatgggctgtgtgccatgctaggtgttagtttttggttatagcgcacttcccaataactaaagcgattctccactgctgggatgggctgtctgttgtggcagcgaaggccagtgctctggacttcttgtttttcccccatccccaaggaaagaaagaatattctagacttgatttataggtaaacttttaaaatagaatatttctgttcagaatatctaattcaacgttatgaaatcaatattttggagttttacttcattcattcagttggtaaatgcttgaccctgacctatgccagattctttgctgagtgctgtggaaacagtgatgtgtaagatactaatggaacttagagaatgttgtgggagacaataatcagataaatattaagatatataagttctaaaagattttaaaaagtactttgaagaagccaactatgatgaaatctgcaggtagacctaatttcaataggtgcaggataatataagctgaagccaaaaagttggaaaagaatattccggcagagcttaggtctgtacttcctgtgtctgggaaatgtccagtgaacaaagaaacaaatgaagcccagtgtggcagaaacttcatgaaagaggggtagaagcaagaggtaaggttgaagaagagggccggagcacggtgtgcagggccttctggcatatgttagagaactagtattttacgttgagtgcaaagagaaatgattaaagacttttaaacaggggagagaggttatttctgaaggactattttataaaaataggcaaaaatggaaattttataaggatgcaataaatggaaaaatttcaaaattctgtcaatactggcctgtctgttgtggcagtgaaggccttggcc

SEQ ID NO: 45585 - DNA, 1033 bp, Homo sapiens
ggggggtgggggtgcaaactaaaaagcggaaaagcacacagcctctgacacagtgacatggctcatccaacggtctggtgggtggctcgggaagggagggaggaggatggacaggcacgcaacacctggtctgggagaaagccttcacacctccaaattccccataccccttcctctcccttgagacaaccatgtggtcattgtccagcagccaggcactcattctagaaaatgccctcagccttgtcccaccctctgtccccaagaggagccccactcttggtgtcgattctgagcttccaggttgccgcggctgtgagggctgtctgagcagcaggcagggggaccagggagagtggggccgctgtggctgccacccgggcggtcaccttctctgtggacacccaggcacccatggtggagcccgagctgacagaggtgggggagctgcactcgctcactgactggcaggtttccgaggcttcggaggaggccgagctggacgagttctgcagcaggggaggggccacacgaggggaccaacagaaaccgagccacacaccaccaaaatataataaataaaaaaaggaatggggatgggagtggggaagggcacacacagagagaaagagacagacatatacacagaagaggggaggatgagagaagcagagggttagggttacttttcccccaaagttgcatccatgcagaggctttcgagcccttgaaaagaagcgtgcgacccggccagccctaggtcactagactgtgggtccccaaggacacggatttgtgtgtcttttgctgggacccagaagcatgcctggcaccgaaatatctggtcatggcattgggacttcgtgctctcttgggtgtttcttcacgtgccacaggcccaggtccccagggaggccccgcctgtcacctctcttatgtgcataggtgttatttattgcatgagggcggaccccagctcgggcttttgctacatgtctgcctggaatggctcgacttcctggagtctcctttc

SEQ ID NO: 45586 - DNA, 1043 bp, Homo sapiens
agtccgaggccatcttttgttggagaaggcgtcggcgttggcgttttcccgaggttgggctgtacagtgtctccgtccgcggaaaaagaagcctctgaacccgcgccggcccgcagcccccgtgccttccggccgctgctcgccgtcgccagaggctaggccacgtttcccccagtgccgaggtgtttctgtgaccctccctccactcccattcccttctgaaagggcacctgctcttggtgagaaaagaaattatagcacgaagagccagtatcagaagagtatccatcacccgcagcaaccgctcagggaacaccatcaaaaaagaaaaaaagggaatatctggatttcctgggcgaggaggagcgagtctgctcgggagctgttccagcaggcgatttttaaatactgctttctacgccctatacaacttggcttcacatacttttacactaactttatatgatttttaaaaactggtctgatcggacttctcgtcctgggacactgtttactggagtctggccggctctccgtgctcctcttggtacctcattttggggagaaccttaaacccactcgagcagataatctccgccttgaccggtgccaccaaagaagccttggaaccatgtggacttttctgggcattgccactttcacctatttttataagaagttcggggacttcatcactttggccaacagggaggtcctgttgtgcgtgctggtgttcctctcgctgggcctggtgctctcctaccgctgtcgccaccgaaacgggggtctcctcgggcgccagcagagcggctcccagttcgccctcttctcggatattctctcaggcctgcctttcattggcttcttctgggccaaatccccccctgaatcagaaaataaggagcagctcgaggccaggagggtaggttgatttcaaagcgggcagatgaatgtcttatttaggagtaggattgggttcactcaaatataagttttatttgaattgcaaaaggcggcaggttagatgcttgtatacattctca

SEQ ID NO: 45587 - DNA, 1016 bp, Homo sapiens
actggtcatgcgttatctgaagcccacgtaacagtttcttcaatagtattatcttcaactactctctataatgctatctgataatatatctaaatctcttcacgcacattttttaagaatggctttttttactgtgtgtttctgactactaaactgagtagtcttcatttctgttataggaactccatgctccactgactgttgttgcagatgggcttttctccaagttcaggaaaagcctggtctccaataaagtttctgtatcatctcattttgttggctttcttatgaaggtactgtaggagtgtgttattgtaatttcaataaaagaaacttgaaatttgaaaattattaaaacattttctttttatttgttttagaatgcaccacagtttaaagcaaatcatgctgaacttattttagctaacccgagtccagttctcatctaccagatttcatccagtgaaactcgagtacttgttgacattagaggagaaatgccaaggaatttaagagaatacatggttgaaaaaatttacccacaaatacctggtaagaaatagcatcttcagttcttacaaaggctgtgtctaaaataggccagagataaggatggcaggtgaaacattcatccagtcaaccagatattctggaactgaactatttaaactagcacttaaaaacagcaaaacaaactcccaaattaataaaaaaaagtttcgggccgggcacagtaggtcatgcctgtaatcccaccactttgggaggctgaggtgggcagatcacctgaggttgggagttcaagaccagcctgaccaacatggagaaaccccgtctctactaaaaatacaaaattagccgagtgtggtggtgcatgcctgtaatcccagctactcaggaggctgaggcagaagaatcgcttgaacgggaggcagaggttgtagtgagccgagatcgtgccattgcactccagcctgggcaacaagagcgaaactccgtctcaaaaaaaaaaaaaa

SEQ ID NO: 45588 - DNA, 1010 bp, Homo sapiens
cggagtttcttcatgttggtcaggctggtctcaaactcccaacctcaggtaatccgcctgccttggccttccaaaatcttggaattacaggcatgagcctccatgcccagcttgttgtcctcttttaaatagtgttggagtttgtttggtgtgcagctaagtgattgtggattaggctgatcctttctaggcttatcgttaagctttgttaggtcaagtctaatatagcctttatgttagggctaatttagccttgttacaaagcatggcccttctggagtctctcttgattgccccgagggttcagtgcgatagctctactctggctggatggaatttgagtgtctcccggtcctaggtcctacgtgactgaacctgggagttgttcactttatagctgtcagtatttgttgctcagcatcttaggactcagcatcagactcaaggggaccccagtgcagattcctagagctctttatctgcatagctccctcactctcttgcaaaccctgctggctgcctcagcctccctgaactgaagtctctgtctcctcaatccttcaagactgctgtgctaggccgagcatggtggctcctacctgtaatcccaacactttgggaggccgaagcaggaggatctcctgaggtcaggagttccaggccaacctgacgaaaccctgtctctactaaaaaacaaaaattaggcatggtggaggatgccagtagtcccagctactggggaggctgaggcaggagaattgcctgaacatgggagaagggggttgcagtgagccgagattgtgccactgtactccagcctggggaagagagtgagactctgtctcaaaaactcccttggattcctcctcccttgcgcagggaggaggccattgcaagacttttcccagttttcccttattgcagtaattacagtcctgtcccgcctttgtcctactgtcccacagctattgtttcatatattttgtttagtttttcagtcattcatggca

SEQ ID NO: 45589 - DNA, 2018 bp, Homo sapiens
gaaagacttcaggtggccaaagaggagattatgtcagtagctcaagtgaaaaagaaaataactttgactaaggtattgtaactaaggtaaaaaggatttgatttgtgtgctatgtatcttataccctcattgtaatacaggcataatagtgtaatagatgattgcttgggttcttatcccagtgccctctcttatctttgtgaccttgggcaaattctctaccctccaatttgcctcaggtttcctatttataaaaggcattattgtggggattagcgagataatattttacaaattacttagaatagtagtaagtgctcagtaattgttagctgttactagtaatttggtgtgcatttgagtttgagttgaccggtgggtgtgttggacaacagagaatggattgggagagattaaagtgcagaagagcaagtggggaatttcatggattatcccagaacagaaatactgttttccttagttttatgagattgttgactttttgggttgcctgatttcatctcaaatcagagtgaactttgataaaccaaatgataatgatcacataggtatcattttatcactttgccctgacattttcctgttgttgtattattaagttattggtaaaggagattcttgctcccaagaactagggtggtgatgtgttttattttgtttcttattggttgcagattcctaattcctataccaggtgtttgtccctgttcaactttctagcttatttgaaatgatcacctttgcctgtgttacgttagaatatatggtgtctaggcaattagactcaccactaccatgtttattcatttttctctaaatttgtcgatattctagtattaccttcttctttgacctaactgggaaatgaaatttgttacattaggagattttttttgagattaccgaagcttatttttttcaggtttttgagtttattatgtacttttctgccatcttacacagaatatactgacctaattaactggaattatttttaaatcatctttaagtagttttagtaagcgctttaggtttagttaagtaaatttgaggaatctcccttctctaaaatgttaatgtacctcaaagatgtaaactacatctttgtagttttcaaagatgtgtcatctcttctcatgcctctctgccagggcaagtctgtgaatgggcttcagaggtttggttaatgctctgcaattctacaaaaatgtatgtgcatgaggattaaaagttttaccagattcttgctaaatatttgatagcaacatttagaagtaaaggattaaagttttctctatatattgcttttctttctgtgatttcggagctatagggcagaaagattacagttactatggtcaggcagttaattgggtatttgttgagctatgctaaagtatggtgatgatgatgaatttgttacatacttaactggtgctctttttacatgtgctatttcatttgatcctaacagtaatcctgtgcagtagggactgttgctgtccccactttacacatgagaaaaattgaggcttagtgaagttacatgcattttttaaggtcacaaagttagtaaatgtttgagtagggatttgattataagcagtctgacttcatagtttctgcccttcaccattacacttcataaaaaatgtattgtgccagcgtcatggcctgtgcagtcaaatgacatttagcgacgttttgcttagataattttggttgttgttgttttttttttttttttttttttttgaggataatgttatctgatttttttttttaaatacccaaatgaggttgcatgctttttctgaaacatcctctcatggaggtcatgtatggtcatggggggaaggagctgggacctttcagggcctttgtactgaccctagactgtctactttcagttcttgtaatggcaggaaaagaaacccctgtttggctaagcaacagctctcatgtttgctcttctttgcagctggttacagtcctga

SEQ ID NO: 45590 - DNA, 1045 bp, Homo sapiens
ttgcgtctgtatgattcctctctcttttcttctttattagtcttgctagtggtctgtcaattttgttgatcttttcaaaaaacctggattcattgattttttgaagggtttttttgtgtatctccttcagttctgctctgatctgagttatttcttgccttctgctaactttagaatttgtttgctcttgcttctctagttcttctaattgtgatgttagggtgtcgattttagatctttcctgctttctcttatgggcatctagtgctataaattttcctctgcacactactttaaatgcatcccagagattctggtacgttgtatctttgttctcattggtttcaaagaacatctttatttctgccttcatttcgttatttacccagtagtcattcaggagcaagttgttcagtttccatgtagttgtgcggttttaaatgagtttcttaatcctgagttctaatttgattgcactgtggtctgagagtttgttgtgatttctcttcttttacattttctgaggagtgctttgcttccaattatgtggtcagttttagaataagtgtgatgtggtgctgagaagaatgtatattctgttgatttggggtggagagttttgtagatgtctattaggtctgcttggtgcagagctgagttcaagtcctggatatccttgttaaccttctgtcttgtttatcagtctaatattgacagtggggtgttaaagtctcccgttattattgtgtgggagtctaagtctctttgtagatctctaaggacttgctttatgaatctgggtgcgcctgtgttgggtgcatatatatttagaatggttagctcttcttgttgaattgatccctttaccattatgtaatggccttctttgtctcttgatctttgttggtttaaagtctgttttatccgagactaggattgcaacccctgcttttcttgctttccatttgcttgatagatcttcctccatccctttattttgagcctatgtgtgtctctgcacatgagatgggtctcctgaatacag

SEQ ID NO: 45591 - DNA, 1151 bp, Homo sapiens
tacctcatgtaagtggcattgtacaatatttgtgcgtttatcacttgaacccaggagttcaacaccagcttgggcaacataacgagaccctgtctctacaagaattgtgtgttggcacacacctattgtcctagttacttgggatcacttgagcctaggaggtcttggctgcagtgagccatgattgtgccactgcactccagcctgggcagtagagcaagactatatctgtctcttaaaacaaacaaacaaaaaattgtccttttgtgtctggcatatttcacttcccacagtggctttaatgttcacctatgttgtagcatgtattactatttcattctcttttaaggctgaatattccattgtatgtaccacattttgttgatccacttatctgtcaatggacatttgcgttttcaccttttggatataatgctgctgtgagcatcagtgtacatgtatctgtttgagtttctgctttcagttcttttttgtgtatatatcagaagtggaatagctgaatcaaatgatctgtgggtccgggcgcgatggctcatgcctgtaatcccagcactttggaaggccgaggcaggcagattacctgaggtcaggagttcaagaccagcctgaccaacatggagaaacccgctttctactaaaaatacaaacttagctgggtgtggtggcacatgcctgtaatcccagctacgtactgaggcaggagaattgcttgaacctgggaggcggaggttgcggtgatccgagattgcaccattgcactccagcctgggcaacaagagcgaggctgtgtgtcaaaaaaaaaaaaaaaatggtctatgggttttgggcaaatgcacaatgtcatgtgtccactatacagaatagtttcactgtctgaaaaatctcctgcttcaaccattcttcactctctcacctttgcctctgcttaggttttaatgttctttttgtagacatttaaatactgtttatactccaacctggaattttcgggtaaagacgagttagtgaaatcagtgatcaagggaaagtaagatgttctggtaaattatttatagtcccttaggctttgagattttgaaagttacttacacagttagcgtacaggtaacaaacagagctttagaatgcat

SEQ ID NO: 45592 - DNA, 1080 bp, Homo sapiens
tattatgcttgtgctaggctttctcagaatattgaaaatagcttttgaatctccactgtaattttcagggagtcctagaggtctagagatcttcataagaaaactgatcacttttttaaaaaattttatttatttatttatttatttattttttatttatttattttgagatggagtcttgctgtgtcacccaggctgaagtgcagtggcatgatctcagctcactgcaagctctgcctcccaggttcatgccattctcctgtctcagcctcccgagtagctgggactacgggcacctaccgccacacatggctaattttgtttttttgtatttttaatagagacagggtttcactgtgttagccaggatggtctgtatctcctgacctcgtgatccacctgccttggcctcccaaagtgctgggattacaggcgtgagccaccgcgcctggccctgatcactttttaaattcagagcatgagtcttcgattaggctggtttgtgtgactgtcactgtgctcagtcctgttattacagctgtgctgaggtacttagtgtggctgttttccagacttgacttgctcaaattaccatttctctatcttctccagttgcttgctgacccagccttttccactatacttagtggcagtgaccatctaaatatgaaaaaaaaaaaaaccaaaacaaaaaccgttgtactaggatagaaaataaagagacaagaagggcaagaaggctcaggtatttgtggtcattaaagcagaagtctctacgctattttaattgttactgtcatatgagcctcctgataatttgtttattcgtgtttgtacatattctgcataatatcagtatgtgcattattagtgaaacctaatttttctcctttttaaaataaaagttaattataaatagaagttctgagattttgcatgtactctgagctgcatgcatcccactttagaaacctgtactgagaaagcagactgatattttttactgaccaaaatactaaccaccatgtctactgtagcttagattattctacagataatgctgaggattctgacatacaa

SEQ ID NO: 45593 - DNA, 1034 bp, Homo sapiens
gaatgtcccagagagtctggtgtgttacatgccatatggtggtcaagtgtaaagggggtaaggcagagagtggttgtagccagtgaacctacagcaagataatcaattcatacgtgcctggctctgtgctaagctccttctcataagtagcttagctcattgaattcacgttacaatcctgtgaactatgtatgtggccactcacagacggaagtagaaactcagaaagcctgagtgattccctctaagttacaaagcttataagagacagaaccagtcctgaagtccattccttttttcactataccagattgaggtaagatgatagccttgaaaactgttagggtgttgggactattttgtatgtgttgctgtttgtttgtgtgtttatttttattcagtgctagcatatgattaatgaagatacttctagtggtagaatgaaggatgatgagtcagaaaaaaatgttgcaggaagcaagacaagatagaagaccacaacagaagtccaagcaagacatggagaacctgaactactgcagtgataatggaaatgggaaagaaaagagagatgcaagagactgggagaaataatctaagcacttagtagatcgatgaactgaaagcagtgaaggcaacctatgttacattagattcgtagtctcaacttttttttaaatcacacatccttaatagtaaaatatttttgagcatgtatcccatacaaaatttttaatattttaacctcctttccagtggattttcttgtgacccattttagagagcactggaattatttaagaataatgagggaagggattgccaggaagaaagggtggaagagaatctgagtttggtttgggtcatactgagtttaagatagctaaagaagtaccgacatttgaagatgcttcatacaaagttggaagtggtattaaagattttaggaaataaaatgacaccaagcttatgttctagatgaaattcagtcttattctcaaaatagagtctggtttccccagttctactttgtg

SEQ ID NO: 45594 - DNA, 1036 bp, Homo sapiens
gggggcagcagcatgagatactagtacaggtggacaggtcagggtttgcttactcttcactgaactctacgtagtaggtacaactgccttggatcaaaaacaatttttagagaccctgatagaggattaatgcattaaacaaaatcacaatatagattggtggttgattaaaaattctagtatctgattttctatctaatatatattattctggtttcttactggcaagcctttattttacagaatttttgagagaagaaatacttaggactgttaactgtagaataaaccttacagtcctagaaagaagcattaattatatgatatattagtaaaagatgcttatagttgttttacaggtagcagtagggtgacctaatacacagaaagtgctgtgccacataatgaggattcagtagatgtgattaaatggttgctgacatcccttcaagacaatgacttgtcttcatagctcatcagtgagttcacagtctattgttcctttttatttggccagtgtaaaatagcagttattgcaagaacaaagggattaaagcatctgaagacctttgtttgagttctgccactttagtagtgatacatctcagagatcaacctctttaatgcctgtctttgttccctggaacagagtttgtgtttccttttgtgttacaacagaactctggtcattcctaccatagcacttttgcacactatagattgcaacccacagtattttacttaaaagattctgaaaaagtggattagaaaacaccagtgtgtatcatgcataggaagaatactgtttcatgaaattttttttcacttaaacatacagttgtatatactgggttatgataaaaatatatatatatttcttgctgcaggtcatagtaaaaggaatttgggaaaacacttaactgtagcatggatgacatcatcaggtagttatcagtttataaatctgttctctctaccatgcacctcttgaaagaaggaacacattttctttatctctttctttttaacacttaag

SEQ ID NO: 45595 - DNA, 1064 bp, Homo sapiens
gttgagtatgtataagaaaacatcctcagagcagcaaagggctgaaaagagaaggaattaaaggctaaagtctgaaggcaagtgaaaattcagaaagaagtggagaactgaaactttttgcgcttaacgtagaattcagcacaatgatttggaggtggtgaggtcagggagtttctagggtgctcagaagtttctagttatagacctggtggtagctgtacgggataattattttctaaatttaaagtatgtattttgtgcacttttctatgtacatgttataatttacaacaaaggattaaatgtaaaaggacgagttgcaaaactatatatatatatatcatatgatcccatacatgtgtatttcatgtaaatgagtatgtgtgtgtgtgttatgtaaataggggtcttaatatatacattttacataataagtatataaatttatgtgtatatataaatgtgtttatgttgggaatggaaatgtttgcatatgtgtgtttcatatacttagaaaaagacctggaggtactcactaaactactgactgaggccatctctgagagacaggaagggcatggggaaggaacgagaaaggaacttagactttttgctttataccactcaaattaaatttttaaacaattgtcatcatttaatgtgttttaaaatcagatttctaaaaagatttgactaacatctctgcccactgatagaaaagtactccctctaccatgctctataccacttggtacactatctttcttttctttctttcttttttttttttctgatcttgctcctttgctagactcttaaaaggaacaagacctgtcacgtttatttttcttgtacctactaaatactggtacatagtagagggtctataaatactagtgaaaactgaatgagtaaatgtaccttaagtagaacaaagggctgtaggcactcagtagttatacatttcctctgaggctcttgttacattttttaatattcttctgtacctggcacagcagtgaacataaagttggcacagtaaatacaggttgatttgaatttaa

SEQ ID NO: 45596 - DNA, 1053 bp, Homo sapiens
gtagagcaggcagggaacgaggttatagaaactttttattccatttccatctgtctctctttcctcacaacagtcccaatagcatttcaaagggtttcaagttccatgtaagttatagaaaaaaataaagcacaagttctctgtgacatgttcagcttatctatgaatataacggaactgaaaccatatttcaataaattattaacagcaatcccttgccaagaaggatatcagcacagataacagggcaaatccattataactcttaagcaaatcctggaattttaaaaaaattgaatagtgtatcaaataagtgcactgttagctgggacttcattaaacagcattttttttcctttctttcctgttcctccccctttcccaccagcttccagccagaataattgataactaaatctcaccatgaatttgttgggaatttacccacaatagttctcaatttattttaagatttaaaataatatatttttaaatagtagattaagactttacagaaatttcagataggataatacagaaccttgaaaagacttattttttacaaacttccttaaaaattcttaattgttctaacagtcacagttttgtttatgtatacaattggagttctgcagtaagacactgtggggttattagtacatatatcaaattcatgaggctcctattcctgtatattgttacagagctgttcttgtatattgatgtttaatgatatggggccgaattgttattcaaataattacagcccattcctgattatttagatgctgattaactagtcaatgacttattccctttgacaaaatttcccaccctctggctttcctttgatgttaatgaggaagaggatccagttttcatcccatttggcaaggttggtttcatggactgagccactctggatgtaagatcagtagctactctgtagactttatggtaatggaagttaggttaggttgcatcagaacactcaaaagtcaagcctatcaccatatttgagaagaaactcacagtatttgatataccttagtg

SEQ ID NO: 45597 - DNA, 1045 bp, Homo sapiens
tccaatgagcatttcctttgagcacgaggtcagtcctcaaaaagctttgaattttatggcatttcggattttgtattttcagattaaggatactgaacctgaatttggaaatacatttattcatcagatactcatgggatgcttactatgtgccagaaaatgtgcagggcactgaaatagagtgaaaaagacattggctcacccatgaaaatgtataatgcagttgaggggagataggcaatcaaatatacaattataatacagaatacattcaataatagtggaagtacatatacttaaaagagcatgtcagatgagtatttaagtcagccttagggcatcaagaaattctccttacagttatatctgggtcgtttgttttctgaagaagaaggaatgctacgtttaaagttaagagagttacagatttatgtgtcatattgagaaatttggatttgattttaaaggaccttacattgaaggttaataagaattgatctgtaactgaaaaagataactgtaggatggaggtgggttggaggaagcagagtcagaggttgggcccatagtaagccaggtaaacagtagtggtgattttaacaaaagtactcatagtgtaagttgaaaagaagtgaatgagttgaaaatataagaattggaaatcacagaatttagtaattgaatttattccttccacaaatattgttgagctgctatgtgttaggcattctgttagatatggtggggaacaagagagacaccctgtctgtcctcaagtctagtggtgttgacttcagggcttttagagtggacaatttcagtgggtgatgatgccatttaccagaaatggaacagacaggtgtctcagaccaaagatccctagatgtgagaactgcttccttaatgccccttttgagatttcaagatgtccatgtgattgagaatcactgtgtctaatggaagtgtatctctatgtaaacaataactggggggggagtttgagaaccactgttacaggtgacagttgaagccaggaagtagatat

SEQ ID NO: 45598 - DNA, 1044 bp, Homo sapiens
ggaggatgaggcaggagaatcacttgaacctgggaggcagaggttgcagtgagcagatattgcaccactgcactccagcctgggcgacagagtgagactctgtctcaataaataaataaataaaggtaagcattgaaattggacttgccacattctctcaccataatgctgacaaatacacatttacatcaaatattaactgaaataataatttgaaatttaaaaaagaaacttatctataacacaagtcaaaggctacgtcaaaactatagttaaaaatgattcacaagttaatggcaagaacatacataacttaccaaaatgtgtaggtgggaagagggtttatcaaaattagaggaaaattgttgccttattaagctcgatagcataaacataagtgagttacacagcaatgcaaggaaaaatctaaaaaaaatactaaggatagaaaaatgaaagaataatgacaatagcagcaattaatgaattagaaaagcagaaaaacaataaaatgatcaatctaagagctggattactgaaaattgaaacaaaattaagatcaaaagaaaatatgaaggccagctctgtggctcacgcatgtaatcccagcactttgggaggcccaggcagtggatcaccagaggtcaggaatcagcctggccaacatggtgaaacctcgtctctactaaaaatacaacaactaactaggtgtggtgaggcacctgtaatcccagctactcgggaggctgaggcaggagaatggcttgaacccaggaggcagaggttgcagtgagccgagattgcgccactgcactccagcctgggcaacagagcaagactccatctcaaagaaaatatgaaattaggaataaaaagaggtatataaccatagacgtgttgggaatttttaaaaaacatatttgaaaagtaatatttttaactctgtgacaattcagttttaactctgtgacaattcaatctgcaaaatgaatcttttcttttttctttttcttttttttttgagacagagtctcactcactcta

SEQ ID NO: 45599 - DNA, 1029 bp, Homo sapiens
agaggttgcagtgagccgagattgcatcattgtactcccactggacaacaagagcaaaattctgtctcaaaaaaaaaaaaaaagatttgtttcactaatgtagcatttgttcatcattagaaaaatccataaaatggtaaccacattaagagatcaagaggaaagccattttcagtcattattactaagacaagttgtaatattactctagagtaatagagtgctagtgaacaagtggtgaactaaagtgaccactttccttgtgaaacttaagttccaatgggagaatgacagtaaacagacaactattataataagtgcatggaagattttggtgtatgttagattttcaaatctgtagagaaaagttggctcattcaataaaaattttgaaaccattgattaatgtcttaataactatatgttaaatctaaaatttatactttagatttaaatatgttacaaatgaattgaagattttaagattaaaaattgaaactaaagtgtgaaaagaaacagtccggggtgtttatattaccttatgttctgtttgaccttttcagtcatgtcagaaggaagcatgcttgggaagatttatgagctgaaggataatattgccctacttctgagacaataaagacaaaagcaattgcttcaaacttgcaagcattcagcaaagcataacatggttgcaagatgtattatatttgaagattttgcatataaagaactgaaactgcaaggggcaaaattaatatcatcaggctaaggcaggcagatcacttgaggtcagcaagatcagcctggccaacatagtaaaaccccatctctactaaaaatacaaaaattagctgggcatggtggtgcatgcctgtagtcccagctacttgggaggctgaggcaggagaattacctgaaccagggaggcggaggttgcagtgagctgagatcacaccactgcactccagcctgggcgacagagcaagactccatctcaaaaaaaaaaagtcaacatcattccttgataca

SEQ ID NO: 45600 - DNA, 1040 bp, Homo sapiens
gcacggcccttatggttctttaggactagtctctttacaaataatgagaatttcaatacagtcttgcaactgtagtagcaataagcataaggagctataagaagagagagagtgtagctagaatataaggagagaggtaaaaaatgaagttggagacagtatacaggagatagattatgaacatccttatatgacttactaaagaatctgaaaggtccaggtgcggtgactcatgcctgtaatcccagcactttgggaggccaaggcaggaggatcatttcaggtcaggagttcgagaccaccctgggcaacatgctgaacctctgtctactaaaaatacaaaacttagcggggcatggtggcaggcacctgtaaacccagctactcgggaggctaagacatgagaatcacttgaacccaggaggtggaggttgcagtgagccgagatcgcaccactgcactctggcctgggtgacagagcgagactgtgtctcaaagcaaaaaacaaaacaagacgaaaaacagaatctgaatgttatcctgaaggcaatggcatgtgttgaattgctttaaatagaagcaagttatgatcagcagtgtgttatatcctgggtagggtaaaagataggcctagctggatgcagtggtgcatacctgtagtcccagcaactcagtaggttgagatgggaggatcgcttgaggccggcaattctgggctacagtacagtatgctgatcgagtgtccacactaagttcagcatcaatatggtgacccctcaggagcagggaaccaccaggttgcctaaggaggggtgaacgggcccaggttgaaaatggagcaggtcaaaacttccgtgctgatgagtaatgagatcacacttgtgaacagccactgcacgccaaccagggcaacatagtgagacaccatctcttagaaaaaagaaaaaaaagaataaatgtaagtgggagggaaaagtggaggcagggaagtcagtataagactactctaggccaggagtggtggctcatgcctataatcc

SEQ ID NO: 45601 - DNA, 1028 bp, Homo sapiens
acagcatccaaaagggccatttgataataaaattaaaaaattaaaagttgaagagaattcagaggatgctttcttcagagaagtgcttaggatttctcagaaatctccccagaaaagaggccttaacagtagagtgatcatcctttctgaccccctgagagaataacacacaggtcggaattctcttcattgggctgcacacccctgtctctgcttagtacagctttgggaagttctgagagggacaaagggggtaaagaactgagagtggatcattaacccttcataatacatcatcccatgttctgcctcattggttccttaatttttagtgtgtgattgtgtggctcggttggggaatagttggaaggaatagttggagcttgaattttgtctcctccaaagtaaaaggaagcaacagctttatacatttatagagctggatttctttctttgttttttaagctctaatgaattctgttttgagcattctattgactaaaatattattttggatgaaactgaagcatatcatgacccaataataaccgttgcccctactgaagatcttaaactactgcataatcctgaaccatgtgccttcacaactattaaacaagaaataactaatatttattaaagtatgagtaggaattacagcttacagcttagattctgatctttgcactgattagctcttgattaattaaaaaaaatagctagcacttattaaacatttactacacgctaggcattataatagccttgcatagattatctcatttaatactttccatggccctatgaactaggtactgttattttcttctttttacaaactgaggtaaatttagtgttgtcatgtgcagtttgcacccttaactcccaacactcacttctgctgggtacatgacatattgaatgaatactatgtttgtaagagagagagaatatgcatgaatgaatgagagagagcatacccaaacagggaagcaaactgatggatttggctgtagtcaaattgttgt

SEQ ID NO: 45602 - DNA, 1030 bp, Homo sapiens
tgctggaattacaggcatgagccaccgcacctgccccaattttttttttttgagaccgagtctcactctcttgcccaagctggagtgcagtggcacaatctcagctcactcaaattctgcctcccaggatcatgtgattgtcatgcctcagcctcccagagctgggattacaggtgcgtggtaccacacccagctaatttttgtatttttagtagaaatggggttttgccatgttggccaggctggtcttgaactcctggcctcaagtcatctgcccgcctcggcctcccaaaatgctgggattacaggcatgagccaccacgccaggtcccaatttcttttttaacacatatttattggatgtctcctatgtgctaggcactgttaaaagcattggggataaatcagaggaatcagtccttgcaaaggccctggtgtgggagttggcctggcacacattccaggagtgacaaggaggttcccatggaatgagtgagggaaaggaaagtaggagatgagatcagagagctaacaaggggtggatgacacagggcttcccaggccattgaaggactttggcttttacttagaggttaatatggggtgagaattgagagaagaatgataactactgctgattattgagcttatagaagatagctggcactgtgctaagtgcttgacctgtgttatacttcttaatcagatagaacaagaagattagaacaatgatataaagcaaatggcctgtcccgagaaaggaccctgagacagaggggttggggagcgtgcaggggcagtattcaaacccagatctgagtgatttcatgatgtcatactgtcatttaatgaatatagacatgtgtttgccatcacattgctgtagcaagactaatcttagcctccacttgaccactctgcaagaccactgctcaggaactggataggaagttggtgcctgtgcctccaaacaactctgggaatccgggacaaagaatctgagcacacatcatgcaccacacacacattt

SEQ ID NO: 45603 - DNA, 1092 bp, Homo sapiens
tatacatccagaaaatatgcaaaatctagaaaccatgcagaaaaagattgataatttgaactacatcaaagcaaaaattatcagaccagaatgccagttaaatttttaaaaagttaaaaaattatttatgatatttttagatgccctcagtaaagtcaaaagacaaactatcagctaaagaggaaaattgtaatttatgtgatagaggattaatttcctgcacaaaatcttacaaatcaatgtgaaaatgacaaaccaatattctacaaaatgaaagcacatagtttcagaaaaagcagtaccaatcaccagtaagaatataagatgtttaactttacaaaagaaatgaaaataaaatagggccgggtatagtggcacacgcctgtaatcccagcacttcaggagcctgaggcaggtgcatcacttgatctcaggagtttgaggccagcctgggcaacacagtgaaaccccatatctacaaaaaatacaaaaactaaccagatgtagtgcctgtagtcccagctacttagtagggctgaggtgggaagatcacttgagcccaggaggttgagttcttggtaagccaagatcgcgccactgcacttcattccagcctgggcgacacagtgagaccctgactcaaaaagtaaaataatgtttacctatcaaattggaaaagatgtacacttctgataatattcagtgttgcaatctatatatggggaagtagccaccttaaataatttattcaacatgtaagtccacacatagacccaaaagtatgtatacagtgatgttaatggcaacatctattgtatcagccaaaaactagaagcaaaccttaagcttctgatcaagattaaataacaggtaccacattgaacttccctcctaaaataacagagaaaaaaaaagaaaacaaaatctgtgaaacaaccacggcactcaaggcattgacatcaggcatggaaaggcaatgatccttgaagacaggaaacaaaggaaatgggtcccatgcttgttccagcttactattgagagagttttcaggccatagtacagggaaggggaacctaggcagatccttgtgat

SEQ ID NO: 45604 - DNA, 1049 bp, Homo sapiens
tcaaggcaggtggatcacgaggtcaggagatcgagaccatcctggataacatggtgaaaccccatctctactaaaaatacaaaaaattagctgggtgcggtggcaggcgcctgtagtcccagctactcgggaggctgaagcaggagaatggcgtgaacccgagaggcagagcttgcagtgagccgagattgcgccactgcactccagcctgggcaaaagagtgagactccatctcaaaaaaaattaaaataaataataaaaataaaaatcaagtcatcctgtatgtgtcaataggaaatgatcccccaaataaattattagatgtaaaaatgcaaggtatttgcatatctctttgagtaaaaataggcattatatatatgtgtgtgtgtgtatttgtagatatgtatgtgtgtgtctatttacatatatgtatatatagtttgtgtatatacactgtgtgtatgtgagggatttcttgagcatatacaaaagcttacagtggttgtttctgagaattggcattgtgggattgtggaaaagagagagaggacttctgattttattcacttttgttgaattttttgaaaaccatatatgtgcatattcttttataagtttaaaaaaaagattggttaaaaagataaaaaaggcgggccaggcgcaatggctcacgcctgtaatcccagcactttgggaggccgaggcaggtggatcacctgaggtcaggagtttgagacaggcctggccaatgtggcaaaacaccatctctactaaaaacacaaaaattagccggtcgtggtggcgggcacttgtaatcccaactactcaggagactgagtcaggagaatcacttgaacccaggaggcagaggttgcagtgagctgagatctcgccactgcactccagcctgggtgacatgagcaaaactccatttcaaaaaaaaaaagagagagagagagggccaggcgaggtggctcacacctgtaatcccagcactttgggaggccgaggcaggtggatcacctgaggtcaggagttccacaccagcc

SEQ ID NO: 45605 - DNA, 1028 bp, Homo sapiens
cagagtccactgaaagagaaactcaaactttgttccctttactcattagatttttgtgttaccacctctttcacacacatgatgtgaaaaaggtggtattgtgtcatatattaagaaagaaaggtgactgggcgcggtggctcacacctgtaatcccagcactttgggaggctgaggcaggcggatcacgaggtcaagagatcgagaccatcctggccaacatggtgaaaccccgtctctactaaaaatacaaaaattagccggacttggtggcaggcgcctgtagtcccagctactcgggaggctgaggcaggagaatggcgtgaacccgggaggcggagcttgcagtgagccaagatagcgccactgcactccagcctgggtgacagagcgagactccgtctcaaaaaataaaaaataataatagtaataattttaaaaaaaggtttctcataattttgaacaagtcattagatgtctgtgactgtttcctcacctgtaaaattgttatcagtactcagggccctccctcatagggtgcttgtgaacattagataataaaaagattgtaaagcactgtgtaaatgtcaagtgctgggtaatggggaagagtaactgcaggcagggtaggaaaacttagcatgggaaagatgaaaactatagattttctcctccctgaagtttaaaaacgatctttttttttttaacaaaataaccagattctttttatacacttttctcttaatccttcagaatagcacagtttggggactgccttcaaaatcagaccacattgttagaagttatttcactgcttcagaacccaaatcccctgcaaggaatgtaagagcaacttactttctttcaaatttcagtcaacggtaaagtttcagcgtatagcatggtccacttcttgcaatcacaaatttactttgcaggggtaaaatttcggaaggagcagtggaagaagtctggtctgggtacttcttgtaaacttcagtcagatatggcctgtgcaagggcaaaca

SEQ ID NO: 45606 - DNA, 1166 bp, Homo sapiens
ggttggtctcgaactcctggcctcaagtgatcctcctgcctcagcctccagagtcactgagattacaggtgcaagccaccacgccttgctagatttctttctaatgtagttttcctggtggttctttttttttttttttttttttttttttgagacggagtctcgctctgtcgcccaggctggagtgcagtggcgcgatctcggctcactgcaagctccgcctcccgggttcacgccattctcctgcctcagcctcccaagtagctaggactacaggcgcccgccactacgcccggctattttttgtagttttagtagagacggggtttcaccattttagccgggatggtctcgatctcctgacctcgtgatccgcccgcctcggcctcccaaagtgctgggattacaggcgtgagccaccgcgcccggccttcctggtggttctgataccaccaagtttggaaccactgcgaggccatttcccagatgaagaaaataaggcccaaggagaggagtacctccaccaagatcagtggcatgctgaactcatgaatggcagaggcctgctcagagctcaggtcaccctcacagtcagtgcaggtttttttccactactccttcatgctcctgggtctgccgtggactcaggataaacagacaaagttgtctgtgtctgtactttctcatctgtactgtagagataataactcctgaccttaaagggccattgtgaggttaaattagttaaagggtgttcagttcactttgtcctttactcagagtctgttctttagacaactgaaagggtgctaaattaagccattttgcagagaggtctgagtcatctagtggcagctgtctgtgcctcactggaggtgctttgatcattgtcatctaaatgcatgcgttaagtactatctgtagcacagcgctccaggctgtgctaagtgagttacccagataatggtctctgcccttgagaacagcgctgaggcaagggacataaaggttattcacacagcaacagaacaggggatccatgaacgttgaattcagagagcctagaaggagcatggggacacccattctgcgcccctggcttagaggaccgaagtgctgcagctcaggtcacatggcacgttgagagcgggatgtgtgacccacca

SEQ ID NO: 45607 - DNA, 1022 bp, Homo sapiens
gaagtcatgtgtcttcctttgcatgtggggaggattttaaagggatggaaagtggacaaggagggggtgggtgagaggaaggaaggcttagaggcaaggactttgttctacgatgctgactcagtgatgccttcccttgggctctgcagaaataaagattttcctcatcttttagctccttccttccctcctccctccctccctctttccctccctctctcttactttcattttatttcttccttccagtcagcaggtttttgtggggtatgttttctgttaggctaacttcagacaagaccctgaaaactaagtacagatgtcatcacagatgagtgttccttactcttggaagttcaggtagccctgcctcgattggctctgaccactttgtcaggccgtggagctgagctacattttggggatttcacccacattgttgttgacaggattgttaggcttcactagatttgcaccctcgggctttgatctttttaatatcttccggattgaatacccttttgggattgttctcctgactttttttttaaacgagtatattgtgccactagaaagaagaatgtttaaatggatcaaaaataaatcttgatactctctatcaaatgcatgtaaaaaggaaaaacaagcatgtttcattaatactaagattccagggcatctggtaatgacagcgctgagtaaatcctatggggcgacatatttgattagattcggggtcagtgggtgaggggacatactccagtcattacaatctgaggacagcgctgagcactaacagatgtgacaacttataacacaggtacttcctccttcactgcactttatccaaaaatagacatcttcagaggttctttaccttttagccttaaaggatttgagaagctttagaaaacaaattatgatatcaggtctagatttattttgctattaaagtctcacattctgtacaagtattttattattgtttgtctaggtctctgaaattagaagagacagaagaa

SEQ ID NO: 45608 - DNA, 1074 bp, Homo sapiens
tcctgaatagctggtattacaggcatgcaccaccacgcccagctaattttgtatttttagtagagatggggtttctccatgttggccaggctggtctcaaactcccgagctcaggtgatctgcccgcttcggcctcccaaagtgttgggattacaggcatgagccatcgcgcccagccatggcatgctttcattagtttccttatccataaatgaatgacaatcgttgtaatcacctcattggcatatttgaaatttaaataagatacatgcaaagtacttaaagtagctggtacacagtagggctcagtaaaattatcccatcatcatcttcaaacttgagccactatcaacatcctcttcgtttttttccaccattgctctataggcatgggagacgaggacagttttaaaggagtaagatgagccaacctggagtttaggaagttactccaatagcaatgcagagatggattaaggaggcatgaggcaaaaaaaagtcagttaggatgcttttacagtggtttaagttatagaaaattagagtatagagatacaagagtgattgtggaggtacagttaacgacatttgacgactgactgaatgtaagagaaaggaagaagcagcgaggggtggctgacatttctcatctgggtgtctaatactgtcatttgctcattagcctccagagaaggcatgagagaggaacactcttattggaggattgtgatagactcagctcaggtcatcctaaatgcaaggtcccagcaatacagccccgtggaagtgtccaggaagtgcagcaagtgtgagttttgcagtcaggggaggactcagaactatcgatgtggattgggaggttatcagtatagacgagtcaacccgctcaactaccgtcacagatgcagctctggaacaaatgcattcaccagcagagagccagcaaggcaggacccgcacctcgcctgtgatctccacaaggccagagcccgacttcgttctgctcactgtgatgccttagcaccctggtgccaaccctcaaaaaacactttgttgaccaatgagaggatcaat

SEQ ID NO: 45609 - DNA, 1074 bp, Homo sapiens
cctggtgcctgctctaagcgtaaccaccatgggatgggattttaattctaacctgtataagttaggatgaggaccaattcatcaactctggactcatacgaagaggcagacagaagttagtgatgacacaattacccttttttaggactcaggctgggattggccaggaaagcagacactgaagttagagcaactcaggccttgtgacccaggaacttaagaaatgtaaaagtcatctcagaagcaacgtgggaaatggccaaatgcctgggtagcttaggaactcagaagttgggggttggtctctggccatcccatgaataggactttaaaccccaaagttcctgaagcaggcctcacaacagaccttgttgcctgctccagtgaacccagacaaggctcagcgtgacttcttgggcattcaggatgctaatacttcggacttcaccgaggttttaatctaaggatttcaaaagactttgcaagcaattaaggttataacacctctttgtactgttgttgcatgaaccagatggacagaaatatgggtcaggattggctgggatgacatgtgataccacaaatccatacatttaatctcttctaaggttggaacaaatctggggcaattgcaaccagttaaattatataaggtcagaatgagtgtgctgaaaagctggctgcttttattttcccctgtgtcatcaacatacttgtcatttgaggaagtcatccaagtaacatctcaataaccttttattcatgtcatattttctggaagtttctcctctcctccccagggagtcacagcacatgagtgaaacaggcaagtcaaatatttccctgaagttgaaaaaacagaggctcaaacgtctttcagtagctactcaggagtaagcagctcagagctgggatatgaacttgggtctttggactccatgcccaatgttgttgctctgcctacacaccaccacacaaagtctcctggtaagaataatgatgagagaaagtggttcaagacaaatacaaatactgaatttttagctccacaaatgtcttcaaatgacccagtat

SEQ ID NO: 45610 - DNA, 1030 bp, Homo sapiens
aaataatgttttaccagctatctagccatcccttaacccagtcaagttgacacataaaattaaccattacaccctccaaaatattcttattttgaaattctcgcccccagtacttcagaatgtgatcttattctttaaaaggatccttgcagatgtaatgaagttaagataagctcattagggtgggctgtaatctaatatggctggtatccttataagaaggcacgtagacacacaaagagaagatgggtgtatgacacaggacacagagattgaagcgtaacagttgcaagccaaggattgtcaaggatttccagcaagcaaccagaagctaggaagaaccaaggagggatctccccacatgagccttcagagagagagcatggccttgccaacaccttggttttggacttccagccttcagaactgcgcgataataaatttctgttggtttaaggtaaccagtttgtgatggtttgttatagcagccctaggaaactgatacagtctctctggacagcctatgtctatgcagaaatggccacagtaggcagagctgtccaagcagtgagcatatatagggctctgaccccttaccgagggcccggctgcagccctgacttatagggttcctttaagcaatgaagtcagaatgggccaagacaagaaaaattgcaagattcattatttaacactgactcctaccagggttatggggaaaataaacacatcaatggtacctagaagatctttctgggtggccaagctaatagaataagccgtattcttcatcttctctttcatggtatcattctttttctgcaacaaaactcctcccaaattgtacctagaattcctgaaaaagtggagctaactagataaatgtgaacatcagtaccccccccaaaaaaaaatcatgttacttcatttgcatgtgatattctcatttaaatttcattaccataaagtgagggttctattaccagggtaaccagtaatagaaaaggagcagtatggctttgacaaatga

SEQ ID NO: 45611 - DNA, 1042 bp, Homo sapiens
gtctaaacatttacaaaagcttttgagaatacgggcactcattgtgtctgattttagataaaactgtatacttccagctgggcacagtggctcacacctgtaatcccagcactttgggaggctgaggcttgagctcaaggagttaaagaccagcatgggcagcatagcaacactttgactctagtaaaaaaaaaaaaaaaaaaaaaaaaaaattagaagtggtatcacaggcctgtagtcccagatactctggatgctagggtggggagattgcttcagcccaggagctggaggctgcagagaaagaccctgtctcaaaacaacaacaacaaaaaaacaaagaataaagaaacaaagaaaacatggaggttttcagacaaatgactaatactatccttgtgcttataaaaatgattaatttttaagttcatgagaaaaaggagtagggaaaaggaacatttatcagtaatataagactgaaacaaaataaatggagtttaaaaggatgtgtgtgtgtatgttaatatgtttatgtttaactgaagtaaacagtaaaagaccatggtaaacagaagaggaaagccactgtgtatgacaaaaacacacatcatgctattctttgctgaccacgtggtggcactgttgacatgagacagtttagtggatttgtttagtaaaatggatttgcacgctatattgctgattttaactaaactaatcctcttaaaatacacaagtcattaaaaaatatttcctgcaaagaaacttcaggttaagataatactaataattgaagctgcagataataacaaagaaatggaagaacaagatgtctctcttcctggtttgaacactttttcagccacattgtgagaaaacaatcaatggctattggtgatatattacttagcagaatttttaaaaataatatatatccatttacttgatcccttttagttaaaagtaatatttttgataataaataaaaaatagtattttgaagaaaactcatgcttttaaaaattttgaaatgtttaaatat

SEQ ID NO: 45612 - DNA, 1031 bp, Homo sapiens
tgggcaggtgtgatgtagggaaaacagctgcccatttatttatgcttagcattccaataatggaacattccacatttatgcctagtgttccattattggaacgctaagcatgtgggagttatttatatcctactgctcaaggtcatgaccaaggtctgatttttcacacacgtctgcaattcaaaaaattgcaacctccagcataaatgggttaatggacttaacagaattaactggtggtcaatattctgccactgccctgagaataaacaataaacctttcttcttattctgaatctgtgagttttgccagggagcagaaaagatagaaccatggaatctcctggaagactctcagagtgctcgttggaatggtctacaatgactaggggaggagtcaccttgcagtagcctctagggatgtggagtggtttgcctgctctgccaggttccttttaatggcactctagctatgtgaccttggacaacttacttaatcttgtgcagcctcagctaccccatctctctgaaggcaaacttagtctctgcctcacagggtactgtgagggtccttgtgagataatccgtgtaaagtgcccagcgagatgtctcactcagcccgtgctcagacgtgtttgcagagtgttaatctctcagaaggagctgattatcaacattcttttgcctagagagaggaaagtctatttgccattttatgcagtttatatacatagatactatttgccatattatacagtaatagattttactggacaataatctcaccagataatcttggtggatgagattgcagcacgtgtgctacttatattctttagggcaggagagtttatgtggatctagagtggagtggtggtttatgactcctgtagcactcagttgattctccattgctcctgaataggtctttctttactgatgacagggtctctccatacggtgacacatggggtttgatgagggaagatagggtatgtgaagcttatgtagggacaatgagagcaggaaca

SEQ ID NO: 45613 - DNA, 1012 bp, Homo sapiens
tgacagattctagtgacaagattctagtgacagaacttaacttctgtcatatatagaacatttctaggatataacaaagtatttagcctgctgcttagcgaacactaaatttttactataaataattgtcctttctggaaggagccaaccctgtttcttctctgccggaccacatccttttcatgcttcagtgtttacacagcttttctctatccctgctgtcacaccaatcatcctctgactgactctaccattaatttggcctttgtttggttttgtttttcattcaccatgtaggatcacaaactcctggagagcgctggctgcttttttatgtttttctggcatctctctctggaccttgcatggtgcaaagcaattgcagaccactcaattcagtgccggttgaatgaatgtgttaagcctcataaggatcaatcttctgaccttgaactcattagtactgcactctaaacagctgagctaatgagttagactaaacagttaattttttttaaaataaagaaatgctttgtgagccccatttattgaatagccctatgtctcttaactaggggatatttttccaccaggagacatttggtcctgtctggagaaattttcggttgtcacagagcgggtggagttggtactagcaatttgtgtgtacaggtcagagatgttgctaaacatcctgcaatgcacgggacagccccatcaacagaaaagattatccagaccaccatgtccataccaccgaggttgagaagccctgggttagactaggttatatcaatagattgtaaagctcaaatagattttatcagtttataaatatgtagtatgaatctatgttgcagcttacttagattgcatataaacgtatgaacaatagcataaaacctgtatctgctaaatattttttgaatcaaattttcaaaaactactagaaaagctcatgtgtaaacttcattaattcagaacttgagggaaagctacttcttacagtgtg

SEQ ID NO: 45614 - DNA, 1032 bp, Homo sapiens
ttatgccaatcttgtcattgctatttgaatggtataatacagcgaaataatcctactggaaatgcctcaagcacattttgcctttgggggtcttacaaatctttggttcttcagacataaaaatgatgagtaaagagaaggatacatgatgagtgtttgctttcatgccctctatgccccatctgtccttgtacaaaaactgatcataacagttaccacattcctttcaataaattcagtgtatttcaacacatgttatctgagagccaaccgcgtgtcagtcactgagggaagagatggagaggacatgggtttcagcttcaagaaattaatggttgaagggggacaatgaaaaacagatgtcttagaactgtgcttcatgtacaattatgtctgtatgcccagaataatatgaaaactatttagggtcattatgacataccaggggcttagaagacagtgagaggaatctttaaagcactttgacattaacaaagtataaacaaaaagtcaacaagaggtgaaagataactctgaagtggatttctgaagttaggttgccttagtcagttcctgctgctgtaacaaaatgcctgagaccgggtgatttattaggacagaagtatattccttacagttctagaggttggacagtcaaagtaccagcagaaccgacatctggtgagggttgctccctgcttccaagatagtgccatgttactgtatcctcacatggcagaagggcacaaaggccgaggtagtttcctctagcccttttataagggcactcatcccacccataaaagctttgccctcatgactttatcaccacctgaaggcctcacctcttaatactatcacattggagtttaagttttaacatatgaattttgaaggacaaatgcatttaaaccatagcacaggtcatgagatgctattgataagatgtgggcattatcttataggttagaggtcataaaggcacagaacatgggccacatgcagctcatacagattttgattgatctccaa

SEQ ID NO: 45615 - DNA, 1066 bp, Homo sapiens
ctagtttttcatgttccttttcattattggtttccaatttcatcctgtagttctcagaatcaaatttaaatttaattcctttaagatttattggggtttatttggggaggggggctagaatatggttattcctggagaatatttatgtgcacatgagaaggatatataatttgatgttgatgattgcatgttctatagatgtttgttaggaccagttggtttatttgtattcttcatcttccatttatttgttggtctgctgcctggttgttctatccattattgaaaatggattgttatagtttccaagtgttattattaaattctttatttctttcttcatttctacctgtttcagtttcatgtattttggtgccctatgatgaggtataaccaatacttttaaaaaattatttaaaatttttttatggatacacaatatttatgcatatttatggtacatgtaatattttaatgcaagcatacaatgtgtaatgaacaaatcagagtaattgagatattcgtcacctcaaaaatttatcatttctggcttggcatggtggctcacggctgtaatcctagcactttgggaggcccaggagggcagatcatgaggtcaggaatttgagacaagcctgaccaatatggcgaaaccccatctctactaaaaatacaaaaattagctgggtgtggtggtgcgtgcctgtaatcccagctactcaggaggctgagggaggagaatcgtttgaacccaggaggcggaggttgcagtgagctgagattgtgccatggcactacagcctgggcgacagagggagactctgtctcaaaaaaaaaacaaaaaacaaaaaacaattgatcatttctttatgttgagaacattccacatctactcctccagttatttttgaaatatgcaataaattactgttaacttatagttaaacttatagtttaaatttataattaacttatagttaactgatgttatattatagttgccctattgtgcttccaaacactaacttttattccttttaacaatatttttacacctaggacagga

SEQ ID NO: 45616 - DNA, 1035 bp, Homo sapiens
taaagaagacttgcttccccgcccccatttgacatagtgagctcactattacctttagaatttcatagtagtagttttcaagttttagagggaagaaacaatttggccaaccactgaccttaaaatgtgaattttaatttttgcttcttacaatgagaaccattttaacttggtgtaaaccaggttctcatccgtagctgcccacagggttcatttctgatatttaaaaaatcccagaatcgtcgttccttacctgaggattatacttcattaggtttggagtgagtctttgagatgtatctatatctaattcaatatctaatcatatataatatagatatctatctataagcatatagattaatgtgaatgaattaatgcatcaatgtttatttgatcaataatcaaaataaaatacgtcttatttttctttgtagtatcttctgcctctggcacaaacactggcatgcagtaaaaattcaatacacatctgttaaattaacgagtgactttatatccttcctacaggatatattctgaggttgctttttcttctttggagtcagctttctctgggttctgtcagtattcttttatgtatctagacattctttcagtttgttgaatttgccatgttccctcccaccacaaggatgttatacttatctctcttctcacccttctatttacactttaaatttcagctcaaagaccacttacccttaggtgccttcattgacatctgctggggaacctatacccctcatggacaacttaagtacattcctcatcataccctttcttgagaccattattctttcactcaagatcctcataagtttgaaattctatagtcagaaatgtaagtatttgtttaacatatctcttcatctccccaccatacataaagcaccataaggacaggtacagggtgtatgtgtgcacattcccacttgcaccaccagaaatttgtaatgcttacacacaggaagtgctcaagaattatttgcatccaagaactatttggataatgag

SEQ ID NO: 45617 - DNA, 1045 bp, Homo sapiens
ggaaggcttaaaatcatgcattactcaatctaatacttcacgaaatttcagtaaaacctaatgataatatagaagcttgtgttgtagttttgtaatcaacagcaaaacataaaatttaaaaaaaacatacattactggggctgtatcctgctacaataataaggctgacataatagatggagaacaatatggtaacaagccaaaatgtattacttcatccacaaatagtatcgtgctatatatagacagacttgttaaaaatttaaagaaatacacaatcaattacacaatagaaaatttgctatatggtgcatggtggcatgcaactacaaatgtttctaacatgtttctcttcataggattttctgaattttcatttaatattcaagcacatcaaaaacaccttttcaggtgtgatcctatacagcaaagctgtcctcacaaacaatagttgactaaataaacacatggctttatggaagaaatgtgtaagtatagccattgttggagcagatgctctgcttaaaaagaaaaaaaataagttaaagttatagatctcaccatgcttatttactgcttaagtcatagccaatttattgcaccaaagttgaagttcaaagcataaagaatactatatataatgcaattaatgaggttgatgtccctaaaacaagagagaattagtaaatgttttacaatagttttcatgagatgggaaatgacaatagaaatctttgttacaatgcagattttattgtggaaatgatctcatggcaaagtttttaaagaggctgcagaacaataaagagagataacacattttgcttttatgaaaaagccgatgttccaaatttgctgaccttctctgtaaataagaagtgactgtcagtagccagcagatgtgtttataaaaataacccacttgatctgtccctgcaaggtaagagtggcattttcaaagtgcatgagagaactgctctcaagagaaaatcatactgtaaagacagcatttcaaaaacatttatttggaaatatttaaatgatg

SEQ ID NO: 45618 - DNA, 1045 bp, Homo sapiens
ttgtttggcttgaaacttcttaatgtttaggctaattatattgaagatgacagtggtcattgagaaaacaaaatccccaaagcaattttggaataagagccaacatttaatacttaccagacaactattctaagtattttactatattcactcatagcaactctaaaaagcaggtagtattaacagagaaaatgaggcacagtgaggttaaatagctggtccgaggctacacagctaatcagtgggagagttgggacttagacccagaggtccagttttgaagtccacacttttagccattacactacaatggaaagaaatttagaagatatacacagaaaactataggcacatagattaggggttagtagaatgctctgggcagttaaaggaactcttcttaaaggaggtaaagcttgaatgagactgttagtaagctatttttcactcattggtgaatgatgttttgtgcagtgtgtttttttccccatagaaaaataagaaagaaaagaaaattgagaactctctctataaaaatgtgtaacatatctcatattccaagagatccttttggtagtattaatttttatctgctcacagtactggcttcattatttggagttaaaaattaactcaaccagataaaaaaatcagtgctgtgtatttgtttatctttcaaatctgtgttctaattttaaaaagttatttaacagaacgaagctatcagctaagacaatggcaaagccgtaaacaaacataggttgcgtttatgcgaatggtcaggtccaaagtagatgcagaatatgccaggttcactaattttaatccctattcagcccaggactatgtaccataagattactgctagtgttttctgaaaatgatgtatcaaggcattttctgtagaaatacgaaacagtgacatacagtagggagagctggattgaggcagagtagtatagatggaagtttcctgaaagcattttggggaaacatcttttgggtatggttcttggatgaagagttgatttattagtactggaag

SEQ ID NO: 45619 - DNA, 1050 bp, Homo sapiens
tctattatcatagaaaaaataaatgagtgcatatatccatatacaaaatagaggtctgttcttcctgtatatatttatactaaaaaaactgagacttttttttacagttgtatatatacaaacatatttgtttatttatatacacatatataaatcaattttatgtacatgtgggtatacatacatccatgcatataactctgaagtgctgactctctaaagaaagcccaggtattggtcagaattcatgctcggctcaggagtatagaattaagagatacaaacctcaaaaaagagggaaccgaatcttcaaatctgagccaccttacaagaatttttaaggtaactgttttaagtgtaaacattatggcaatgtaatagtataatttgtatggcacaagatggagtcctggtggccagaactgagtatgggaatagtcagtgctaatctttgtgcaaagcacaaaggaaaattggtatacaaggcctgagagagaggtcaaggaagcaaatactataaagtcccagaaggcagttggataggacaaggggatcggaagagcaggatcaagatcagagagcagggaagatggggctagctaatctagggaatggagggagaagggatacccagaagcaggattcagggggttagagcacttacaccatgctcatggccatgcccatggacaggagaagcatatgatgggtgcacatggtggagctggtctaaagaagagggggattcatatcacagtaaaattaagtgcaatttatccacagagcagaggaggttgtgaagagcaggcataggctatttttcatgtctgaatgctctcaagacctcttagtgttgtaggtagatgacgcacaataaatattccttgatttgaattggcataaaaggtcaaatcagaaagccagaagttctttaaggtttcaaactagattctaagaagtccaaaggcatctcagaggtcatctcagggagaaaaggggaagcaatgaggtagaactctgaacctccactctacctaaacaaggcagccc

SEQ ID NO: 45620 - DNA, 1050 bp, Homo sapiens
cactatgctcctttgccacaaggctgaagttaactctgcctgtacaaaaggcagaacagcaattctggcctgccacttgcatggaagttaactcctttcaatagcaaattcaataaataattgtgcaatctggtacataaataccccggctcccttaccccttaggttaggtaattctgagatatatatgctaggaatatcgtccttaaagttctctaacagaattaagcttcatttatctgaagctgaaaatgtaatcaaaatatatcccatattgtggccgggagtggtggctcatgcctgtacccctagcactttgcgaggctgaggcagaaggatcacttgagctcaggagttcaagaacagactgggcaacacagtgagatcttgtttctacaaaaaaaaaaaatttaaatagccaggcatggtggtgcatgtctgcagtctcagctacttgggtggctaaggtgagaggatcacttgagactaggaagtagaggctgtagtgagctgtgattgtgccactgtactccagcctgggaaacagagaaagaccctgtctcaaaacatatatgtgcatatcctgtattgattttcttccattctctgtgtcacttctccatatccctatcttatattatggaataacctcccaaagaaactaattgtgcttgaatccttgtcttacaggtaaaaagcaatgagataggctgttccatgaagtagcaagtttctcagcagtagaagttttcaataatgagtagaaaaatggatttggggagattcaaaaataaaataggtaattggattgcaggacctacatttagaccatgcagtcccttctaaggctaagttgaattattacttgtttgacttgtgacagagtcattcttgcagaaaaagagatgtatgttcatgccttggattctgaaatttgtgaaaggagataatataaaaagttatctggggagggaatattttttaaaggttatttgaaggtacgagggttagcttcctcttttgttgtaacctattcttataaaaagacct

SEQ ID NO: 45621 - DNA, 1030 bp, Homo sapiens
cggcagtgctgactctttctcactcattggcaggcactagttgcagggtgtcttgcatgagagggtcagacacccagcagcaactctggagagcatcccagctacacaaagtttcaggtcagcagccaggatttgagcttcagctctcttaccatcccagagactagaggagcccctggattcaaatgacacatctcagtggacactgagaaaggtttaaaacagattggacctctcagctggcatcatggaagtaggagtcaaaagagacttgctgcaaggtcactggaggtttagaaaaggacagatgttctttgacattccctggttccttcttagagagacaaacataaacagagaaaatcagtttgtcctttgaagaagttccagatggaaacagcaaggctgtcttactctgtgaatgtttccttgatccatccccaccgctcccagcaaagcctgaatcccttggtcaccactgtcctgtaaacagccctctaatgttgcctgaagctcaattataaaaatatctagcttctccctaaactagacactcctccagggcagagagtgtgttgtatatgtgttgatattaatctgacaaggaaaaaagccaataattattaagtgcctactgtacaacaaacactttttttttttttttttgaggtgaagtctcactctgttgcccaggctggagtgcagtggcacgatctcaactcactgtaacttctgactccctggttcaagtgattctcctgcctcagcctcctgagtagctgggattacaggcacacgccaccatgcccagctaatttttatatttttagtagagacggggtttcaccatgttggccaggatggtctttatttcctgacctcatgatctgcccacctcggcctcccaaaatgctggaattataggtgtgagccactgcgcctggccaacaaacactttaaaaatacagagatatttatatattatacatacttttaaaaaattcaactaatccatataaaccatatttta

SEQ ID NO: 45622 - DNA, 1108 bp, Homo sapiens
aggaggaacaagaagatgaggaagaaatcgatgttgtttctgtggaaaagaggcaggctcctggcaaaaggtcagagtctggatcaccttctgctggaggccacagcaaacctcctcacagcccactggtcctcaagaggtgccacgtctccacacatcagcacaactacgcagcgcctccctccactcggaaggactatcctgctgccaagagggtcaagttggacagtgtcagagtcctgagacagatcagcaacaaccgaaaatgcaccagccccaggtcctcggacaccgaggagaatgtcaagaggcgaacacacaacgtcttggagcgccagaggaggaacgagctaaaacggagcttttttgccctgcgtgaccagatcccggagttggaaaacaatgaaaaggcccccaaggtagttatccttaaaaaagccacagcatacatcctgtccgtccaagcagaggagcaaaagctcatttctgaagaggacttgttgcggaaacgacgagaacagttgaaacacaaacttgaacagctacggaactcttgtgcgtaaggaaaagtaaggaaaacgattccttctaacagaaatgtcctgagcaatcacctatgaacttgtttcaaatgcatgatcaaatgcaacctcacaaccttggctgagtcttgagactgaaagatttagccataatgtaaactgcctcaaattggactttgggcataaaagaacttttttatgcttaccatcttttttttttctttaacagatttgtatttaagaattgtttttaaaaaattttaagatttacacaatgtttctctgtaaatattgccattaaatgtaaataactttaataaaacgtttatagcagttacacagaatttcaatcctagtatatagtacctagtattataggtactataaaccctaattttttttatttaagtacattttgctttttaaagttgatttttttctattgtttttagaaaaaataaaataactggcaaatatatcattgagccaaatcttaagttgtgaatgttttgtttcgtttcttccccctcccaaccaccaccatccctgtttgttttcatcaattg

SEQ ID NO: 45623 - DNA, 1086 bp, Homo sapiens
tgggccttctgcctgcccaagatggacacgtttctctggcagctttgtcaagagatctcctggactataagacaccctgttctttcctcctgtttgtgtgagtggccctgcatttgggcagagtattggcagaatatctgggggaagtggaagactttggatagttgccggtccaggtcgtctggagaggcagtggcaggcctgctgatggctgcccctttgctatttgttttatatcaggtggcccttctggatgtgtggcctttttattttgcatttcctttcatagttggctgcagacataagattcttctttttctcttgttttgcttttttttttttttttttgagacagagtttcactcttgttgcccaggctggagtaaaatggctggatttcagctcactgcaacttccgcctcccaggttcaagcgattctcctgcctcagcctcccaagtagctaggattacaggcatgcatcaccacacccagctaattttgtatttttagtagagacggagtttctccagattggtcaggctggtcttgaactcccagcctcaggtgatccgcccgccttggcctcccaaaatgctgggaggcctcccaagttgctgggattacaggcatggaccaccatgcctggctaattttgtatttttagtagagacggagtttctccagattggtcaagctggtctcgaacatctgacctcaggtgatctgccctcctcggcctcccaaagtactgggattacaggtgccacagtacccggccttgttttgctttttattgtttcctgatgcaggtttgtgatctctttgagggatcaggaccacaccccccaccccaatttatattcccagtgtccatggtgggaccctgactgaggatgggaacagagcaacaatctggaatcatttggaccattgagtcctgtggacagtcacttcaatatcatccctagagagtctcagaaattcaaggccttttggaatgctgccaaaatgggtcctttggcaggagccccctttgtctcttctgttttctgacctcaaataatctaaggaactaataacggta

SEQ ID NO: 45624 - DNA, 1567 bp, Homo sapiens
ttgccagtgcactcctgcctgggagatagagtaagactttgtctcaaaaaacaaacaaccgcctcggtctttgtgcaaaatctataatcatttgcaagaggctgcaatcaggtatagcactggattttgtgaccaaaactaggtttcaggatttaattaaaaacaaaaacaatgtcaggtcataaaacacaagacatatacatgatgtggaaatggtcttattcattttttaattgcgaaattccgaactatctgttttttttttcctttatcttttcctttttgtgtgtgtgtggagttaggtggggggggaggtatggcatattgttttgtttatctgcctctttattatcactgactgtgaaattcttgagaacaggggcgtctaagtgcccaacacagccctggtactttgttgaatcaggtggctgtcaagagctgctgcttcagcccggcatggtggcttatgcctataatttttgcactttgagaggctgaggcaggaggattgcttgagctgagaagtttgagaccagcctgggcagcagagtgagactctgtctctgtaaaaaataataaaataaaaattaaaaaataaagaaagaactgctttgtcttcaaggaaacaagatacacagtcaacagtcattatctttttagatatgagacagcttgacatggtgtggaagtggggggcttgcctgtagggaaagtatgctgatgaaaaagaaggaaaacagacagtagcaggaggcagtggggatgtgtcagggagctgaggagtgtagatctggttacttttgggcaagttacttctctaagcttcagtttcctcatctataaaatggtttgctgtgatgacgaaagagatgatgaacagaatgtgtctggcagaggacctgggctcataagtgagcacacagtaaaaggtagctaatatcattactgttccaattattgagctttattacttcctgtggctgcatgaagtagtggtttctgaatagaaaggcaacattctagttgcctagatcttaagatggcagtgacttcactgtagttctctgcaagcatcagaaacaagccctggcttatgtaagttagaaacagatgagaaagtaaataaagctgcagaagtgggtctcaggaaggacaggaatcaaagggctgtccctcggatgtcagactgcctttgcaagttacttcaggtcactgtgcctccatttcctcagctgctgagcaggggaggagaatcacttctccctccctgggatggtgcagagcacttagcagagcacttagcacagaggaataagcccttcagtaaaacatttgagtaaagcaattattatttattattcttcagggctctttttttttctggtgcattagccctaacattgactacttggttcaagagtgatggatgcattcatttcctgagcagttgctgtatgcctggcaccgttttagctgctggcgatccagcagggagcagaagagacaaaaatccctgccctcctgaagcttctgtcctagtggatgtcacacagtagtggggcaggct

SEQ ID NO: 45625 - DNA, 1050 bp, Homo sapiens
atcagggtcaggagctagagcaccaggacaaacatgcacagagcgttaagtgccaggtccaggctggcagtggtggatggggccacaggaatggacttctaggctgttcactgttgtatccccagcatcttaaactgtgctctccatatggtagctgtgagccctatgtgggtattgagcacttgaaaggaaattgatatgtactgtgtgttaaacacacattggatttcagagacttagtgagaagagtaagatatctcattatttatttatttatttatttatttatttatttatttatttactgagacagagtctcacctgttgcccagcctggagtgcagtggcatgatctcggctcattgcaacttccgcctcccgggttcaagcgattctcctgcctcagcctcccaagtagctgggattacaggtgcccaccaccacacctggctaattttgtatttttagtagatatggggtttcactatgttggccaggctggtcttgaacttctgacctcaggtgatccatcccactcagctttccaaagtgctggaattacaggtgtgagccactgcaccaggcctatttgtttatttatatgagacacggtctcactctgtcacccaggctggaatgcagtgatgtgttcatagatcattatagcctcgacctcccaggctcaggtgatcctcccacctcagcctcctgggcagctgggaccacaggtctgtgtcaccacgcccagctaatttttttgtatttttggtaaagctggggtctccctgtgttgcccaggctggtcttgagctcctgggctccagcaatctgccttcctcagcctcctatagttctagggttacaggcgtgagccactgcaccctgccaagttatctcatgaaccaattctttgatgttaattacatattgaactgataatgttttggatatattgggttaaattattaaaattaatttcatctgttttttctaactttatggctactagaaaatctaaaattacatgtgggttgaatcatattttcgctg

SEQ ID NO: 45626 - DNA, 1023 bp, Homo sapiens
tcttggtgacagcagtgggctggcagtgcagaggttcaaggccttggactgcaagtccactaaggtggctggtggtgtgggtggaggtggaaaaggcaggtggggcgagggtgaggggcaggacatcctggagagcctgaataaccaggtataagtgatttctttttctttctttctttctttttttttttttttttttttaagacggagtctccttctgtcgcccaggctggagtgcagtggcgagatctcggctcactgcaagctccgcctcccgggttcacgccattctcctgcctcagcctcccgagtagctgggactacaggcacccgcccaccacgcccggctaagtttttgtatttttagtagagacgaggtttcaccatgttagccaggatggtttcgatctcctgacctcgtgatccgcccgccttggcctcccaaagtgctgggattacaggcgtgagccgccgcgcccagccccaggcggaaattatttcaactgggtcctgagaactgggcacttttcaaggattgtcagcaaggagcaacttcccaaatatacatctaaaaagatgacaaactcatgtggaatgtggatttaaggaggaaggtacttgacttaagaattccaggattttggtggaagaaggaaatatgggccaggcactgtggcttatgcctgtaatcccatcactttgggagatagaggtgggaggattagttgagcccatctgagaccagcctgggcaacatagtgagatcctgtctctacagtttttttttttttttgagacggaatcttgctctgtcatcaaggctggagtgcagtggtgagatctcagctcactgcaacctccgcctcctgggttcaagcgattctcctgcctcagccttccgagtagctggagttacagccttgtgccaccatgcttggctaatttttgtatttttagcagagacggggtttcaccatgttggtcaggctgatctcgaactcctgaccttgtgatctgcctgcc

SEQ ID NO: 45627 - DNA, 1135 bp, Homo sapiens
gacttagaagatatttgcaatatttataacacattacaaaacactaatatctagaatgtatgcagaattcccaaaagtcaacaacaaaaagacaaacagccttatagcaaagtgggtgaaagataggaccatgcagtgctcatagaaagcaaagtagatggctgggcaccgtggctcatgcctataatcccagcactttggaaggctgaggcgggcggatcacaaggtcaggcgttcgagaccatcctggccaacatggtaaaacctcatttctactaaaaatacaaaaattagctgggtgtggtggcgtgtgcctgtagtcccagctacttgggaggctgaggcaggagaatcgcttgaacctgggaggcataggttgcagtgaacccagatcttgccactgcatgccagcctggacacagagaacgactccgtctaaaaaattaaaaaaaaaagcaaagtggatgataaatgtgaaaagattctgaattttgctaacaaagtcaggttttggagatctaatttctagtcagtaaaattcatcctttctaggatacaatgctaagagttttgataaatgcatagaactgtgttacactgttgtgtaattaccacaatcatggcttagaacatttccatcgttcacccagattccctcctgtcccttcacagccagtctccttctccacccccagctttaaccaacccctgagttgtttgctgaccttacagtgttgcctttttcagagtgtcctataaatggattcatacagtgtgtagtctctcggatttgtcttctttcacctggcataatgcattcgggacccttccatgttgttctatgcatcaggggtttggtagtttttattgctgactgggactctgttgtatggatataccactgtttgtttatctgttctccatttgaagagcatctgggtgtttccacaagatacatgtttcatgctttacaacgtgccagaaataggatgtctgactcaagtgttgacaaggcacagggtgttcagcagctccgctagtgagtgtgtgaggtcactttagagaccaccttgccagcaggtagtgaaattggaaacatgtgcagccccgttcctaggtaagattgagaattcac

SEQ ID NO: 45628 - DNA, 1025 bp, Homo sapiens
cagatgccccccagaagcatgccctctggaaagggagaggagcaggagggggcttcaggcatgctgggcctggggggccaccccctggcctttgctaagttcctggctggtctgagccctcttctttcctctccccaggccttgcaaaggccatatctcttccttttcatgactctggaaattccatacatactttctgcattaggaagacattctctgcatgctgatctcgttaaaaaggaaaagccaaggagcatcctgcacctccctcctgtaagcgagctttgcaaatggtaaactagatcctgaaaggcaaccacttaaaagcttttaatggcttcccattattagcttgagtgcctggtgcgtcagaggctctcagtgagcgtgtattgaattgctgaatgcatggtggccctgggcgaggaatctggccctcactgtcccaaggctgagtgcctttgccctgtggaggaaagcactgccttggggtcagaaataaggattggcaggattgcctggggttagaaatagtgatcatgggatcagaggcagcaggtgaatgtggggtgtgaatatttttgaaggcttggaatgaaatgattcttccagactttagaggatttgtgtctgcagattcttctctaaggtttgtgtctcacatagtgagagaatcagccagccagggaaatgggacaggattttgtctctttccccatttcctcttctaatgaactcctacctatgctttatgactgcattaaggggtcacctcctccaggaagcattccctcatctccttacgctggttctgagtgtgtcgttcctgcttgatcccctcccagcaccatgtgtgtgagttctcacagctcacaccccatagtattactatgttgtttctacagtgggttcctgtcaggggttccaaacttagctgtttaggaggatgagtagattgtacaaccacaccaggcgggcctgatcaaatacagtaagaagtgtccggattggcaaaccagcgggtc

SEQ ID NO: 45629 - DNA, 3434 bp, Homo sapiens
cccatgcgtattcttttttttttcttttttttttgagatggtgtttcgctcttgtcacccaggatggggatggagtgcaatagcatgatctcggctaactgtaacctccacctcctgggttcaagcgattctcctgcctcagtctcctgagtagctgggattacgggcactcgccaccatgcctggctaatttttgtatttttagtagagatgaggtttcaccatgttggccaggctggtcttgaacacctgacctcaggtgatccacccgcctcggcctcccgtttgtattcttaaatagtgtattgtttcctttacttcctttagagctttacagaaattccatgctgccttcagcttcctttgccgctctgcatcatgttggtaagtctctgctgatgcctgctgctgtagcttatttttcactgtgataatctgttccattgtgtgaactgaccacagttgattgatctgttctccaaggacatgtgagttgttcgcaggtgtccccccaccccctcccgatacaaacagtgctgctgtggacatttcatacatctggttgcctatgtcagaatttccagggtatacagctaggacgcagtactgctgttggattttcctgggattgtagactctcaaatttggaatggacttctatggccaagtagttcaccttcagcaatcatctcaaaagaaatgctcttggtgtgatggttgagagcgctgttctggaataggagagacacagacctgctgggcctttgcctcattttattacttagttcattatgcaatgaacttaacatctgtctacctcagtagtttccctgtctgtgaattgagtctgttacatatatatatatctatttaaatatatatatctatttaatatatattaaataatatatatttaaatagatatatatatattacagactcaatttaacccttagggaaatatatatatatatatgtgtgtgtgtgtgtgtatatacatatatatttaaatagatatatctatttaaatatatatatatatatatacacacacacacacatatatatatatatttccctaagggttaaataagatagagacctggtatggtggctcatgcctgtaattccagcactttgggaggctgaggcaggagagtcacttgagctcaggagtgggaaaccagcctgggcaacatagttggaccctgtctctacaaaaatgaaaaataaaaaaaaaaaaattagctgggtgtggtggcatgtgcctgcagtcccagctactagaggctgagatgggagaattgcttgagcctgggaggtcgatgctgcagtgagctgcaacagagtgacaccttgtctcagaaaaaatagagagagaaagatccggcatgtgtagagattaactcggagcctggaaataataaacacagagtaagtgctccctgctgttcgccttgttcctgttggtgtttaaagatcacttacacttgcagaggcagaactgatgcccaggagaggggcagtaactagcagaagggaaacagcccgggtccagtttacttcccctcaacgtgggccaaggacgccaggcaggatcatagtccggctggattgtggctttcctcaaggtgatcttgacttgcccaggtgggatttcacccccacttccttccaggcttcccattttagacttgaaatgtaggcctgttggggcctcctccagtagatgtgtgcccttgagcttggatacccccctgccaagatacgcctttcaaaaacagataaacttatcgcaactgaatagaaggggctcccaaggggtcccaccctgctccggaagtctcagtgaggaatcaatagctgttaattcctgtgctgccccctgcctgacattccatccacacttgaggcccagattgtaagaagggagagcaggcaggtctctcttccaggagagggacccggttcatcagcaggatttattcattcatgtattacgtcaggctcagcgcctgggctttttataaatgagggctctgctggcgttctgtgttattcagatattcggtgagagaccaccagaagccacaaaaaattgctgacatctgttggaaggcaatcatgcataatggataagggtgcactctgcagttccagcagcattgatttgaattccccctctgccgcttcaaaactctgagatctcagcgagttgcttaccctctagagcctccacgtcctcatctataaaactagaaaataagtggtactcactagatccttaccttgttgtgagagtagaatgacgtgcatgtagagctttcccagagctggcatgtggtaggtgctcaataaacgctggttattctctctctctctctcactctgttgcctaggctggagtgcagtggcgtgatcatagctcacaacagcctctgtctgccaggctcaagggatactcctgcctcagcctcctgagtagctgggacttgcaggcaagtgctaccgctcctagctaatttgttttattcttagtacagatggggtcttgctatgtggtccctgctggagtgctggttgctctctaactggctgcgagccccggggtaggcacactggtactggggctatagcaaaatccgtgctcggtaaatcatcattgaaggagcaagggtgctttacagttgtagaatctcatagtacacgttactttggtttttctcttcccagctctggagtcctgggatccaagtgtgagccccatgtctgcaaaatgaggctagtcacttgaatcctcttggatcttgctttcctcatctgttagtgagcttgtagatagctctgactgtcaccaggctttgctctgagcactctgcatctgtattcaacctgtatacttaatcttcacaacagttgaggtggttgatccatagtaatttctcgttgtacaaacggagaaactgaggcagagagataagtgtcttcccaaggttaacagctaaccagtagcagggcacgctgggatttgaaagactctctatgtgtcctaactggtatgctctcctgtctagaggtgatctcttcctccagggttccaggtagattggttgagatgtgcaatgcggaagagcctcgggataagtcggctaatgacaccctcaggctacccagccctcgggagctcacagcagagcagttggggatgccttgcaaggttacctgtgccagagttcctggggtacatattaaataggtaggacccaatactactttgcattttcctggaatcctagactcttaacattggaaaggatttctttgccaagtaattcgccctcatcattaacctctaagaaatgcagaggtggaattagaaggtgcgtgtctctttcttttgcaccacagattctatcgagtctcatctggcagct

SEQ ID NO: 45630 - DNA, 1051 bp, Homo sapiens
tacacatttcctagggtgcttgggtgaagaattagcaagcagtaactgaagaccagttactggtcaggcagggaagcccaagttctggcccctgctgactgtgtgactttgggctgagcagttggcctctctgagtcttaggttttgttttttttttttcttttgtgtttttgagatagagtctcgctttgtcgcccaggctggaatgcagtggcgcgatcttggctcactgcaacctctgcctcccaggttcaagtggttctcatgcttcagcctcccgagtagctggattacagacatgcaccaccatgcctaactaatttttgtatttttagtagagttggggttttaccatgttggccaggctggtcttaaagtcctggcctcaagtgatccgcccgccttggtctcccaaagtgttgggattacagacatgagccactgcgccgagcctgagcctcagtttctgatacttgcaactgggagcatgttttgagagctagagaaagtattgttgtcttgtgtaacatgaaaaaagctgtgcggatactagctaagatcaatgaaaggttatcaaactcaatctgatggtgaaagaagatacagagatcaagcccgtccgcatttttaacgtggggacactgaggcccaggaaacttggggcttcttcaagtagtagctaggcctgtgctgtcccatatggtagccgctagccactagccgcatgtggctattgagcagtcgaaatgtgcgaaaattcaaattaaaatatgttgtatatgtaaattgcacaatggattataagactcagtttaaaaaaaagaaaaaattcataacaacttttgaaatattgattacatgttgagatgataagatttcgatatactaagttaaataaaacattaaaaatgaatttcacctttggtttctgcttagtattttttaatgtagcaactagaaaattaaaaattactgccgggtgcggtggctcacgcctgtaatcccagcactttgggaggctgaggtgggctgatcacgaggtcagaagatc

SEQ ID NO: 45631 - DNA, 1068 bp, Homo sapiens
tttaaactctcagagcttcagttgttctatctgtaaaatgagtattgcaatagtgcatgcttcatagagctgttgtaaggattaaatgaattagtgcatataaagtgcctagaatagtgtctggcccgttttaagagctcagtgagtcttggttgttgtagttgttactttagtggttgttttttagaacctgaggacacaaggatggaaagactcagtctgtctgtggcaaaccacgaaaggaaagattaaacaattcaatgcaggctgggtgcagtgggtcacacttgtaatcccagcactttgggaggccaagacgagcggatagttgagatcagaagttcttgaccagcctggccagcatggtgaaatcccatatctactaaaaatacaaaaattagccagacgtagtggcgagtgcctgtagtcccagctactcgggagactgaggcacaagaattgcttgaacctgggaggtggaggttgcagtgagctgagatcacgctactgcactccagcctgggcgacagagcaggactctgtctcagaaaagaaagaaagaaaaaataaattcaatgcagtgattattagaggggtaagtccatcgggacaaatcagggggcattcccactgaggcaggacttgagatgaatctcggaagcagaaatgctgagcttgttgggctggccagagataagaaggacattgtgggcgggagaaacagcacctacagggctgagatggatgaaagctcagttcagtctgggaactgcagaaactcagtttgcctgagcaaactgcaatgtggcaagtgggaaatgaacccaagctaaaagaggacagcagctgggtgtaaattttgtcctgtaacccatggagagccaagaaggattttgagccagggagtgacatgattggatttcatgatcagatcattctaactgctttgaggaggttgtcttggaaggaaagcaagagtctttggcaagaagatcaagagaagaaagattgctatttccaaagctcaagtagtgtatttttcattgttgttgttaaagttcaaaagtc

SEQ ID NO: 45632 - DNA, 1031 bp, Homo sapiens
acatttttaaggctctcaatgcatgttgttcagttgtttccccatttggttacaccaagttacagtcacaaaattacaccaaatattttttcctccatggagttgctttctcatgaaattgggtttctgaggccaggaagacttgggtcttgttgaggtgaaggggataattcttcagcatttgtcactatttttcactatcattttgagtttgatttaaatagcacagtttgctgcgtggaaaatgagagtagctttgaaggggcacagctttgaagggcacacagtagatgatgacatctacttcagaactctggctgctacgtggggtacgaccatgttgcattttcaggatgctttagtggaaatcaaaagcatgggatgcgaatgcaaaaccaaagggcttaggttctgcatctgacatatgtggctagctgtatgttcctagccgcgtcactcaaccttgctcagtacataccttcttcatatggcgtgcatctcttcctcagctatatgggtgtcctcgaaaatgctgagcataagaaaagtgcatttgtatcctctttatttatttattatttatttattttttgagatggggtcttactctgttgcccaagctggagtgcagtcgcacaatcatggttcattgcagcctcaaattcctgggctcaatggattctcttgtcttagcctcctcagttgctgggactacaggagtgtgccaccatgcccagcttttttttttttttttttttttgatagtagagatgaggtcttgttatgttgcccaggccagtttcgaactccttggctcaaacaattccccctcctctgcctcccaaagtgctgggattataggcatgagctaccgctacacccagcctatcctgtttacctacaacttgccagtaaccttgggcaaattgcttggcctcaggatcttggttttgttttctgtaaaatgggaataataataataataatagtccctaattcctaaggggattgggaaggttgaacaaagtgct

SEQ ID NO: 45633 - DNA, 1057 bp, Homo sapiens
gcactttagttcttcaggctggttgtatatggctggctagattcatcgtttggaatcttcagagtcagaagggacccatccaagtttgtcactcaatggatgacaaagtaaggctccagatggtgagtgtctattttggaatttcataactgtttccatttgtgtgtaaaggaggataacacacacagacttacatatacacacaagcatatttgcataggctggatttggaagggtgcacaaagaaaatggtcatagtggctgttgctaagaggccacccgggagctttctggggccaggagagaaacttagccttgactgtatgacttttttacagtcctgttggaaaattttaccatgtgtatcttttagttcttcaattaataagcaatgagttcttaaaattcaccaggtagtaaaagatctttgaaagccaatcctgcttcttaatgcaaggaaagaatccctgggagtatgcaaaatctctgttggttttgtagctgtctatctgaactcacgtgccctggatcctggccacagggctttctttttctttctttctttttctcttttttttttttttttttgagatggagttttgctcttgttgcccaggctggagtgcagtggcaccatcttggctcaccgtaatctccgcctcctgggttcgagcgattctcctgcctcagtctcccaagtagctgggattataggcatgtgccaccatgcccagctaattttgtgtttttagtagggacggggtttctccatgttggtcaggctggtctcgaacccccgacctcaggtgatctgcctgcctcaagcctccaaaagtgctgggattacaggcgtgagccaccacacccgacctagccccagggctttctaacactcacatggactgtctgctgtctcttgctggcctcccagtctgtctccagaatatgttagactgagtcctagacacttagcctctggtcccctggcagccaactgctcctctggttcaccccctggggctccctgtataggggagccatcagcctgactgagcag

SEQ ID NO: 45634 - DNA, 1985 bp, Homo sapiens
atcccagcactttgggaagctgaggtcaggagttcgagaccagcctggccaacatagtgaaatgctgtttctactaaaaatacaaaaaattagctggacgtggtggcaggtgcctgtaatcccagctactagggaggtcgaggcaggagaatcacttgaacctgggaggcagaggttgcagtgagccaagatcacgccattgcactccagcctgggcaataagagtgagactccatctcaggggaaaaaaaatgcatattgcataaaataaaaccttatatatattcacacacatgtgtatatatgagatggggtggtcctgtacatgacagctatggttttaaggccccagtgcctttaagtttgttcttgaaatggttggtagccagttcttctctccttggcttcccagaaatcctttccaacccaagagcgtcagaggtactttaagtaagcaagactttcaggtgttgcttctctggcctccctctttcacatctattctataaaaagagggtggctgctcagcccaatgtaaagaaagcgctttctgaagttgaatgagttttacatttcagctctgccagtgtggcagtatgaacttgagaaagagacatcccctctctgacacttaatttcccatctgtaaagtgagatccacaattttacctttgcgggttggcacatggactggagacaatattggtaagatgctgtgttcatttcctagggctcacattacaaattagcaatgggctcctttcaacaacagatatttattctcttgcagttctggaggctagaaatccaaattcagggtgtcaggagggccatgctccacatgaaggctccgaaaaataatctcttcttgcctcctcttggttttggtggttgctggcaatctctggcttgtggctgcagcaatctgcctccatctttacatagccttcttccctctgtgtgtctctgaattctctcttcttgtaataatgccagtcattagatccagggcccaccctgatccagcagaacctcttctttacttaactaattacctgcaaagaccctatttccaaataaggctacattctgaggttctgaatagacatgaattcttgggagcaatcaacccagtacagatgtctggcattttattgcagacaacatctgggcagatgacagcatctggtatttttatgattgtcacttaccagaggtatggatagacatttcttgaagaagataggagcaagcctgattatttgaggaacacgagggccagatagcagaagtggagggagaggtgtggttggcttggcaggtggagaggggcagggatggaagcaaggagcttgctatgtgggggtgtgggagtggggttggggaaaccatattgctttatttcaggagagagtgatgtggcctgtgtcttggtggtagcaaagaaagcggagagaaaaacgtagattttacatttatctgggcaattgtgccaataggacttgcacacggattggatatggaggtgagaaaataagggaatcaagaatgactcctacgagtcaggctgggtggttcatgcctactatagtcctagcacgttgcggggctgtgatggttaatactgagtgtcaacttgattggattgaaggatgcaaagtgttgtttccaggtgtgtctgtgagggtgttgccaaaggagattaacatttgagtcagtgggctggggaaggcagacccacccttaagctggtgggcacaatctaatcagctgccagtgaatataaagcaggcagaaaaacatgaaaatgcaagactggcctagcctcttagcctacatctttctcccatactggatgcttcctgccctcagacatcggactccaagttcttcagttttgaggcttggactggctctccttgcccctcaaacttgcagacagactattgtgggaccttgtgatcgtataagttaatatttaataa

SEQ ID NO: 45635 - DNA, 2270 bp, Homo sapiens
atggccactagtggtaggggtagaagttggggagctggaaaaggtgattacaaggagccactggtgaggcagaaaaacatgccgggagcctagagaaggaagaccttcttaaggaaggaggagagtcatcacttgcaatgttgctaagaggtcgggtagaatgagtcacacagaagtgactgttagatttggcatcaaggaggttgttgactaacttggcaagagcgcctcatgggagcaatcaagaggaagccagtgaccaatgaaggtgactgctcttgcgttctgctctctcttcattgccttttgctctttgcttaggcaaatcagtgtcttcagtaggttccttgaaggctaatgtcaccattagtatttacctacccattagctcatttgattctcaaaacaacatctttgcagaaaaggctgggcagggcaggcaggtattattcccattttacagatgagaaagccacaacttaaaaacgtcaagtgtttttttttcaggctgtttcttaaaagtaagagttatgtgtcaggcacccctcctccacccccatctcggcatacatcccagtgttttgtggtttgctacatttcttggttttcttagctagattgtgaacccagtgaagggaggatctgaatgacatctctatattcccacgcagagatagcaaatgcttgccacacttgttactttctcttgggtacccatggcaggcatcactagctgatcatgaccttctcttcctttgagcccagactcagcttagaattctacccagcattccagatagcctgtcaacctgctgacagataaggtatcatcaacaggcatttttactgtagtacttaatgtcatgcctggttcagcaagtggttttgtgactgatttagcaaataagcattctctgaaaacacagtgagtgagttctatgtcactagaggtaatcaagaagagatcaaattcatgcacatggccgggtgtggtggctcacgcctgtaatcccagcactttgggaggccaaggcgggcggatcacgaggtcaggagatagagaccatcctggctaacatggtgaaaccccatctctactaaaaatacaaaaaattagccgggcgtggtggcgggtgcctgtagtcccagctacttgggaggctgaggcaggagaatggtgtgaacccgggaggcggagcttgcagtgagctgagatcgcaccactccactccagcctgggcgacagagtgagactctgtttcaaaagaaaaaaaaaaaattcttgcacaattggataaggtaaatagaattcaggtattgggtaaaaggttatccaactctgagattatctgatattcatggagttatttaatgaacagtagtatctcttaccattctggaacaaaacaagaaacctttgagaggaatctccccccacctccccagatatataggaggggacagtgggcaacactattatggctcctttcttgttgtcttggccacttggggctctggtctcagcctttctggattgccataatctgttgggccctatggagccaaagggagtaaacagaatagtactgttctgggttgttgagggattcggtgagattccctaggtaggttttggtcaacaagcaggcatttcataatcctctctacctcctgccctgccctggggattgtgaggattgtctgcattcctctgtggaactggaatgtggctgcagtgatggtgtctgcagagatgttgaagctgctcctctctcctgccctctatcttggcctcgcccggtcctagccggggtaagtgaacatcaatcccatggacagagtcttctctgaaaactgctttatggatttttttttttttcccagacagggtcttgctctgtcgcccaggctggagtgcagtggcacaatctcactgcaacctcagcttcctgggcttaagtaatcctcccacctcagccacccgagtagttgggactacaggtgcatgctatgatgcccagctaatttttgtatctttagtagagacaaggtttcaccatgttgcccaggctggtcttgaactcctggactcaagcgatctacctgcctcagcctcccaaagtgctgggattacaagcctgccttatggatcttaatgtcttggcccgagggcattggctctgcctggctccagagggatatgaagccattcctgggggacaccattgttttctagttaatattatcagtcctgtagtccagtgattttc

SEQ ID NO: 45636 - DNA, 1042 bp, Homo sapiens
aaaggcttaaacataagacctaaaaccataaaaaccctagatgaaaacctaggcaacaccattcaggacataggcatgggcaaagacttcatgactaaaacaccaaaagcaatggcaacaaaagccagaattgacaaatgggatctaattaaactaaagggcttctgcacagcaaaagaaactactatcagagtcaacaaggaacctacagaatgggagaaaatttttgcaatctatccatctgaccaatggctaatattcagaatctacaaagaacttaaatttacaggggaaaaaacaaacaaacaaacaaacaaaaaccccatcaaaaagtgggcaaaggatgtgaacagacacttctcaaaagaagacatttatatggccaacaaacaaatgaaaaacagaaaacaaaaaacaactcatcattactggtcattagagaaatgcaatcaaaaccacaatgagataccatctcatgccagttagaatggtgatcattaaaaagtcagggaacaacagatgctggagaggatgtggagaaatagggacgcttttacactgttggtgggaatgtaaattagttcaaccattgtggaagacagtggggtgattcctcaaggatctagaaccagaaataccatttgacccagcaatccaattactgggtatatacccaaaagattataaatcattctactataaagacacatgcacatatatgtttatagcagcactttttacaatagcaaagacctggaaccaacccaaatgcccatcactgatagactggataaagaaaatgtggcacatatacaccatggaatactatgcagccataaaaaagaatgcattcatgtcctttgcagggacttggatgaagctggaaaccatcattctcagcaaattaacacaggaacgaaaaaccaaacacagcatgttctcattcagaagtgggagttgaacaatgagaacatatggacacagggaggggaacatcacacactggggcctgttgggggatggggggcaaggggagggatgg

SEQ ID NO: 45637 - DNA, 1026 bp, Homo sapiens
aaaggtgagcaaatgcttgtatacaggctgcagagggttaggtcaaggctgaaccatgtagtctaaattttggagtgactgcagtgaagcccctccatggtggaagaaaatggaatgtccttgttggagctggccagaactgggcagatccagaggctggaggtaatggcaataactctgactgctaataataaaataagaacgtaaaagagtgcttacagtgtgttacaggcactgctttaagtgcattacgtcatttagtttccacagttgtctccatgttacagaggagaggactgaggcacagagtattacaataagaaacttggcccacagtcagcgagcaagaaagcctagattcatacctgggcatatggcttcagagtccacacgcttggcgcctgcactgcaccgagaggggctgctgggccgggagtcccccacctgctctctgttttcaaactccccatttcacacccatgccaggtgtgatgaaatcctctaggtgatgggcagtggacatgagtggttctggttacagttggacttcactggcctgtcccacacctgaggatatggattctagcccatgggaccataagccaggccccctgagggtctgttatttgtctgggaagtggcagcgctctttggaatcttgttcatgactgacaaacacccccacgccccttcagccataattatcacctagtccccagagaagggccatgggtgggctgactgtagagatagacgcttgggtctctggctgggaacaccacatgcaagagaagaggccatgggctcgccttccatccagctgaagtctttctggccgggctgcaggcttcatgcaacacctttcaacctgtaaaaggaaaaaagaaggccgggggtgggcctcagctgctgccactggcattgtatcactgaagcgttttttgttgttgtttttttttttttgaataccggaaattaaggggaaattcggaaacctcataatggcttcatgaaccattgcacttg

SEQ ID NO: 45638 - DNA, 1050 bp, Homo sapiens
cactccagcctgggtgagagagtgagatcctatctcaaaaataaaaaataaaaaaaaaatgaaaaaaaaaataaaaaaaaataaataaaataattaaaaaaagagctgggacttgaagccagataataaggcaggcagagggcatacgaaacacccagatgggtcatgagcccgtgcatcagtcagggtctaatggctcagctgaggaagggaggtttaaggaagagactgtggacagaggtgttagggaaggtgtcagagaaggttaaggagccaacatggatcatgggggtggtacagtgttgccagggctggggaggattggctgcagtgtggggtacccagccgctgccatgtggagagggacctgtcactcctgctgtgaactctcccttcttctgccctctgacctcctgctggtgcctcccattggctaaacacagttgatggccagtgcactggggagctgttcttggagcccacaggcatctgcttcttggcacagagcagacaatggattgagtcgggagggaggggaactagagaatacccaagtcccaatggctggagaggagtgagcaggtaaagggggtagaaggtgaagtcagagaggccggggtccacactacacagggcctttggctttcttcggaaggagcaggaagccagtggagggtttgagcagatgtgtgcatcacggccactgccatcaggagaacgtctttctctatgctaggtgtgaacagtcaccccttcctctccctttctcaggatgagtgctgaggaggaaaaggccctttcctccaatgtcttcagaggagacgtctgcccagtccagactacgtgcctcatgccagccagcctgtaaatgacaggaaagagaaaggagcagtgtctcaaaagaggatattctggaacgtttgataatcagagcccattgtaaagtcatgttttgagttacagcatttaaatctttgttccagtggaaaacttttacaggccgtcctgggcaaggcttgaatcctgtttggatctccaaaggccttaaaa

SEQ ID NO: 45639 - DNA, 1034 bp, Homo sapiens
aatggcctaaatgaagagtgttttctcaagtccctatagaagagggagatcctcatggctttcaaggagtcatgcccaagatacaggaatggctctctggtggactggctgggacagaggggagagggtgaaagtggggaggaggaggaagtttaacagtatttgaagcatttgaaagcctagacccatcgtacgctgaaacagagaagaatggctagccaaaaatactgtgtgagtctaggaacttaagaatgctagtccttgaccccaaacatacttatatagcagactcaacattattgtcttccacctaccggatgggattatgcaagtgatatgacccagagcattctggaagccggcaggggcataaataatacattagatatgcagatgaactgcccagggtgtctctggtcttgggaagaattcttagtagacctgagataattgcagaacagagtgtcctgttttcccatccacagcctccaggcctggcgaggattttgtgttcaaaagagatttccaaggtggacatctctctgacactggcgatttttctctctcacttgaacaaaactcggcggaaaggtcactcctatttgtcttagcttctctgtcacatcccacccacactttgaaaggtctgttcttagcggggtcccaggaaggctgtgctggccctgtcagccctgagctgggtggtagtcctttatcagagatacccatgagaatcactcaccctggagcctttcccaagcacacatcgtggacccctccagggctgcacatgtgctttgtaagggctcttcaggtgactggagctttaagagctactgaactaagtggtaataaaagtgaacaaagtaaccagtctggaaatgtcagtagaatggaaagaaagaacaggtgggagagttctccattttttcacggtaagacccggttacttggcttttgttgagtccctggtgggtgtccatggtgtctttggccttatctccctactaaacaggattacctgtgtggggcac

SEQ ID NO: 45640 - DNA, 1144 bp, Homo sapiens
ggcagcagagcctttccataggggtgtggtgtgacctgaatgttgggcacgtggtcgtaactgagctttaaaagtgaatgagaggagccatgcgtgatggctcgagcctgtaatcccagcactttgggagatcaaagctgggggatcacctgaggtcaggagttcgagaccaacctgggcaacatggtgaaaccctgtctgtactaaaaatacaaaaatcagttgggtgtggtggtgggtgcctgtaatcccagctactcaggaggctgaggcaggagaatcgctccaacctgggaggcagagactgtaatgagccaagattgtgctgctctactctagcctgtctcaaaacaaaaaacaagaaacaaaaacaaaacaaaacaaaaaaacactgtctcaaaaaaaaaaagtgaataaagagagaagaaaggcggggcacgatgctttttaagtctacgagcatcttatagcattgtttacatcccagcttttcactgacccttcctttacccccgcccccatcccgtggcccttgctctgtcctgccctttctgtacggcgttttctcttcccggctcctctgcccccagccccacgtgccaacttgtttcagcctggcaaggaggcctgctggtatcccagccatttcctgccccaaggccgcccaccctcctccgatctagcatggccttgccctccgtaggcaggcctcacccctgcggcagccgggaagcagggctcctgttttgcctgtttaccctggcgcagggacaggtagatcatgtagcactgctgggatgccagctgcgtaagtctccggcagtgggcacaggcggagggcagggggcattcctctgggctgactcgagcccggcctgcctggcacaagaccccctgctcctggaggcagctcaggggcttgctcatggctgccctggctctgcgctgggccgctgagtcatcgctcagcagtgaggcctctgagtcacagtgcagccctggactggacagtgagtgccttgtgggaccctcctgggctttcctgtccctcagagcatttaaaggggtcccaaattgtcatgtgaccctctctgatgccagagagacactctaggtctttcgcgccctggtcattttacagaac

SEQ ID NO: 45641 - DNA, 1081 bp, Homo sapiens
ttcagttcaagtcagcagccgagttacaggaaagcagccagggcaatgattcagcaagtccaggcaggagtgaaccaggcaagatttcgggaggagagggctgggtcgcgtgtcctggcagggccacaggaagagcatacacatctcctgcgtcttcgtattttgtgagtgtcttgaaatgaccttgagaatctacgcaataccatgaagaagcaggagcaggaataccatttatccattggcacagggtagcatgctcagtgtgcactgaggttgtgaattcttgtcctgacccaaagatgctgatgctgtccttatacccatttcacggttgaagaaactgaaggtgtagtaggagaagatactgactcagaggcacagagttagaaagcagcatgtctgggatttgaccccagacctgtctgactcagtttactattttaaactacccgattcaagttaagtttctctcctctctctctgtctctctttctcccacgtggctgctggaatcttccctaaggaccatagctgtctgcagtgcaggaagccaactattaaggggaaacaaaagtgttcttaggagtcctgctgtcactgtggattgagccggtgaagccctgagggatttcatcgctgaggtggatggagaagcagctgggggccttggctgtaaggacccctaagggttagtgtctggagcttgggggatgggaatgggtcccggtgtgcggaaattggatggctcgctgaccccaaggggaaacccttgttgacgctgtaaagtgtcttctggccttagagaaaccctctagggttcaggttccagcttcaccctcctttagtcaggtggctttgggggggacatttctgctggccctggcagacactggactagagcagtgtttctaaagtgtagccccttctctctcccgggaagggagacaagtgggtgaggggattggaatctgcattcataacacactccccaggagagactggagagcacctttcccggtgaactcccgtcatgtcaggcctcagcagactgagcgggaacccccaccagcgaggttgctca

SEQ ID NO: 45642 - DNA, 1356 bp, Homo sapiens
agtcaccactccacaggcaatattaggggttgctgaggcagcctccaatagtgtgagcattctaattactgcagcaaactcttttaaaaaaattttaacttttctggctgggcgcgttggctcacgcctgtaatcccagcactttgggaggtcgaggtgggtggatcacttgaggtcaggagttcgagaccagcctggccaacatggtgaaaccccatctttattaaatatacaaagattagccaggcgtggtggcaggtgcctataatcccagctattcaggaggctgagacaggagaattgcttgaacccaggaggcagaggttgcagtaagctgagatcataccactgcactccagcctgaaagacagagtgagactccatctcaaaaaaaaaaaattaacttttaatttttattttttagagacagggtctcgctttttcacccaggctggattgcaatgatacgttcatagctcagttcatagttcatagcttagacctcccaagctcaagagattcttccacctcagcctcccacaggtgcacaccactatgcccagctaattttaaaatattttttgtacacatgaggtctcactatgttaccaggctggtctcaaactcctggcctcgggcaatcctggactccccagatgctggaattatgggttgagccatagcctgcagcaaactcttaaaacatgaggggaactatcttgttataaagttgcttttctttgactactggtgtggttggccagcttttcatgtttatggcttatttgtgtttgttaactggtcatttcctttggggtgttagcaatttttttctcattgatttgtaagatctgtcttgattaacttgtgaattttgcagatggtggaaccggggtgccccacagtaagtcccctttgttaggcatcctgtccctggattcgacacctccatttctatgggggacatttctttacaaatctgcatctgattgtgataccaaaccatgctttgcaagtgaatacaaggatctaccccattaatctgggcagttgctagttttatttatttatttatttatttatttatttatttatttatttatttttccgagaccgtgtcttgctctgtcacccaggctggagtgcagtggcatgatctcggctcactgcaacctccgcctcttgggttcaagcaattatcctgcttcagcctcccgagttgctgggattacaggtgtccgccactgcgccagctaattttttgcatttttagtagagatggggtttcactatgttggccaggctggtctcgaactcctgatctcatgatctttctgcctcagcctcccaaaatgc

SEQ ID NO: 45643 - DNA, 1035 bp, Homo sapiens
gacaaaggccgggctgttgggatggtaatgccctctgggctggccttgattgaaggtaaaaaatgaacttcgaggatagcccctgtggctgtgcagtctcattttttatgcagatatgttgggggatgcagagacatggtggcgggtggggtggggagaaggggactgggaaatctgagacctgaagctaagatctgagatgtcatcctttatggagcatctccggatgaaaatgtcccagaggccctaggtcactcaccctctgccccctaataaaatcactgttgctgcctcctgctgaatctgaagtatgccttcactgagggcaggacgtccatctcaactattatcaaaggaaaacataacaagaggcaacagcacagcccccggggcatgaggctccttcctctgtgatccctctgtccttgtctgccagtgtttttttccttgacttttaaaataatctttttcttattatgaaatagatatttattttgcttaacaaagaattctgtagtccttctagaagctaggtaactcttctaagtcctttgcaaatattaagtcatttaatttaatcctagagcagttctgcgaggtggtgggaagacctagagaggttagggtccaccttagcactagctctctgagctataaggcctcagggtctgtggcattccctactcactgaaaagaagggaatttaaaacatgagttccaccacccagaaatgaaacagtgttcatttccagaatccaggcatatggttgattttaccaatttcctgtcacttgaatcacagttttttttgtttgtttgtttttgtttgagatggagtctcactctattgcccaggttggagtacaatggtatgaacttggctcactacaaccccgacctcctgggttcaagcaattttcgtgcctcggcttccagagtagctggggttacgggtgcatgccaccacacccagctaatttttttgtatttttagtagagatgggttttcgccatgttggccaggctggtctccaa

SEQ ID NO: 45644 - DNA, 1845 bp, Homo sapiens
gagacagggtgtcaccatgttggccaggctggtctcgaactcctgaccttcagtgatcctcctgtctcggcttcccaaagtgttggggttacaggcacgagccactgtgcctggtggacattgggtctttttagatgtcattacttaagatgatatcatattggattagggtgggggctaaagccaatgacccatgtcctcagaggagaagagagggacataggaaagaaggatttgtagagatacagggagaaggccatgtgaccacagaggcagagattagagtgacacagctacaagccaaggagctccaaggattgcaggaagccaccagatgccagaaagaggcaaggaaggatctttcatggagccttcagagggagcacagtcccgctgacaccttgatcttggacatctagtccccagaactgtgagagagtgcatctgctgatgtaagccacccagtttgtagcaatttgttatggctgccctcagaaactaagacagtagccaacacagaaccaaataccctttggggattgagggaagtggagcgggagaatgagcggcactccctccctttacataggactacttggtaaatatttactgaatgaaggaaagctgaagtatctgtagaactggccatttcattctgcatttagagctctgggagctcttgaaatgtctagacaaacatcctcttcagctagaggaagctccttctcccacttactagctatgagatcttgggcagatggcttaacatttctgggcctcagtgaccttacttgcaaagttgtctgggtcaaggcaatgattaaatgcgatgatgcatgtaaagccccagcatgcagcctgaaaatgtgagcccttattatttatactgtttgccaaagtggtgagtagtgttgctgaatatgccgtgtgtcctattaactctgtgacggccacagtcacgtctcctttctgcctcctcctcctcctcctctctgtccagtgactagggagggcaggaagttcagagggtgaaatgctgaattaattcctgtcctcctggtctatattccagatcaccctgtgggtgggttgaaaaccatgccctgtctacctcctctgcaaggaaaaaataaagacagagagcaaatctaaaacacgcaatgcagaggaatggttactgcctgctgtgtgcctctccagggagcaccaggaggggctgtgtgggacagggacactgcgtataagtgacactcctccacattttggcctggagttagcacatacaactgcctttttgctgacgcgatgcccaggagccctctcaggggatggcaaatctcagaataaatgtgttttttactcatggaatgcaggggaatggatatgaaaacttttgtatcaaatagacattagcgaggagagggatgcttcacatcctaggtttgtgtgatgtcggcacagctgatgaggtctttgcaaattttgctgctgaggaagggatgcgctggactcccagtgtccaggggccctctgcttgtctgtccttaggcagagtccaccagaatcgggtaaagtatgtgactgcctcttagtgtagggcatgacgtcaactgtgaggagaagagatcaagatacagctctttggtggtgttttttgacccatatccaggaactgttcccacacccagagaggaatatctgcaagttctggtgccagatgttgattcaaaaacaaaacccagcgaagcatctgtacttttttttctgattgtattagaagtacagtccacaataatatattgtacatttaaaaataactggctgagcgcagtggctcacgcctgt

SEQ ID NO: 45645 - DNA, 1060 bp, Homo sapiens
ttctaacttctggaagcacaaaagtgtgtttatccttcaggagcattcttggctgctgaaaaatcatcatggctagctttcactttcacgtattgagctagtaggtggtatcaatagtagctaatatctatttcatgtttttttgtgtaggagggacccggcgtgcaatttgcatggattgtctcattttatcctcccagcaggtaaaagagctgggagggagtaaagggagttgttaatttctgagaaggaaggtgaaacttaggaatgttaaatacccctcttggtgtacacagtatgcaatggaggcagggtgcaaatgtgctatggagatttcagagcctgggcttcccagaggaggcctttgccccacagaatctttgctccatttctccactttgctgcctctatgaatcaatgattctgtgttgtccatttttcctttgcaatcttttgccatctcttcattaaaaatggtctccatcattctggccaagcacagtgactaacatacaataggtgtgcagtaaatgtctagtggatgaatacccagtgtgaacattaattgagcaccactagctgccaagcagccaagcaccctatatctgggagatgtagaatttaaggctgtgtagtcactgtcctcaagctgctcacagctttgtgtaagacactcaagggaacatgcaaagctcagggcagctcaatttggggcgagggttatggagaaaatacagtctgcatgcttttagtacatgcagttctgcatcttggggtgcagtgctagagtgaatgacacagtagaggtgacaggcttaggatttaaatttgataatgtcatgatgccatgggagcactggagaaggggcagcagtggattcagctgagagtcgcaaggggttaatgagaagattgggaaaggctgcacagaggaggagaagggctttgtaggatgagtagaggttcaccaagggtgggtaacagttagaggaacagcaggtacagaagcccagaggagaatcagtgaatgacacatccaccatgtccagagatcagggat

SEQ ID NO: 45646 - DNA, 1033 bp, Homo sapiens
tgcaggaagcctactgatctttgagttttggcctgccacctggcccttccctcgctctgcagtcttggttggcctccaggtgtgtgtgtgtgtgtgtgtgtgtgtgtgtgtgggtgtgtggccctgggctgcactgtgcctgctggagcaggtgcagttgccctttcaccatgcgtgcttctttggatgtgaccccttgggtgcctgtgtatttagagtggaggaacgtcctccactataatgatgagaagtgtcattgctagttgcactcagttttctatggtgtttgggggagaaattggggtgctggattttggttttaactctttcccaccttaaccagtgactgtggaaagttgcacatcgtccccttcctcacagctggggtctgttcttcctccgggtgttacggtttgtgagagccaggagggtacacagaggtggcctgatttctggagccatagcaagaagggagaggtgtgtgtcctctctgtctctgtctctgtctctgtctctgactctgtctgtctctgtctctgtctctctctctctctctctcttctttctccctctccctttttcacatgttgttttctgattataagaggaatacttcatcattagacatatttcgagcctccgttcctcatctatgaaataagcatagtaaaggactgaaggatttaaagggatgtggccaagtgtgcaaagtcatatgtgctcaataatttattttccttgttttcttttccatttccttcttctcctctaaggcgctccacatctccgtgatatagcgtgtactcctttcctcattttcttttctctgagacaaagggaagttcctagttctgctatttcctagttcagtgaccttggacaaggcaccctggggagccttagctgctcatatgcacaagcttctagcaactgcttccaagggaagggtggggaggaagggagaccctgagtgtttggaccccgcctgtgctcagcacagaatggagctcagtaagggcaggtcgtgggctcc

SEQ ID NO: 45647 - DNA, 1030 bp, Homo sapiens
ccatcactcgtattcttttttatctccaaggcctcatgctggaaagagattgattgctctctgagcagtaagtcctctgaaacagggtttctctggggagttctgtggcacccctgccttacctgggggacctggcaaagaggcaccctccaccccccctcaccctcagccaggtttactgaacagagttacggggttgggcctccggatctgcattggagcaagtccacaggtggtgcttaggcacactcaggtttgagagccactgacctagaggggaagactgggagaagccttttaagagaccagtactgtgacttgcaccatggagacacctggaaaacatacagtgattcacacacacgccccaaacagcagtgtgtgtgtgtgtgtgtgtgtgtgtgtgtatgtgtggtttcacacttggtttgctatgaatgctgtaatgccacccagttcccacagagctctggggactcaggttccccaagtcagggttcttttctggagtgctattctgacaggtttttatttttatttttttaattattttattttatttttattttattagtattattatatctgacaggtttttaatacagtgaatttgtatgtctcctgtgtatttattttagctgctcccttctttccccttctctccctttcctctcatctcctcccgctttcgtcctttacctttccctggatgatattagcattacccgtacactcttcccatctcctggcccctccagttctgaagggatggggactaagtgggatctgtcctctaagcaggcggaggagggaaccatgtcagctcctaggtgcccccagagcacctgctgccagttttccacaactcctgtcctccgtggcgcttgggtgacagcagagcagagccgatgtgcctgctcctggtcatgggctgttcgtgctgtcatcgctttcatttgccccatccccccaatttggacttacccagaatccttgggcaagctagatggctgccaaagtttacttagcg

SEQ ID NO: 45648 - DNA, 1050 bp, Homo sapiens
gattggcaaactttttatatcaagggttaggtgacaaatgttttcagctttgcaggccacacagctctgtactgcttgtcagttctgcctttgtatctggaaagtagccatagataatatgtaaatgagtgggtgtggctgtgtgccaataaaactttatttacaagaactggcaataggcctttaggctgtagtttgtccttggcctaaataaaggaaacatgtttgtctttcaaaggcagaaactcctcctggatcataaacattgaaaaaaaaattgttacaagatgcaatatttctgtgagacttgttaagcagtatatgcgcagtgctttcattaggattttacagaaaacttagaagatggccttcacatggctagtttccttactgttcattcagcagacatttactgagggcttactatgtcctaggctctgatatccatacatggtaaaacgtaaaggcatgtgcattttggcagggggtgctgcattgacaaggagtggtctcggtgacagttttgggaagtcagtttagaacagtattggacacactgttccatccctgaattacacacaggcctcaatgctaacttgagtgggcttttggtccagcaggcctgggctccaggggcagtcactcagcgtcctgcctcaagagtggttgtgtcatgaaatcttggccctctttgactgatagctacaattatttgaagagtgtggtttttagaacaaaactaaatctgttttgaagctctgctgttttatacctgctgtgtgatcttgctcaagtttttatttttatttttttctgtataagggattttattttatttttattatgtatgtatttattttattttaagttctggggtacatgtgcaggatgtgcaggtttgttacatggtagacgtgtgccatgtgatttgctgcatctatcaccccatcacctagatattaagcccagcatgcattagctatttttcctgatgcctttcctccccccccccgcccccgacccacaggccccaatgtgctcaagtgtttt

SEQ ID NO: 45649 - DNA, 1049 bp, Homo sapiens
acttagcccaggcccatctctttacttccagaccaactggtgtcaccataatgccttctggcaatttgaagattctggcaacctcttaccggatgcagctggcaggataatccctgtgcattagccactttcagaggtatctgggcccccaaaagagtcacgggagtcccagacatgaaggagcattagtggccatctccccaccttgctgtatcagcaaaactgctaagccctgacccatattttgggcagtgctcaccctatctcattttatcttactgtatatctcgtttgtatcattttattaggtatcttattttatctcattatatggtaatctcatttgctgggtagaccagtgaggagggctgggacaagtgactggaattgcccaaggtcacagacaagtgaggtttagagttaggactccgaagcaggtggcggagtcaccgttgagttcatcatagcgatgctggctgcctcaaagtactgttttagttaatgctcacaagcaactctgcgaagcagacgggccattcatttgtgcttcacagtgtgggaaactgagtcagagcaggttcatgtcacacagctgataaatgacaaagccagatgtgaagcctgtgagttggattccaacattcatctttgatgaagcgttcaggttggggcctggtgtgggacatgctcagaggaggacgaggaggatgatttgggggaggcctcagaaggcgttcctggtctgagtgtgctgctgtcactgccttggtttgggtccccgcttctgagcaggatcttctattggcagagggttcaatgcagtgggtgccatgaaggaagatgtctccccaacagcatcacagtctcagggactgttcacatcacattaaaagcgctgagactctggcttttggtgaaaacggctattttgtcttgttccacgggagctgggaagaggagactaaacacaggagcctccccctaacccaggggcacatggagaaggaggaaggcagcccatgctggggagcaaaagggagagaaggcga

SEQ ID NO: 45650 - DNA, 1035 bp, Homo sapiens
cgaggaaaggtctgcattgaatcacagccttggcactgttccccccttccttccctcctccgttcattcccccgaacatccttttctgtgccgacaatgacctcagcagaaaggggaaaaggacgtgggaaggctgcatgggaaactcatggaacttggtagcaaacagctctgggttcaagtccgggccctgttgctcaggagccaggcactcagttgtggtggcttctctaaccgggaacttcttctatgaaaatgggactattcgtctctactccttgcattattgtggggatcggaaataatctgggtcaatgatgtggtgcagtgactagcatcgaggggacaccctctccacacaggctggaaagacatccagaaggagtcctgggctccctcaccacgcaggggctcagcctcgccagatagttgtcatcacccatccaggcccgtttctggtctcattgcttttgttcatgtactttcctcctgggttgctcttccttttctctctgacctgtcaaaaagccccattgtaagcaacatttaaatgctacctcttccatgaagcccttttggatgcctcttagggggatgagttctttccatcctagcactgcttgctgcatggtccaggatctgtggggcctgtcttctttaccactttgctcacttcatgaatgtgggggtgtatgaagagtatgatgaaattagaggctatgttctggagtcagactgatcagtactgggattctggccataccccctccttagctgggtgactttaggcaactgactgtaccatcctgaaagtcatctgtaagccgtgctgaccccccaaccacaggacacttgtgcccgctgcaggtgctctgtcagcagtgacttctcactacctggcatcctctgaattcacgagcagtttgaagaatgagcaaatactgagcaaagctcataggattaaatacacacagacctgtgtaagttaacaccaagctaagggttaaatactttacaaaaattctcagtgcggtt

SEQ ID NO: 45651 - DNA, 1047 bp, Homo sapiens
gacccaagttccattatggacgatcaggcattcaggggaaggagggatccaaagcagagacaaaagcagccagccagctcatcccctctgcagctgataccgaggaggaggatgccagtgggaagaagcgtggccatatggctggcaggatgcctcactggtaacagtcagcccggcccctttgaagtggttttaagaccaatttggtaacttgatttggaaagtggtatcgatgactccgagggcgcaggctgctcattagctgctgtctgggcccggcaaattggtttaagtggaatgaaattggttccttccctccccgtgctcatggctgaggtccaggcccgattgtaatgggaacctctcctgggcaaaggacatagaaaagctttccggggagtctgaccctcttttttcatatgtgaattctactttcccctgggggtcaaggcaataggctgataaaacataaaaatgaacctgaagtgggtggggtgagtgtgtgtgtgggaagttggatcagaggagaatgaacaatgaacagtggccgagtgtttttcaagggccagttaaccattcccctgttgagacactgtgcttgatgcattttttttcttttctttctttcttttttattctcccatattacaaacactgctgggaggaacatccgcacatgctttcttggtcacttatgtgagagctcatccaggatttataccctgaggcgacttcactgccgtggaggctaaggaacattttctgtttcataagacgcgatcacattgccctccagaacaatcatgccagtttacactcccactgactgtacacaagagccctgttttcccccatctggtcacccacatttgataggtcagaattttgctttttgccagtctcatgggggtgatgccatttctggtagttcccctgattgccagggggatgagcagcctgccctcaactgccccatgctgaaggccctccaaaggcagcatgaatcctcacagttcccagcctgtgccctgacaacctaggaggaca

SEQ ID NO: 45652 - DNA, 1046 bp, Homo sapiens
tgaagaaagcactggtttccttccatggtgttcctctttaaaccacaccttctcaaccttgtttagggagtggggatggccttcaggagctccagaggccccccctgcccgagtctgactcctggtttctggcttcaacaatgactaacctgtaacttcacattttggtctataaagtgggtagaaatgtagcacctctgcattctccaggtttgttgtgaggacgaaggagataatgaatgtagaatttttttttttgagacggagtctcgctctgtcgcctaggctggagtgcagtggcgcgatctcgcctcactgcaacctccgcctctggggttcaagcgattctcctgcctcagcctcccaagtagctgggcctgcaggggcactcccagctaatttttatattttcagtacagacggggtttcaccatgttggccaggatggtctcaatctcttgatctcgtgatccacctgccttggcctcccaaagtgctgggattacaggcgtgagccaccgctcccggccatgaatgtagaattctgagcccagggctggctcactgggagtgggccacacatttagggggttgttgttgtacacatgatcatcggtggcactgctttgcagcctaatggtttttgacacatgtgttccttcttaatccttaagccagcaccttgagttgggtgtgatcaactcattgaattttttaacttcagctgtgacattatagatcatctagctctgctgtgaccttattttgtagatgacagggctaggggttaccatccctcttaaggcctagggcctgggtgttctcacacccaggttgcggtttttgtccttgtcttctggaggttcgtctgcattttatttttttttgttgacgatttgttgacgaggctggagtgcgggggtgctatctcggctcactgcagcctctgcctcctgggttcaagtgattctgctgtctcagcctcccgagtagctgggattacaggggcacaccactgcacctggctaatttttgtatttttagta

SEQ ID NO: 45653 - DNA, 1014 bp, Homo sapiens
aatgtcccttttgactattttttcccaattatggatcattattgcatttagtggctgtgtctcatgttccccagtcatacttgactttgattttttttttttttttttttgatatagagtctcactctgtggtccaggctgaagtacagtggcatgatcccaggtcactgcaacccccacctcccgggttcaagtgatcctcctgcctcagcctcccgagtagctggtattacaggcgtgtgccacaaagcctggctaagttttgtatttttagtagagacggggtttcaccatgttggccaggttggtctcgaactcctgacctcaagtgatccactcactttggcctttcaacgtgctgggattacaggcgagagtcaccgcacccggacgactctgacatttttgaagagtccaggtaagttgttttatagaaacactcctcagtttgggttgagactgttatttttgaaagctcatactgcaccacttgctttaattctgtaatcctcaatggtcccctatggctgctgatcacgtccgcgtctctgtagataagaaaacggagccatcgggaagtagagtggtttgtcaatagtcacattcccagcaagtggcagagctaggattcaaatccagactatctgtcctgaaacctaatttgcctaccaggcaacaggaataaggacaacaattagaccctgagaataacaaagtgtttatcaagcacccactctgagccagaggttgtgttgagcactctgcagacactgcagtacaatactcccatccatcccaccccagtccaggagcagctgttttatgttgttgttgttttgagacagagttttgctctgtcgcccaggctggagtgctgtggtacaatctcagctcactgcaacctctgcctcccaggttcaaacaattctcctgcctcagccacccaagcagttgggattacaggcatacgccaccatgcccagctaatttttgtatttttagtggagacagggg

SEQ ID NO: 45654 - DNA, 1175 bp, Homo sapiens
ccccgagtagctgggattacaggtgcctgccactgcccctggctaatttttgtagttttagcagagacagggtttcaccatcttggccaggctggttttgaactcctgacctcatgatcctcccctctcggcctcccaaagtgttgggattacaggcgtgagccaccgcgcccagccttccaggctggtttcaatcttctggcctcaaacgatcttcctgcctaagcctcccaaagagctgggattacaggtgtgagccactgtgcccggctgagtagctgctttttttttttttttaatcctcgatttacagatgaagaccagagaagctaggctgacttcccatgttgacacagcaactaactggtggggatcagctcagagctgggcagactatgcacttcccaccctgccctgcaccccatgctcggcttgctggatttgatagaatctagcaagcgtgggggccaggctctgctgactccctgtgagaagcagtgtctgtttctgtgtccttttctggggccttctccagagggaaggaacatatcccaaagctggagcttgcactcaggagcttcccaggggaaactgctccactctctgccatctacagctcttgcaggtaccatagtctacctccatgatctatttgcagtgggcgatggtgttttgatgatttccacatcatgaacccaagtgctgttgctgatttcgaagcttgttcactgtctcctgccaagtggccaagggctcctaccctagcccttggtggctgctcctggctgccatctgcccacccagttggccccactgcctgggccacgttctggtggcatccaagaactggtagcagagatggtgattagtcaatgtgtgttataccctgggtctctccatctttccaacagagacctgccttacatgtaggactgcctccccttgttcaggttacctagcccttgtgcaattcaccttctgattggagaaggaagacaatacggccctgcctctcggcctgtagagaggaatggatgatgtgaaactgtggcatgcttgatattctgctggcagagaggagaacagatgttaacacagagcacacctctgccccgaacctcctgggagccttggaggtcctgagtcagcctgtccttggcactcaggctcttcag

SEQ ID NO: 45655 - DNA, 1032 bp, Homo sapiens
ctacctagtattcttggaagaaggtgaatgaaaatgctctagtaggggagggaaacatgattaatgggtgggggcttatgagtcagaaagacccaaccatcacttctgccctgactgcctgtgtgacttcagaaatgggggatatcaaagcctatctcataggattaaacagtttaatgtgtataaaatgcctaacacagtgcttgccacataagcattgctcattaaatgtcttctcttcttgtgctcctcattcagtgtatagtaaatgtgcagtccttatcttttaaatgaatgaaacatctcattaccaaatctattcaaggtaaacattgatattaatatgtatcctttttgtgtgtttctagaatcctgttacacctgggatttaggcactttcaatctgaaaaaatacatatcctttcagcactctggacggacttgagaactgtccttacgtgacctaaagctggagtattttgagattggagaattaaggtaagcgactttatcttcctgatccttgtgaaaccaaaaatagcttttggagttgacgacctcctgcagcacagcttgggttgtggttcttgacctctcggtgtgtcttcctgtgccgctccaatgtgttcgggaagctggctccccataacctctccccgacctggttctcagagtctagtccacttattcattgtgcctaggaagctctccctctgtccctagtggagggaggagcccaccatctcctagtgaatgcgccacttgtagcagaaggtgcaggatgctccagctgtcttgtgaaaacatgtggagacagccttggggaaaagaggaaaaggtgaggtgagggttatataatcagattgaaacacctttgggacatccagaacatgagctcttcctcctttcccagccaatccgtgcttcctcctttcacctccttgaattctatgctccttccacactaaggctgagggtgcaggaggtaaagggttagaggttaagactgagtgcttcaggtagacttgggtt

SEQ ID NO: 45656 - DNA, 1029 bp, Homo sapiens
catgccgggaggcttcctggagcaggtgctgcctctcgtgactcttgaaagatgcttgtgaataaagcatactgggagctgagctgctgtttagtaattaaaaatcctttccattgtttagagctcagcacctttgtgcattcatattacgcattcattttcgtatcattgttgaatttctcacttctgctactgcaatgtatgtctacagctgacaagtcttccttgggagccctacgtagctcttttttttcttttctttcttttttttttttttttttttgagacggaatcttgctctgtcacccaggctggagtgcagtggcgcaatctcggctcactgtaagctccacctcccgggttcacgccattctcctgcctcagcctcttgagtagctgggactacaggtgcccaccaccacgcctggctacttttttttgtatttttattagagacggggtttcactgtgttagccaggatagtcttgatctcctgaccttgtgatctgcccgccttggcctcgtagctctttttgaccctcagggacagtcactgaattatgtcttgggagcccatgcttctgaggcaggcttagggagcaggagagcatacaggtgtagcagcctttccagctgatccccatgccctgctgcacctggagggctggaacaagctattctcatattggggaaaagggctgatgggacctcagtcatgtggcagagaatctgaaagccagaagcttggcaggtctgtctcggggtggggtgacggagagacatttccctagaattcagctgctgggagcagaaagacagagcaggggcaagtgctgggtttctgaggcccgcagtcctgagcatggcctcaggcagtctgttctatgacagaacctgaagaaaggcccaggcatttgcatctatgtgtgcagttctacttgtcctaaaggcacttctcacactgggagcctgcctgtctgtacctgtctagaaatcagcctggctgggacgcacaccaataggagggc

SEQ ID NO: 45657 - DNA, 1030 bp, Homo sapiens
cccctctgctgccacacccttgtgcacatcctccagacacttttaaagaataaactctattttcagaagagttttagatttacaggagaattgtgaaaacagttcaaaaagttctcatataccctgctcccagttttccctgttactaacgctttgcattagtgtggcacatttgccacaattaatggaccaatattgatacattattatttactgaagttgaaacattactttagtttttacctggtccaggatcccatctgggatcccacatcacatttagtgatcatgtcttcttagattgccctgggctgtgccgctttctcagactctcctggtttgtgatgacattgacagtcttgagttttgatgaccagttttgactggtcaggtatttcatagaacgtacctctgtgagggttgtctgattcttcttcttattagattgggattatggaggaaggccacagaggtaaagttccgcttttatgaaatcaagggtaggcaccatcagcatgacctatcactgatgttgactttgattacctggctgctgtagtggttgtcaggtttgtccactttaaagatacttttgtgtttttgttctttcttaactccctttttatattaaactcttcagaaggaagtcactgtgcatagccatcccctaagaagagggcattcctgctcttccttctccatggctagaggatctacatgaactatttagattttttctacctgggagatttaactcctctctcctatttatttatttatatatcagcatggacttgcaggtatttatttgataatttttaatttatttgagttataatccaataatatggttttattttgttgctcatggtttttcttccttggctattgggaactcttcagttacttcctgtgcccatttgacatactttcttattatgggtctttctttcttccttttctttccttctttctttctctctctctctctctctctcttccttccttcccttcctccctccctcttttc

SEQ ID NO: 45658 - DNA, 1032 bp, Homo sapiens
agtagaaacggggtttcaccatgttggccaggctggtctcgacctcctgacctcaggtgatccacccacttcagcctcccgaagtgctggggttacaggcgtgagtcaccacgcccggcccccatccacttttaacaaacttgttttctttttgcccacattgactgacaaaagaaggtaatgaacagagatgttggaaagttcacgtggggcaagaggagtgggctgagaacattggacttttccctatggtcaatgtggcctcattcaacaaaaatcaagatgagtcagatgcatgtagaaagagactccgaaatgtgtcctgcctagatgtttgcaaaccgggactctgtgttatgctcacaggcctttgaatgtgtctctccctgggcttcatgtgcccttgctggtttctggactgtcctgttctgctcctgtcctcctactgacagcctttcctgctttcctttccctcccatgccactcccactccatacaacctcttcccctgcacactgctcctagaaccccttggttagccccatcagggatgtccctgctttcctgggacccgaggcacacagaatgaggatgaaacagttgacgtatcatgtagtatcccccacctggcttccttctcagccaggcgtcccaaactcaattgtctgcagaggccaggcaggcaacaaaaataagtgatgtgggcctcctgggcagtcaggagggcttggtgcagaactggaagcaccagaggtagcaaggaaccaggagatcaggccagcacctgctctgaatggtcaggcacctccatggttgcatagcaaatcagttgttgagaaatgttttgactatggtccttgtgtaggcccagtataaagggggaaatggccagtctgtggctgctgattatggccctgaaagtctgcaggcccagaatggccagacctggttgttcaaaggaaaactggcaggtgggaagggcggagggccttgccccttcccatttgcctcctgtgcctgacagtgtcaccg

SEQ ID NO: 45659 - DNA, 2104 bp, Homo sapiens
tatttcattgtacaataagatccccttgactcttgtgaattataatgaacattagtctgtaaagcaggtccttgtaatccagccagtttgtatacagtaggtaatcaagaactatggatttactgggtttattgggtgggggagaagggagggctttattcaggtgccagcacttcttcacctttctctacatttgctcatcctggaggtggggttgagctgggtctgccttgtcccctcacttccctctctgccgagagagtcctgagcccacccattactggtagcaaagcccggggcacaatctccgttttcctatttgtaaaatggagctaacagtagtacccatctcatcagatggctgtagagatgaaatgagataatgtatttgtggcgttaggacaacagtggtcctgctacagggagaagcctgggccaggagatagactagtctccagataccactgaagtagcctttcgaataccaattacctgcctcactttgcagctgtgcagccctgaacaagttactttccctctctgattttccagtctttgttacctgtaaatgtaacaatgcctttctctatgttgttgcgaagtccacataaagtgacatgaaattgattataaaatacaacacaggctgggcacagtggctcacgcctgtaatcccagcactttgggaggtggaggagggcagatcacttgaggttgggagttcaagaccaacctgactaacatggagaaaccccgtctctactaaaaatacaaaattagccaggcatggtggcacatgactgtaatcccagctactcgggaggctgaggcaggagaatcgcttgaacctgggaggtggaggttgcagtgagcggagatcacaccattgcactccagcctgggcaacaagaacaaaactccatctcaaaaaaaaaaaaagttacaacacaaaggttggcaactatcactaataagtttgactgggaaacctcactactacatttgtattgtcttagaccaagcttgtgagatttttttgttatttgtttttgaagctcatcagctatcgttagtgttagtgtattttatgtgtggcccaagacaattcttcttcttccaatgtggcccagggaagccaaaagattggacacccctgtcttagacttttaaggagctgtgactgaaggatggagactgggccaggtggggcttggtgcaagtttaagctcttaggtcatttctaaatagcaaacctctcaaatagcatccaacagatatgccctagtcttgtcgtctttcccctgctatcttttgtacatgtaccttctgctgactgcagtgtgtcctggagccctgacttagttaaacctcagaacatccctctgcatccggatgcatccagtactctcggtttgtctggctcctgctgtactccctgcatctgcccagctgctgacacagccacatatggcttcctttgccccagctttcagcattctggtggcttgtagtgctgagtgctagcaaagaaagtgggtactctcacacactgctgctgaaaggtggagggtgatgaacaggaccaacagctctaaaagacgtttcaaggccaggtgtggtggctcacacccgcaatgccagcactttgggaggccaaggcaggcagattacttgaggtcaggagttcgaggccaagcagccaacaaggtgaaaccccatctctaccaaaaatacaaaaattagccagatgtggtagtgcgcgcctgtagtcccagctactcagggggctgaataaggagaatcacttgaacctgggaggcagaggttgcagtgagctgagattgcgccactgcactccagcctcagtgacagagtgagaccttgtctcaaataataataataataataataataataataataataataataataaaaagataagggaaatttgggcaggacttctccaagtttagagtatatgcaccctttggcccagcaatcccacttctcggagtctgtaccctagaaatagtgagggaagtttcaaaagatatttattcaacagcattagtaatgtatcagaaccttgaagacagcctag

SEQ ID NO: 45660 - DNA, 1067 bp, Homo sapiens
ttttgtaagcatggtgggtacttagtcaatgtctcaatcagatttgcttctgtttagcaagataatcttttgtgggggagtgttatggactgaactgttttccttcttccaaacgtatatgatgaaacctacccccatgtactcagtattaagaagtggacctttgggagataattcaggttaaatgagattatgagggtggggctctcgtgatgaaattagtgccctcaaaataagagacctcagagagcttactgtctctcttctctctctgctacgtgaggacacaatgagaagggagccatccacaatgcaaggagagggccctcatcagaacagaccatactagcaccttgatcttgcacttgtagtcttcagaactgtaagaaaatgaattttctattatttaagccacccagtctggtgcagtctattattgccttccaaatggagaaatacaaggaaactagggccgtcttagcttcacagagagaagatgtggagaggagttaggaggtagagactggaccttgatggtggtgatattcaattagtgaaaggctgagaagaggtcaaatatacttcttgtggccccaaagatcagaaccaaaatggaaaggtagaaacagtaggcaaacagaaagcaacttaataaaaggaaaaggaacctgagagaatgctctgtctctgacagtggttgggatctcatcactggagatatccacacagggactgtattactactgagagggggtggggctgaaaggatccaagcattgcactgtgatgcgaccccataaggtcacttagtctttgggacttgtgagctcacagtgaatcattacaaacagaaacgattccctcttatttgtggagcacattaaaatttccaaagcatttttgtgagtacattagctcccatgatttatatcaaaacattagagttgacattcaatacacatttgctgaatgagggggatgcatgaaggagctattgtggtaccttggttggcagaagaggaatacatgggcagagtcatttctagacttgctaggaaaggccaagc

SEQ ID NO: 45661 - DNA, 1063 bp, Homo sapiens
ttgtgttgtgcccctactgtgtgccagacactgtcctaagcactttacttatattaactcatccagctcacaaccaacaaaatggccctaagaggcctctgctgatatccccgttttccaaatgagaaaactgtccacggggtcggtcagtaacttgttcaacctgggaatggcagagctgggatctgaagtccgggagcctggctccgtaggcctctgtttaagccactgcatctgttgccttgtggaatgttcttagaactgtaggatactggttcccacatggccgagagtcttctctcactagttcgtgctccatggtgatggagaagcatagttctaatctgtcattctgttgctctggagcctacacagccccccatcgcatctggagggagaagcccagctccttagcacagcacctgagaaataccctttacagtctggccactggctgaacattctttcactctccatgccacactgctctgtgagtaccatctgaaggtcctctcccttttctctgtcttctaaatgttcactcttcaatatctaactcaaatatcctcttctctaacttgtccaggaagaatgagtaaggccctttcctttgttccccaggctcttagtttctccatctctaatcacgtagattacagccctttctttggttttctccaggggaccaaggagtggggctctgcctttctcatgtctgctctgccttcacggtcccccacagtgtcttcagtggatggccaacctctcatgaacaggatgtcctcttgtctgaggttctactttgttccagccatggagtcatactctctttatcttttgactatccaaaggtgttctgttggacgactgatgccttcctccaaggtactttgggctcccaagtgtgcagttgacatttgctgtgccttctccaccaggctttagtttttgatgtatgctgagcttcagtggagatttgctagccttgggctttctgtgttcttgaatctctcagagtccagaagaaaaggaaagctgacactttctaggaatgacctgtgag

SEQ ID NO: 45662 - DNA, 1039 bp, Homo sapiens
ctccttgagcatatgaggctggaatctaagccctgaggtcactcactgctctcctgggtactatccctggcctcccgtccttttccttgagcttctgtgctctgcaaggctttctcattatcctttaggctacagagaaacaaggagacgggagagccttgaaatggaccttcaagattacaatgtgtagctgacattgtcagttaagttgggcagatctgacttcgctgattaagtggatgtatgagccgatcctccccagaagctgggatcagcttccccatctgatggtgagtcagacctgctggggtttgggtcctcgctccagcatggctgcctgtgtgaccttggccactttacttaaccttgctgaatctcaatttcctgatctgtaaaggaagctaaaaatgcctctcttgaggttgtagtgaggattaaatgtgatagcataagtgaaagtgccctttgaagaaagaggaaggcgaaagcgcttattgtgtcaggagaaatgtgtggagagccccctgttgttctcaggtgtctcatccttcccagggaaaaatccccatgccaagtcagaagaggttataatttggctcttactcttttattcaggcacttctttcggctgcccagggttttcagcttaagcaaataaattacccttctccactggactctgtgttctgcagccagccatatgtttaagcttgatagagatttttatctggcttggtaatattacccagcaagggatgacatttcttatcagaggccctgaggaatcagagataggagccctttctttttcctggccgccaggcctccatgtgcagggctggcagggaggctgggaggggctggctgggtctggtagtgggcatcagctggccctcatttcttaagacagcacttctgttagctgacctacacagaagcaggtcatttcgagatgtttgcgtcttggagccactgatagaagcagggcaagggagagtgaatgaggaaggaaggcgggagtgtgatgacgcatgcccag

SEQ ID NO: 45663 - DNA, 1022 bp, Homo sapiens
aacttgagtttaactgtctcttcttccagtggccaagtccaaattctgaaagcacagttctgaccatgtccctgtccaactcaaaaacagtagctccgtgtcacccacaggcttgaagtcagacctctcagggggcattaagtccaccgcaacatcactccagcctgtgaataaagactgaatgcctccgagcctcttatgtggggaatcagttctggtaaacaggtctcacttcttgtcttttaaacactacttgctttccttgacgtctgtgctttgatcccattgttttttctcccttggatgcctgagagatccatgggctctggcttcagagagtgctgggttcagacctcagctccaacagttgctggctctgtgaccctaggaatgtcacctcaccactccaagcctctgtatccttgacattaacctgggctgatagttcctacctgcagggttcttgtgagaagaacctgtctaaaggctcctactggggcttgacttgtcagataaatgaatggggttttccctaaccttctaattgactaccccactgattattcaaactccacctgtcctcaagttccattccatcattcacttcctctgtgggtttttctgccacaaagtcatcttcctctgtttgaaagactcttagttcctcatgtatgacagcaagagtggacctcatctctttctttttgtgtctgacttcccagcacagtctcaatttcttcagggcattgactgtggtgtaagattctcagcttgagcactggaaccatttatgggacgattgagtattcaactccaagagaatgaaagagagtcacttgttctttcattgaacgaaattgattgagtgcacatgatatgttgtgtctgtgcttcacactggagttgtaaggatgcataaaatgaagattctgtcttcacatagcctatcatccagtgaggaggttgcattattgggaatctgtgccaagcctggattgcataagacataggtagctgagaac

SEQ ID NO: 45664 - DNA, 1068 bp, Homo sapiens
tctcatctcagtttccacttacactgacaaaaagtctaagagtcatttccccccaactccattttagtcaccgcgaggctcaggaaaacagaatttcagaatcttctggaagagatgtttcctttcttaaccaagctaaatggactggaggcaggcaccgctggtgtttttagaaggctggttaaccacagtgcctagcggtttggggaaaaataaatcaggtagctttctgtggcacgagacattcccttaccacatttgtccacttgagcacttttattttattttattttatttttatttttattatttttatttttttgacagagtctcactgttgcccaggttggagtacagtggtgcaatctcaactcactgcaacctccacctcctgggttccagcaattctcctgcctcagcctcctaagtagctgggattacagttgtgcgccaccatgcctagctaatttttgtatttttagtagagatggggtttcaccatgttggccaggctggtctcgaactcctgacctcgagtgatctgcccttctcggcctcccaaagtgctggattacaggcgtgaaccaccgcacccggcccacctgagcatttttagatgtagacctggtgatgggtctgaggggcagcatgttctgtctgaatggggatctcaagctcagtgatgtggctttaagcaaaaaggatggcttcaaggtctagatttccttgggagcacgttttaacctaaacctgcataactagtaactcgaagatcttttaattttattgttttttaatttaactgaccccgttctccctccttttctccctccatcccttcattcctccctcccttccttttgacacaggtcacccgatatagaatcacacacctgggagatggcaccagccagtgaggctcaaatttgaaccacacacaaatctccaggggtacttggtaaatgcagacttttgaccaatttttcggcgtggggctgagcatctactctagcaatgagctcccaggcagtactgatgccgctggtccatgcatcaacccacttcaac

SEQ ID NO: 45665 - DNA, 1044 bp, Homo sapiens
agattcacaagccccaccaagaggatcaccccaggaacgcttggaggctgaggagttcactgaggctactgcatcttgagactcaggatgaagacccagcttggggctgtcaaaggtgcgacctgccagctgagacctccaggggtcgagcccaggcccctttgccttgttcatggcttaggccagtgcttagcatatagtaaacaacttgtaaatgtttattagaggatgtatggtgggtcatcccttctgaatggcacacagtccattgtcattgtcctcagaggctccagcctcaggtgcttcttaaactgcgatgggaatgatggcagcagatgggcccagggctcagcatgagagctcacagcaggctgtgctccaccccacccaggcccccagtcttgccatgtttcctctgcctccccaggctggcctagaaactgcttccaactgaaaccagccaaatgcctgcccctaaccacacctacaactctagggttacctttagtctagatcaggggtccttaaactgtagcctttgctgggtacagtggctcacacctgtaatcccagaactttgggaggccaaggcgggtggatcacttgaggtcagaagttcgagaccagcctggccaacatggcgaaaccccatctctactaaaaatacaaaaattatccaggcatggtagcgcacatctgtaatcccacctgcttggaaggctgaggcaggagaatcacttgaacctaggaggtggaggttgcagggagctgagatagcgccactgaacctccagcctgggcgacagagtgagactacttctcaaaacaaacaaacaaacaaaaactaagcctttgggctaaatctggtgagtgttctgtgcttgtaagaactctgagttaagaataatttttatgtcactaaagggttgaagaatacaaaaagaatattcagcagagaccatctggctagcaaagcctaaaatattgaccctctggccctttacagaaaaagtgtgccagtcgcaggattaggcagtactgacc

SEQ ID NO: 45666 - DNA, 1048 bp, Homo sapiens
tttttttcagagaagggccctttctggtttcccctgctgcccatcaggatgcactcaggcagcaactgtacagtaaaaggggacacctttagcctctggtttcccagagcagagagctgtcaacaccataagctatttttgcctcacctctggtgctccggagtggcaggccagtcacaggtgtggtgcatcagactatgaagaggctgggtggccacaactctgtgctgggatgctgacctctttgaggcaaacagcatgagctggaaaaagtgtgtctatctcagagttaaaaactggtgaattcccctgttgctctttaccatctcctgggtccgtatgatctgactgccacccactttcccctttcctcactgggctccagacacactggcttccttccttcctgaagcctccatctgctgccgagctcagggctttgttagacgctcaccctgcctgtgttgcttcctgcagtgtgctgaattgtgtctcccaaaagatatgctgaagttcggacttccagaacctgtgaatgtgaccttatgtataatagaaatagggtcttcgcagatgcgatcaagttcaaataaggtcactctggatgacggtggcccctaatccactggctggtgtcctgaggacagagacacacagtggggaggccttgagaagatggaggtaaaggtgggaatgatgcatctacaagccaaggagcaccaaggattgctggcaaccaccagaaactaggaagaggcaaggaaaggctcttccctacagctttcagagggagcacagtcctgctgacaccttgatttcagactgctagtcttcagagctgtggaaaaatacttttctgttattttaagctccccaatttataatattctgttatggcagccccaggagatgaatacatttctttctcctccttcgtttcatacctctagtgccatctccttgaagagtcgttctttaactcccagtcattactaggttcccaagttctacacctttagctctgcagcctattcccacgggagattct

SEQ ID NO: 45667 - DNA, 1050 bp, Homo sapiens
tggtgagggccttcttgccacataatagcatggcagagggcatcacaaaatgagagggcaagagtgtgtcagttcaagtctctcttcctcttactataaagccaccagtctgctgagcatggtggcttacacctgtaatccaagcattttgggaagctgatgcaggaggactgcttgagtccaggagtttgagatcagcttgggcaacatagcaagaccttgtctctaaaaagaaaaattaaattaaattaaaaaaataaaagccaccagttctatcatggagcaccccctttgattagtttacccttccaaaaaccccatctataaccaacatatgaattagggggattgagtttccaacacatgaaatttggggtatatattcaaaccacagcagagccacagatgtaaggtcatggaaaggccaagggagagatgagatatgtctctctagagactcaatttaactctgtagaatagaacaaaagtgaagccatgctgagaagccattgctgttgtccactatcctcctggctaagcaaaactgatgatgaacttttgtttttctcaacacctaccatatgccttgctcatagcaggtctccctatctgaaggatgaaggggttaagtgtggtgggccaaactgaagggcctacaagaaaatttgaaagtgcatactgggcttgaacctctggttttaacttatcaagtgctgttttgaggatccgcttttagggtggagtcatcagggatgtgaagagtagacagcctgaggtcacttcttaactctaacctcaagagctcctgttgtcttcaaagggtgtctgaggcagttgatctcttacccaagcccttgttacacctatgggctttgtggtgattgaacatgggtagttgatctatcttgtaatcaacaggagaatgagaacaggtgctatcatcccctgtctgatatccctgtgatgcaatagtctgaggagtctgaggcttttgtgcaggaaaatagtatctcaggtctcctgctatgactctctctctgggcccaggga

SEQ ID NO: 45668 - DNA, 1055 bp, Homo sapiens
ggcctttaaaaaggcatctgggaaaatgtcagggtgttttttttttttttttttgacaaattggaaatgccacattcagatgacttcttaggaagaataaaatgttgttattctgagtctaggtttgaactttaaagattcatctcattttagtataaagtgttttatttaccaagaacttcagtaggctttcttgtcacctgaatggcaagttaattcagaaggaacgtatcaaaataataaaatgagaaaagttaggaaccagcattagctgagtcacaatcccctgcttaaccttatttgccagtgcgcactcagaagaactgcttcttaccaaaacatctgtctcttcagctttcagtaggaagcagtgtcctttggcttacaaagaagtggtaacagaactaagcgaagatgaatgaaacagtttgaaattggcattggtagatttagtttctttttttaagcaattaaaagcccgcagcactgtgattggcatttttgacgtttagcttgtgctacttagtatcagagacttagtatcagggacttatcagtaagtccctgatacttactgtaattgctgtatcttgctaagacctgctgtttagatatttcttaggtcataaaatgaatgcttattagattgtttcttgtgagaactaaggaccaatgtagagatcatttattaccagagtatgattattagcattttatgccaaaggaattatttctgcataccccattcagcatttttatatactgagaaataacattaataaatatctaattatttgtccttgactcggcatttttcttcatagttgttaatataattaattttttcaccaagtaatttttttatcctttgacacgtgaaaagactaatcatataattacagtgttttcatcatgctactgccctactctaacattttgagttgtttacagtgcttacagagtccaggcttaacatccatatatatgtacaaggttgtctaaagttttgaggagagacaagtatatattggcattatatgcttgtacagctactg

SEQ ID NO: 45669 - DNA, 1849 bp, Homo sapiens
gatttacaaagctctcacataaggtcctggactattatagtacatttgtcaaagatgaatgatagcttaaatttctgaaaatttaattttcgaaaacaagcaagcatgagaatggaacaaagaacactatgttgttccattaaatctgcaggacacaaattcatctattgttgacattttatggcatttacttcttcatttgcttttactctctttttcctgcatctcttcctcccttctctctctctctgtttctttctctccctatgtgtgtctctttgtgtgtgtatgtatatgtgggaatacacacatacacatgcatatttttttctaaaccacgagatacaggaagttgcatacatcatggtctattaccactaaatactttgatgtatttttccaaaaaataaatgtactttttaatataaccagagtaaaattgtcaacatcactaaatttaggattgatccagtacttgaatcagcctttcatatttcagttttatcagttgacccaataatgtactatattgacttttttccttgaatccaagattcagtctaggatcatatattgcatttagttgtaatatttctttaggtccattagtcaggaacatttccattatgacatggacatttcttatgagtaaagtccccctcccacttttttaaaaatagaaagttcttcatttggttttgtatggtgtttccttgtgattaggccgtgcgcggtggctcacacctgtaatcccagcactttgggaggctgaggcgggcggatcacgaggtcaggagatcaagaccatcctagctaacacggtgaaaccccgtctctactaagaatacaaaaaattagccgggcgaggtggcgggcacctgtagtcccagctacgcgggaggctgaggcaggagcatggcgtgaacccgggaggcagagcttgcagtgagccgagatggcgccactgcactccagtctgggcgacagcaagactccgtctcaaaaaaaaaaaaaaaaattcaagttagatattcctgactggaatactacatacgtgatatgttcttctcagattagcacatccagaggtgcacactgtaacttgctcctttttcattatattaattttgatcacttaaggcattattatattcctccactgtatagttttagttttttccattgcaaataataagcaacctctgagaagacactttcagatcatgcggatattctgcttttcatccagacttaaggttagatctagcaatcatttataattcttgtctgaattagtctttaccatgatggctgcaaaatgatggtttttaaactctagcactccttccaaacctatcagttgcctctcaatgttctattgtaagcaggggcccccttttctacctttctatgtatgtaggaatgcatgtatttgtttattggtatgaactcaatggatttatattttaatggtttataattcattactgtagttaatcattttagtgctcagattgtccctgatttggctcatgggagctccttcaagacatccccccacctccctgaaccttttttttttttttttaaagcactgccttacttgagtaagcggttccagacgaattctgtactttctgccccagccctggaatcagtcatttctccaaaggagctgcggttgtttttagtggatagtagtattagagactaagatctggatgctaatatcttggactttaatatcatatgcttttctttcttttttaaattttcttttttttttttcctgtctgtagtcaaagtacaaacagtgaagagcttccttaagaaaacagccatgagaatt

SEQ ID NO: 45670 - DNA, 1033 bp, Homo sapiens
tagagtaggagaatggtcctaaagtgtaacatgtagatcaaatatagcattgtaggaacaccaggtgaatacttcaaaaatagaggttcttttgctaatattaatatgcatgcagtttttgtcttttcataatttgggattctttcagtttgtctatacatagaaagtaatgattattattttgagtcattacctttgaaaaccaatgccagctgtagacttagaaaaaatatacagttgtatgtatacatcaaaataaatgaattacatactatggtcataagttcatagaaaacgtatacatgacctctaggttaaggacccttcttgcagacaattcatttgaaatctgtaagttttgtttaaaaattctgagataatttacatttagatagtcacaaattttgaatcttaaggtcaaagtgaatcatccagtttaattatcaagcagatttgtaccagtgcacaaacattttacttctttaacttttaaaatttccacaaaagaaagccccgtaaattcctttgaacaatgctaaatataagaaagcttccctctacccctccaaaaatgtgaaaagcatgatttagggacagagaagacttatttatttgaaaacacacctggtttcgggttgttcttgctctagtgttcttcctttttttatgttaattcgttttttatagaactctttctggtttataagctttttctgcttatcctagtttttttgaaaaacaaaagtattggaaaaaataaattaaactggaagtcataaaatatggattttaagtgctattttgccatgaactatgtgattttggagaggtatttctctgctttaatgaccttgaaatgaaagtcttacagtttagatgatctttcaggtgcagttgaattccaaactcaatttcattttatcaattttcacctattcagggatgacagatttttttttttaaatcatacttttagatgggtaaataacacaaacttgaggcagaggtaagatagacaaaaagtcataggtag

SEQ ID NO: 45671 - DNA, 1023 bp, Homo sapiens
agcctccttcatcaatttataatgagggtaaagtccaggaatctcaggcttactgtgctgtgctttatgtgtgtgtgatcgtatagtggcaagggttggaacaagagaaaagaccgttttatttgcttatctgacatttggttgaagtccagccatcacgtatcacacacatccagctccctatttgttacatcattcctgccgaatgttattatgtattatgagatttcacactgtcacatcacattagataatggtttattttttagttgggggttgatgaaagccactagctgggaaacagtttatctgttgtggtagttaactctactaaaaagaatgttttgcaattctagttttgctgagtagacagaaatggcatctgcagatgcttctgtttttaattttggttttaagtgatttcttttaagctgagggagaaaatactagttttaattttaagttttgaatatcagtagtacaatttttaaaagaaattaacggaatattgaaaagacagcttagttctgctgttcttcattaaggtcccagttttttagtatttttactgtaactgtatattttgaagaagtgttgaccactccctatcatttcttgctacagatggttagcacataagaatatacttcttattaaattagaaattggtatgcaagtattatgttatttcagtaattataattacctcaactttgagaggattgttgcagtaaagttgaaggaagagtatagatatttacttaatattcagagtgtcttgaaagtctgttttcttattgccaaaaaagttaccatgaattagaaataaatttatttctggtacatcatgattagctagggtactgaagtataagctacttatatgaaatggtgtatctacaaggccttaacatagtaacttactcataaaaggtgcccagcaaagtttactgaattttgttgggtttaaaaaggatgaatgaagacaaaagttttgggatatcttgaaataacctagttacc

SEQ ID NO: 45672 - DNA, 1050 bp, Homo sapiens
attaaatttgtaggcttttgaccctagcataatatgatggctaacttttttagcatcttacagttagacctgaaacttaatagtctagtgtgggttacttgatattggatgccctcagtattcttgaatagaaataggttgagattttgatttataacttcttgatagcaggtttttgtttgagattttttcttttgttttgtgttttttcttcaaccttttaaatgcttctgtgtatgcttcaatatataatatggaaaaagcagtaagttattttcttcctgcttttctttaagaataactgctttagtagtcttttatttctaatatattagtctggagggatttgtgtttttcaaaggtctgtatcaagtagtagattaaaaaaactaatgtgcaaagcatttttactattttgctgttaaaaaatcatgtgttttaatttggattctagataaactctcatatatgtgttctgttgaaagtaggacttcatgtagagaacgttccaaagatggtctttccacagccagagagcacattatcaaacaagaggaaaaataatcaaggcaactcgtttcaggcaaagagagctcgacttaacaagattactggtaaactacaatgattttttttttgagggggggaaatggaaggtttaattttagagtaatttatttttaatgaagtaaaatggttttgatttagtgtcatggacctgttaataacaaagacaattactttgtggttcttcaaggtcaatgtctttcaacaccgtcagctttttctgttgtaaaatgtgaaaaataccacatatcttctacctacctcacagggatgttgtgagggttgataaggacaaatgctacaaagctcagtgatttttaaattacatttgtggtagtagtagtttctagaagaattattttgtcaacttacggtgacacagtttctcagattttaaatttttttatacattcttctacttgaccagtcttacttaaggatggtgccatatatattggaaagatgactgtctgacttacattt

SEQ ID NO: 45673 - DNA, 1050 bp, Homo sapiens
tttctaaattaacatgaatatattggcatatataatcttgcctattctagtcaaatgtgtttgtatgccatgtagaaagaagatatctaaaagtgtgagagacatttccaaatatttatattatattgctagaagatgcctaaattacttaccaagttgttaaaaaacacaagtacacaatgtcataatcttaaatatcctcattatttgctcacaataagtatacaaagttgtttttgttcattttttttttttaatgaatcaggcccagacatgtttataaaactccatttgggggggatgatgatgggataaaattatttacattagtgtaaagtaaatcactaactctataatgttgtatcatctttgtccctgcctttttttcccttagagtttctagatttgcaatgtagcaaaaggaatacatatatatatatttttccttatcttttgctgtaaagagactattttcccgaaggaaaaatggcaatttacacaacgatctgcaattagagaaattaactgtagtctgtcacttgggggagctacttgaaattaatgttccattttattttcttttagttctagtagagtgtagattttacaatttttgattgactcattttgaatgagggcacaatttttgcctttgattacctttggaacatgccattccttgtggatatcttataacaacatcagagggaagaatataaatcattttttcccatttatctccttaaatattgtaagatgctcctggtatgtatctgcttcgtgaacattgaagatctttttctaggtcctccacagcctgtgaatccccctagacctttcaagcatagtgagcggagaagaagatctcagcgtttagccaccttacccatgcctgatgattctgtagaaaaggtttcttctccctctccagccactgatgggaaagtattctccatcagttctcaaaatcagcaagaatcttcagtaccagagggtaatgtatattgatttcctatagaaccaaacataaaagaagataaagaaaaaact

SEQ ID NO: 45674 - DNA, 1023 bp, Homo sapiens
atttactttatcttagaaatggcacttttccccagatggttaaattagaagagtggtctttaagtgggaaatacaggatttgaagtaactttgaaattttaaagacatcttaatgttaaagaattgacattattactgtatgaggcttctagtatgttttttagtctacagttagcaccatgagggagtttcaaaattctttcttttatttaccactcaacattattttatatatcctgctggtacttatgtacccaaaactaagcattttataaatattattacttcatttaatcctcatattaaccctttacaataggatctgttatctacattttaccaacagttaactgagagagagtgagaaagagagctctccagctctcatagctagctagtggtgaaaagcagattcatttcaaatccaagcagtctgacttacaagtctgaatttttaactctaatcaccatgctatgttattaatacctgaaatactgtttatcaaactgtgtattcttctcttcaacaagtttttacttgtttttattggcatactaagttcttgtccctgttattttaatgcagttatgcaaagtaatttagattagttgttttttattattttatgaggtagtaggttaagatatgttttgattaacataattggtttacaagacataatactaacattgtgtttaatttgtgtgtatgagaagtcaccatgttgggatttaagagtgtcatctttgccagtttttagctttgttactttgagcaaatcacttcatctgtctttcatgtgtctgtaaatataaggatactgcaggcatacagagattaaaaagaaatagagttagaagtgaaaagagaattgaaagcattgcatagtaaaaaagattccttcgaggagcttgtaagtcattgaagtatatggtaagagagataagcatacataaatctctaccaggaaggtctgatatttgtggtaagagtggtacaaaataaatatttaagctagaaaa

SEQ ID NO: 45675 - DNA, 1101 bp, Homo sapiens
aggcttgcagcctgtcaccgtttatgagtgcttgataatgggaacaaaatgtgccaaactagaaaactgaaggtttggttttccatttcccgtcctggtgtttggttgcctttcaaatagaatttgttgttccttgatactgttaaatgggcagagagctttctttggcactcagcataatgatctaaacagtaataggcacactgccagaataaatgcttttcagaatttggaaaagctgttggagaagcacttctttctggttttcttctgggttttgcgaagttaataaaagatgtcattaatgtcactggacattacattaatgtataacctcagagttgctgattaacttattatagtggctaaagttgtccataggcagaaagaaaaataattaacaataatatatgcagtctttggatttgcatttgataaaacctggagtaggattacagagcatttcccagtgttgccctgggaaatggtaaatggtaaatggtcagatttttcttttttaagccttagtacgtaagaaaagagggggagggtagaatgagctcttggttaccagactggtttctggaagaaacctcatgttctctgaaataattcttgatcagttacatgctcagattgtccttatgcttctgcagacccaaatgtacctacgtgtcatctttttttcccaatctccatttacttctttgagtttttgggcgcgtgtgtatgccggggtgggtgagaggtggcattagagactggaagcttgctgtttgagatgatgatttcattgtttggacaaggggtctgatagaatggatataaaatgggctctgcagctattagctgtgaggatttgggcaagttagtctacctctgcagcactttgcacctctgaaaagttgactaacaccacctagtaggtagcagggatgttgggaggtgtgtatgaaggtcagtggcagtaaatgaagtatttgtgaagcaccttattaaactagtgcctggccagtagtaggtgcccaacaaatgttaattcctttctttttcataaggctgtttccatcagaacatctaggaaagaacgatgtacgtaaa

SEQ ID NO: 45676 - DNA, 1048 bp, Homo sapiens
aatagaaaagttacaagatattatctttaaaattgattaagaatattatagatgctaaagattatcttcataactgcaaatgatgtactttccttctatagtgtatgaagttatgagaaattttattaggaaaactgaatagttaatattagggccataaatgttttaccagagtatggtatgatttatattaatgtaccaatcaatattaaaaagtcctttttttattaaggaaagggtagatataggaaaatggtaatatatttcctaactggataaaattatggaaattttaaataaaagaacactccattgggatgttatttaaattgcttgtttctctaccgggtttacctgctcaggccattctcccatccagtcaccctcttctccttccttccaactctgtgcctactgggtagtctgtgtatttaatcccaactaggcttgttacctggcatgagtaccccacatctcaggcagaaaactggacgacttaccatggaaatgagtttctgtgctttttcttgctgtaaggtccaccgaattccttctactgaaatcagccttcagtattcaattactttttattaaagcactttctgatggtgtgttaatgagcaaccacactggagctgatgaaggggagacaaaaagcggaaaatctttggtttcttttaaaatcacttgcataggctttgagaagacaataacagaggcaaatagtgttacaaattgggtaacttctgacaagaacttgtagttgaaatgctagccagggatgaacagacaagaaatgcaactaggcacagattctctcagttacagctcagccagcacttttacatgtcccgtgcaacataaagctggagaaatgttctgcgcctgctgtagacatcaccaacgggaggaagcttgacacctgggttgccaacttattttttcctaaagtttaaacaagatccactaataagctaagacagtttagggcaaaaggaatccagtgagtatgtttatgtactttggctctctcttccctaccacactt

SEQ ID NO: 45677 - DNA, 1142 bp, Homo sapiens
gtttacatactaataagtcattatatcaatggtaactatatttctctcctagtttttcttagtagttacaaaatgtattatggttagatttttaccccaattttagtaagtaactgagttgtagttttattttttgtattctctttcattgatgtcttaaagtatgtgtacccagtgttttgacatggttaatctcccagaaattagagtaagatagtcaattccaaagtatattaaacaagatagagtgaaaatattatatgattaggagtcaggccgacctgacctttccacttcgctgtgtatgtgatctttcactaaccctcaattttcccacctacaaaaacgtagtgagagaatatacttgaacagtttagtgtggagcctggcacgtggcacttggaatttgtgattgtgttttatgtgtctgtcactgctgggcattttgctggtgctctgtaagtagtactgactgtggagggatgatcattggcaccttcgttatcaccaggtgatagattgcttccagctcacctcatatctgctcattttctgtgcagagtatcacaaacctaacttggagcacactgcaagtgtaaaggcataaatgctttgcttttttgttcgttgtttcttactctgatgcttttttgttcagtgttctgtaaaggaccaaaaagtaggcatatacattagaaagtaggaaaataatcattaaaacttgcatgtatttcctttatctatcatttataaggattgctgtaccacatgaaaatgaatttatgttgtttgtaagtttataaaatagaagtatttcatccaattgcaacctttttgaaatagtttatcaaaagtattggatatagtcttaaacattgctaaattttagagacattggaaataaaaaatacatgtaggtatatagcccaataagacatcttacatagaggaaaaaaaaaaactatccatattgtcttagccaaagtaatataattaaaacagtgtctcaattaaggctgcataaagatgtagtaaattaaagtgtgaccatgggcaagttatttaacctgtgctctagagtaaaatggggatgacaataatagtactgacctcatggggttgttgtaaagttaagcgaaatg

SEQ ID NO: 45678 - DNA, 1112 bp, Homo sapiens
ccttggaattcatttattttctcatatggcagcatatatggaacatgagctccatactggacacaacagaggcactggtcatacaaagactgataagacatggaacccggtattcaaataccgcaaaaccgaatggaggtgacagccccatgacacacaactttgctattgcctgtatctttgcatgaagaaaccatacccgtccttcagaactcagccccatgccctctcttccatgatgtcctcaccagttaaatcaggctgtgatcctccaccctctctaaagagcatgcttggtttatatttcctcattttagtattggtatcatatgacacatattggttgtaagttgccataaaagccaagcatgtgcttatcactttctgtagattattttattgaatcctcacagccataagaaggtatcatctacatttttaaaaaggaagaaatttaagcttcaggaggtgaatttcacacttatgttgctcatgtaccttataactggtagagcccggatttgaaccgattgacttcaatccagagtctttgatcttaaccatgttgttatactgtcattctttatattacagtggctcctcccttagattaaaggctctttaagagcagaagcctttaatttgtgttaccttgtatcccagagagtatctcacacaacactgagcattgtgataactgcccccttctctttctctaccccgcccctgcaccagattccttcatggagagagtctttcacttgtttaggttctgaatcttcttatactcaggtattccaagtcaagtcagtatcattatttactcagatatatttcctgaacacctgctgtgttgcagatggtaggaagacagtgattaaagacatcattgttgtccttgcaagtgccacagtctactggggaaatgggcaaagaccacgtctgtaaagctctgacagagatacatgtgctttctaggcacatggaagggagatgtgtaacccaggcaagttggtcagaggtagcagaaggggcccatggagatattaagaccaatagaagataaccacacagggcaggtactctcagagcatccatacttccgctctgcc

SEQ ID NO: 45679 - DNA, 1045 bp, Homo sapiens
cacctcagcctcccaaagtgctgggattacaggcatgagccaccactcctggcctgtttctacttcttgagggaacacttgaaacgtgcccgatgttagcatgctccccgtggtttgtggcccttgcgtcttcctcggtgctgctctctctcatctcctttctctcttcccacctccccccatcctcaaagcctgctgttttccatctcttccttgctctcttcctgagccccctccaacatgtgtctgctgcagtcagggcccctgttggcttatgctggtttcttctgggcttgtgtctgggtccccctgaggctgcacttggtgagatttgggcaacatgttcttaccagtctgttttccactggtgtccaagagtgtcatgtgctcttcatcacactgggaaaaatgcttagtttaggcttattcttcaatcattattgtgtctataaactaacgcgttgctttttcgtaccccagaataaatggaatgcttctaagtccaaggagaccgaccgttgagaaaagagcctcccggaagtcctcgcacctgcatgtcacccacaggcgcatggtggtcagcatgcccaacctgcaggacattgccatgcctgagctggcacccaggaactcctcgctccggctgacggacaccgcaggctgtaggggcagcagcgcaggtgagggctgccccccactgtggtgctgtgtgtcggtcccaccattcctgcacctgcaagtcattgagcaaaactgggacttgtttcaggagagacgagtgggcttgttttagcagctgagttatttgaaatgtttagaatattcattttgccaaggtatgccttctagaaaattatttctcgtctgtattttctgccacccagtgtcaccgctaaagataacgggggctcggcatggttcggcatccttcacaggtgtaggctgtgcctgtctctgtatgtgtggattgcatgtgtataaatacatatttacacatccacacgtgtgataggaggcagggagcgcaccaggcactttctagagc

SEQ ID NO: 45680 - DNA, 1414 bp, Homo sapiens
gcagctgggctggaggtcacctgacatcccatcaggcactggggttcctgtgatggaggcacgggaggtgaccctgggtggggtagggggtcgtggttggcgtagccagcatcggtccggccagtgtcagcccctgagcctacggcggcccccacccccacacccccaccactctctgcccggcaggtgaacatggtcattgggatcctggtgttcaacaagctcgtgtccaaagacggcatcacggacaagaagctgaaggagcgggcagggtaggaccggggctacgcggctccttgcccacccggagtgcaagacccagagcccacccagccccgggggatggagaacgctccatgcccaatctgagactgcaggtccagggaccccggagcgggtgggaaacggaggcactgagtacagaggccccttaggctcagccagcccctgcctctcaccgtgcctcagtttctccatctgacctggacagggtgggtcccataaagtcctcagaagctgtgagactgattgtgcagggacaccccgcctctgcctggcttgcaggatggcagcagggtgcccccaaggctgggtgctgggggtccctggccccccactcccctaccacaaggcttgctccatggccagggggaggatgtcgcctgtccatgcagggactccctgtctttgtgggaccttcatcatggggaggatggtgcagaggacaggtggagctgatgttcctccctccggggaacccaagcccagggagtgctctcagcacagcagctggacagggtgctggagcaagacagaggcgcttgggatgtgtggctgcacccacctttgagggacagggccctgggcacagaggggaagctgcggggcgtggggagctgactagggcggacaagcccctcttggtcctcccgcccctcacctctgcctgctgttctgtgtcatccagccctggctggtgtctgcgtgggcccctcccctccgtgccagtcttgcttggatgcttggtgtctctctgtctctctctctgttcctgtctctctcttcctggctcctcctgctgtccccagtgaacagacgctttcaggaagccttccccttgggtgcctgtgggttctggtcctggttaggaaccagccgagctggtgtctgatgctgagtgcgtgccatggccctggggtctgtcactctgggtgggagtcgcggtgctttgtctcctggcctgggagatggaggctggaacaggcctctctaaggccttgccctacctgtccccggaacaccctgtcccacactgctcccaagacagtggtcacactcagaagaggtccccagggctacacatccagggtctgagcatggcagactgcctacctggtcgtaaaagcagcagtga

SEQ ID NO: 45681 - DNA, 1033 bp, Homo sapiens
caggctcagggaccctggcacagcaccccacactcccagggcagtgagggccaggctttccactggctcagaggaggcaacgacattgaggctgctggagatgcaggccaggtccagggacatcttcggcccgctgcaggtcagggcaggttctcgcaggcggactctggcccgagggcctgcagcagctctcggtggctgggagcttggtagagagaatctcagacaggagaggggtaggctgttcccctcctggggtctcttttccccttctccacccagtgggtcatgactcagcagaccagaggtggccctgtggggaggcctcctgctgaccagccctgcccttccccgagacgcccgcccccccacaggtgctgctcatctgatctggcgctggcgcagggtgggggcgtggctgccactgaggtgctcggctctccctccccaggtccaggacgctgtgaaatgccgtgtggttgaccggcaggaggagggcaacggggactcagggggctccttccagaacggccacgcccagctcatggtaggactcagggcccggggactcaggctgccctacctgcctcgtacccccgccaagtgcctccaggccctcaccgtgccccaagctcccctaggccccagcaaccctgctgagaggagctctgaacccagtgtgcagttggggaaactgaggctcgccaagtggaacccctggtccggggtttccagctgggaaggcctgagctgatgagtttggaggtctcagcggaggctggcatccaccccacactcacccccgctggcagcagtgcccgtctggctggacaccaccctctgagcatcccagccctcaactcaaggtccccatccttacacctcccaggcccaccctcagtgccctccatccccacccaggaaagtcctgctcagctgccacctaggggtccagcctagcctgcccatcccctccccctaccccgcatattcccacctgctgcctccctggcgctccctgggtgctgcccag

SEQ ID NO: 45682 - DNA, 1076 bp, Homo sapiens
tgttctgtgccaccttcatttcctcattgccagtcccagcaggggcagaagtgagtggggctttcaggctagggggacaacggggagcaagaggaaggcggggagaaggacccaccatggagcccccggccggtgctgagcttcctggaaccaagtgcaaaaaacgaacgactgcccaataaaggaagctccgccgcccatccccaagcatcagactgcgagggtctgtttctgtccccaccactgttctgtgaaccaggtcctgaggcagtgacaggcagtggctttctgagctgtggagaggccaatggaccatgctccctctggtcatttagatatttgaagagcaccttctctagagacagccctggcagaggagctgggacagccccaggtggggagtgtgtgctggtgccagttgggccccaggagggcttcctggaggaagtgacttcggggctgggctgaatgggagctggacaaaaagcaccttctgcccccttggggtctcctgtgaaccagtcccacagcctctcagaggggtgaccctaggacttggggcctcaggtggcttgggtgtatgtgggcctctctgagcccctgattccctctcattcatgcgctggctacagcgcctggtggatccacatgcagctggtggatgcgccatgagcagctggtgctgagcgcctgggagcttcctcagagcgggagggtgggcggggtgccagcgaggggcctgggcctggggggagcttggcttttattgtgccccaaggtgggtacatgcgagggaggcacatagacccctcacgtgccaggcgctcgttctgccttgtggggagcaaagtgtgaggtgtgtgggaggtcgggagccccagggtctgtgcggggtggggcggccttggggacgtgcgtcccgagagtgctgtggctgtctgggtggggcatgtgggtctgacggggaggatgacgggtcactcttgggtagggacgagggaaggggcggggctgaaaatgggcacagggtgttgctgtccagagggtggaggagaggaccaggccgggagcatggc

SEQ ID NO: 45683 - DNA, 1947 bp, Homo sapiens
tctgtcgcccaggctggagtgcagtggcgtgatctcggctcactgcaacctccgccttccgggttcacgccattctcctgcttcagcctccccactagctgggactacggcgccagccaccacgcccggctaattttttgtatttttagtagagacggggtttcaaaatcaggaatgcctttgttctccagacatcgggatatctggacactcccaagtctgggtctctttagtaaacattattaatttgttcccttaactgtgtttgaaacgcttgttccccggtgccgtaaagaaatagcacgtgaacataaatttaatttcctcagcaaggccatttttacttcctgcagaaagggtacactcgccagcagctttgccatgagagtacaccgaacaaaggagacaggctcatttataacctgatgtgtaacaatcgcttttatttaaagtgcgaacggaatatttaatccatttcagccagggatttgcatcttgatactctctcgatggctaaggtctgttttagatctcttatttttacaatagacaccctagttttattattagatgtagaagcaaccggtgtgagatctagaactgaggctactgaagaagggggagatgggggaataatgcgtatttaaaaaatacctagggggtcttttccatttatgtcaatccccataccacagaagcgactgagggcaggtctagagttagttaaggtggaggtggtgatagagaaggacagggttacactgataaggctgacagttcgaaagggtagtcctttcagtgaaatagatgaggggttttagatctgcacagacctttttcttggaagtttaactttgctcctgagcagttgaatgtgtatagtcccgtttactacaaagttggcaggctataggagcagaacattggcatcttggctgcaggtcattacgataatgagagctaggggtaaccatgtccatcagagggctgggacgtaagcatttgtgtgaaaaggctagctgttgttgatcttttacatttccgcaaggtatgacagaacaagcattcaaggcggtggtctgaggtgagttagttacagtaataacaaaggcgctagtaacaataaggaaaggaagcaatatgaaggtacaggaaaattaagctttctttaactttaacttagtaggattggtcctagtacagtcatccatgattctgagagaaagatgttttcttgactggagtgtggtcgtttttttcttggctctgcggatggcagtctcagtggttaacagcataaaatagggttcttcccaggctggctcaagttttttctttctgtcttttgatgaggacgtggttttcaggctggtgctggtgtactggaaattctaggggtggtacctagaactaaaagtcttttagttctgagggaagggaaactggaagataaattaagtatatcatttttgctgcatatcctggggcttgaggccccatggtgatgcctcccgctccattcctgctcagcgccgcccaggggacactgcggccctgcctcctcttaagctcttggccttcttggggccttcactgcccctgtgcactgtggccttggacatgaggggccttgtgacttacctggccaccttcaggccttaagaaagctaaacaccattttatatttgacagtgctttttgtatgattttataccagataagttaaattttacctttatactaatgtgctattaatgttaaacttaataaaatcttttttttttttttttgagacagagtcttgctctgtcgcccaggctggagtgcagtggcgcaatctcagctcaccgcaagctccgcctcccgggttcacgccattctcctgcctcagcctcctgagtagctgggactacaggcgcccgccaccatgcccagctaattttttgt

SEQ ID NO: 45684 - DNA, 1005 bp, Homo sapiens
cctgcgtcctcccctcccgagctccactccgcaggcgagacccccaacactgctccccgacactctccgaggcacccctcctccgtgctcacacccaaacacgtctgctcacccgtgggcttcccaccccgaacacaacgaggactgtccaggtgtcagtgacggtcaccccgacctggtcccctgtccggcctcgccaggtcagcacccgccgcgcgcacagcagggccgggtggaaggaggccgggcctggccgtggctcaggcgccacctcactggggaaactgggaggtggtctcagcccccttctgggcctcagcttccccatctatcccaaggagccggggtaggcctgggcggcgcggggacccccaccgcgggctcgccgactccgcccgccggaggcccctcccgcgtcccgcccctgcccccgccccggggccgcgcggctgcctgggaggctccgggccagccgcggtccagagcgcgcgaggttcggggagctcggccaggctgctggtacctgcgtccgcccggcggtgagtccgcgggcccccggccgggacgcccccgccacctgcgcgcacgcgctcagacccggcggcctcggctgcggtgcacgcggccccggctcagccacgcgcggcggaaggcgccctgcgggggccggggcgggagagggtgggagagagcaagaggggcgcacggggaggcgcaggagaggggctggggctgccggtgggttggtccccagagagctgagcttctcctcccatcccccgcaggcctccccgaatgtttccaaagatctggggcgggagcgggcggagactgccgccaggagcctcccggccgccccagggctgcgcagccactggagcccatcacccaactccagacgctcctggctcctctacgtgggccgggagggacagccttgaggactaggggagggggcacgggaccttgcagagctcctggccggaaagggaggattgaccgccc

SEQ ID NO: 45685 - DNA, 1021 bp, Homo sapiens
ctttggtttgtgacctccaggcaggacggccatcctctccagaatgaagatcttcttgccagtgctgctggctgcccttctgggtgtggagcgaggtgaggtgcccttggggaccccagacctttgtccagctgtgccctgctccactccctctccacccctctcccctgagcagacgccccaggggtccttccaggccgctcccagcagagggctcacccggcctggccacactgtctcactgtgtgtttgagtgtcgcttgacctgctcgacggccagggtggggtgtcactgtctttgctctgccttcagcccagggcctggtatacagtaatttctcagtaaatgtccactggggtcaggcctgggagggacactggaggcttccctgagacaggtgtgtcctccttccgcagccagctcgctgatgtgcttctcctgcttgaaccagaagagcaatctgtactgcctgaagccgaccatctgctccgaccaggacaactactgcgtgactgtgtctgctagtgccggcattggtgagtgccaggcctcagaccgtgccttcctcccctggccatctccctagcccgggccggggctcagcagaggccattgctgtctgtctgcagccgtctgtctctcccctgacagcctcatttcccatgcagggaatctcgtgacatttggccacagcctgagcaagacctgttccccggcctgccccatcccagaaggcgtcaatgttggtgtggcttccatgggcatcagctgctgccagagctttctgtgcaatttcagtgcggccgatggcgggctgcgggcaagcgtcaccctgctgggtgccgggctgctgctgagcctgctgccggccctgctgcggtttggcccctgaccgcccagaccctgtcccccgatcccccagctcaggaaggaaagcccagccctttctggatcccacagtgtatgggagcccctgactcctcacgtgcctgatctgtgcccttggtcccaggtcaggcc

SEQ ID NO: 45686 - DNA, 1117 bp, Homo sapiens
accctgtgacgacaaagaaaaggacgggaaaggtggctctcaaggccccagggaaccgcccagagacgcctggggttccagaagctggaaaggcatggagcggtgcgggaacaagcctctgcggtggctggagatgtggggatggagactggtcatgccttcacacacttaaccagaaccctcccagctctccctcccctgcaaccaagccagcaaggcgacacggtggctggcgctggcgagaggcaagtgtgcttgactgcctttctccactcttgaggacaacacccagagtggccccgtctttgccccaccagcccaggcctaaagcttcctcatcatccgcatcccggcctgggacttaggcggacttctgccagctgtgtcacgtgcaggggactgcagccactgaccccctctcccttctgtcctgctcttctctaccccacagccccaggcagatcttcagtgcatgtcagctctcctccctccctccctgcagacccctgtgccccgcagtgccctgagaatgacgtctgagcccccagtggaggtgtcaaggctgttcggtctgtccccatcccgttctgtcctccccttgctcaccacactcccctgcctggtcttccaaactcgaaccccaggcaactccttcaggcatcagacctctgcccctgcgcccctcctgcctctctgtgatgggctggcccttcccttctgctgcctcccctccctccttcctgctccaacccctatctctctctgatgctgccccttagagaagccttcttggaccttaagcctggccactcctctaagcccctcatctccaggtgtggtctaggaagtgctctcagcctctctactccagtggctcggggtctctgaccagccctcctgccagggaagctttgaaggttcccacagggacccctagagacaagggcactgcccgtccagatggcaccctcaccccaaccccagcagcactggctggagcaggccatgcctgtgtgggtatctgaacaggcactggattccccgatctcaacaaaagaagcccatggaggccttttctaatccacagtccaagaggacaaatcaagacaacaggctg

SEQ ID NO: 45687 - DNA, 1051 bp, Homo sapiens
cgtctctccagcgagcccgcctcgggcccgagcctggggtcttgtccctgaggagcgccgtgtgggtacccctggttccctctccttccccccgccctgagcccaggccggagagccgcgggcttgagtgtccgtgtcgcagtcttcaggtccgccaggcctgcgtgaggttgatgccgcagacatgttttacggtgtggcaggactgggtgtgggcgttcccgcggctgtgcctgaaccctgcctccgctccctggggcctcgaggcctctcggtgctggaggagatgcagcgccagcatcttctgtgctgttggggataggggtggggagggaaacatgatgagcagaattagaattaagtacaagacttggacctggagaattcccagatggggagaggtggtgtggctacgctgtcctgctttttcttgaaggtacccttttcccttcgcgtctttaagaatcccagtggcgttctctgtgcttctgtcaaggctgtcttgctcccttcacacacaggctacgtcatggtccagggactctcagggtctgggcagcgcctggatgctggcctcagactcataggtagttggtgtgaagcagctcagggagctgccgagcttgtcttcgctgcctcagggtcatggaagatgacccaggagaggacacagggggctcgtcgttgtccttgggcagagccctgagcagcatgccggtagcagaagccaaatggcctgggtggggcgggggcagttgacagctggctccagttctctgaccttacgcttcttacctccctgaacttccggggcatcgtggggagcactaggaacagaagcgctccctgcctagcctgtggcgcccagtaggccccttggtgtggcgcggggcaaggaggtccagatgttagtggagctctagtccacgtctcactcggttgccctctggttctgcttttcctgtttcctgagggtgaagcttggtgtatcctgttaatttcttcaggctgtaagcaacacacagtgactctggctgggagcttgaggctg

SEQ ID NO: 45688 - DNA, 1756 bp, Homo sapiens
aggtaaatggacagtggacagccgcctcgccaaactgttagtctttacctctgaatttcatctggacatgaaccccaaagtccagttttgtaacgatataatttttttctcatgaggccatattttgagttcttaaatactaccaaccctgaacgtctcaggacaaataattcaaaaaagagatctacattttctggaaaatcagcattactagagatgtttcaaatgtagattttaccagaccattttaatcaactttattgagattcaattttcatatagtaaaacgcctatttaagtgtacaaggttttgaaaaatctatacacctgtgtaaccaccaccacctgtgtaaccaccaccgccagaaccaaaaacgtttctgtcacccaaagaagttcccttttgccttttcctagttaagcccactccagccccagataaccactttctatcctcatagattagtgttgcttggtttagagcctcatacaaatggattcatttactatgtgttcttttgcgtctgatgtctcactttggcatgtttttagactcatccaagctgttttgtgtttcagtagttctccttgctgaatagtattccattgtgtggataagccatcatttgtttattcatccatgtgttaatgggtttccagtctcggctcttaaaactatgagcatttgtgtaaaagtatgtatttgcacatgtgtttttatttctcttgggtaagtacctaggactttaattgctgtgttgtaagtgtcttagttcattcaggctgccataacaaaataccatcaactgggaggcttataaacaacagaaatttatgttttacagttctggaggctgggaagtccaagatgagggtgtcaacatttggtgtctagtgagggcctgcttccttttaagtagatgtctttttactgtgactgcacgtggtggaaagggactagcaagcttaccccattcatgagggctctccccttgtgattctgtcccctccccaagaccccacctcatatcatcttatgggttaggaatttgacatgaattgtgcaaggatgtaaacattcagtccattgcaatacgtgtttctaacttcctaagaaattgtcacacagccctctgtagtggttgaatcattttacactattactacattatgggaagattccagttgctccatatctttgctaacacttggcattgtcagtctcttaaaatttaatccactctagcctccttatgattttaatttgtatttgcccactgaataatgtatgtctatgatttcatctgcttattgcttttccgtgtcgtcttttgtgatgtgtctgttcgtgccttttgcctgtttttaagttgggatgcttattgttgactcaagttctttccatattctgcatgaaaaacatacatgtaatatatagaattctttgtctccatttgtgacaaatattgtgaatattttcatgtttggtttgcctgttcattttcttaatggtgtcttttgaatattttttattaagcctaatttatcaaagatttgggtgtggtggctcatgtctgtaatcccagcactttgggaggccaaggtaggcagatcacctgaggccagaagtttgagaccagcctggccaacgtggtgaaaccccgtctctactaaaaatacaaaaattatctgggcgggtggcacacccctgtagtccctgctactcgggaggctgaggcaggagaatcacttgaac

SEQ ID NO: 45689 - DNA, 1049 bp, Homo sapiens
cgcgctgagctcccacccgggagacgccggcagcggcgcaggcctccggttgcttgtgagaaacgacccaagccccaaatcccgaggctggcggtcgtcccctcgcccggcccctcccccaccctaaaggcggcctagagccctgggaaggccccacggcgccgcccgtccggtcctcacgcgcttctccgggcccaggctccggggctccccacagcccggggcaaaggtcacggtcttcccttgcttccccctgggttcccagaagcaggtggagttgcgcagggctgggtcccgacgctgtcgtcaagccaactgttccactgttccttgtctgtcttctctaggggcggaccgcggaacccgaggccatgtcccatgaaaagagttttttggtgtctggggacaactatcctccccccaaccctggatatccgggggggccccagccacccatgcccccctatgctcagcctccctaccctggggccccttacccacagccccctttccagccctccccctacggtcagccagggtacccccatggccccagcccctacccccaagggggctacccacagggtccctacccccaagggggctacccacagggcccctacccacaagagggctacccacagggcccctacccccaagggggctacccccaggggccatatccccagagccccttcccccccaacccctatggacagccacaggtcttcccaggacaagaccctgactgtgagtctcaggaagggaggggtggggtggccgggagggcagggggaggtgcttgtgagtggcgctgacccagcctgtctgcttctcagcaccccagcatggaaactaccaggaggagggtcccccatcctactatgacaaccaggacttccctgccaccaactgggatgacaagagcatccgacaggccttcatccgcaaggtgggtaggggcatctccaaggcggtgggggctgtggctcccagcggatgactctgagcggctccttccccaggtgttcctagtgctgaccttgcag

SEQ ID NO: 45690 - DNA, 1045 bp, Homo sapiens
ctgggacgtcctgagtcattggcagtctcgcttggcatccattctctgaccgccgccggctttccacccacctgcccggctcatcacctctgactcctgcgggccttccagccggcgctatctcgcagcccccgaccagctcggcctgctgtcgggcatctctgctgtcctccggctgtagggctacctgcctccctcccggggggtgcactgcgagtccgactctagtgggggcagcgcctagcggactcccaaacccgctcaggtcctgccggcctcaccggcaccgcccaccctccagccggccgcggctctgcgcttgcgcgccggcagcacacagtgttaggggcgcgccctctgctctggacatgcgcgccgtcgcgagcgtctctgggaccggaagtgcgggcgagcgcgggtccccgggtctgacaggagcagcctgtgggcaccgcggcggtagttggaggcgggagagggtccgtagccgcgccgccctgccccgccatgggcctcctgtcggacccggttcgccggcgcgcgctcgcccgcctagtgctgcgcctcaacgcgccgttgtggtgaggacagggcccggggaggcggggacccgagggccctgggctcgcgccggcggccccatgcgcggtccccatcgagggccggggccgctccagctgctcgcgcccctccggctgctcgcgcccttccgctcctgccctctggaagcactgagggtatcaggcccaggcttagggctcgggtccggcgtcccgatgcaggactccgggtttaggtctcccagacccgcgcgatcgaccccgggtgcggaggttgtggcctcgggtcggcgtctgaggacccgctgacgctccggtgcccctccgtcctctctcacagcgtgctgagctacgtggcgggcatcgcctggttcttggcgctggttttcccgccgctgacccagcgcacttacatgtcggagaacgccatgggctccaccatggtggaggagcagtttgcgggcggagaccgtgcccgggctttt

SEQ ID NO: 45691 - DNA, 1027 bp, Homo sapiens
gaggaccctgcggccttccgcagtgtttgtgtccctgggtacttgagattagggagtggtgatgactcttaacgagcatgctgccttcaagcatctgtttaacaaagcacatcttgcaccgcccttaatccatttaaccctgagtggacacagcacatgtttcagagagcacagggttgggggtaaggtcacagatcaacaggatcccaaggcagaagaagttttcttagtacagaacaaaatgaaaagtctcccatgtctacttctttctacacagacacggcaaccatccgatttctcaatcttttccccacctttcccgcctttctattccacaaagccgccattgtcatcatggcccgttctcaatgagctgttgggcacacctcccagacggggtggtggccgggcagaggggctcctcacttcccagtaggggcggccgggcagaggcactctggcctctgatttaaagtgagaggtgtgcggctcttcctctcacatgaacacatagaggtgattgtagggttttaattggactaatttcattattgttgtctttcagggagcagggagaccctagcagagggcgagaggtggggagtggctggccagtgggtcaggacacccaacattcgttgattaagcttgcagttttatatactgcagttcatagcaccccaaaacaattatagtaacatcagagatctctaatcacaaatcaccatcacagatataatattaatgaaacagtttgaaatattccaagaatgagcaaaatgtgacacagagacacacaccaagcacaggctgttgaaaaaggcgcccgtagactcactggacacagggctgccccagaccttccacttggttaaaatgcagcccctgtgacgtacagtaaagcgaagcccagtgaaacaacgtcacgcccgaaatgggcttgcttgcttgtttttattgacacatgatagatgtacatatactcggggtacctgtgataacttaatacattcatattatgtgtaga

SEQ ID NO: 45692 - DNA, 1048 bp, Homo sapiens
cggctcactgcaacctccacctcccaggtccaagcaattctcctgcctcagcctcccacgaagctgggactacaggcacccgccacctcgcccggctaattttgttgtatttttagtagagatggggtttcaccgtgttagccaggatggtctcaatctcctgacctcgtgatccgcccaccttggcctcccaaagtgttgggcgcgtcagccaccgcgcccggcctgttgtgtactcttgataggatgatgagaacagcactctacctctttgatcttcctcccaaaaacatacgtaaccccagctaatgatgaaaaaacatcaaacaaatccaaattgagagacattccacaaactgtttgacgagtcctcaaaattgtcaaggttctcaaaaactaggcaagtctgaaaggtgccagagtcagtgggactgaagaagatgtgacaactggatggattttggatgatgtcctggagcagaggaaggattgggtaaaaagctaaggaatctgattagaatgtgggtcctagttaacaatgtgtctaatgttcttgagacaactgtaccacacaaaggcaggatgttaatgatgggggacactggtgtagggcatgtattctaaagtaaaaaggtggttcttcagagtcaccggagcggtttaacaaaacattagaaacttcagaagaaaagattcctgaactaaaagcaatggaaactgtccacagtgatgtacagggagaaaaaggactgcaaaaacttagccgagcttcaaggacataatatcatgtggtctaacgtatttgaggttccagaaaacagtggggaagagaatacagaaatatgaccaaaaggctggacacggtggctcctgcccgaaatcccagcactctgggaggctgacatgggtggatcgcttgagcccaggagttcaagaccagcctgggcaacatagcaagaccctgtctctataaataatacaaaaattagccgggcgtggtagtgcctgcctgtggtcccaactactcgggaggctgaggcgggaggat

SEQ ID NO: 45693 - DNA, 1038 bp, Homo sapiens
acctcggcaaacagcttttttattcaggagagcttcaagtcaaatcagagacagccttgggagtggactcttaggtcagatgctgacagtcctctgggaatggggccctggaggagctcaagccctggcccaccccgcagcggctgccaggacgctgttcccacggggactgcagctgttggtttttaaggctgcagatggagtgggaatagggcatgtaaaatgccacaaagcctggctgggcacagaggctcacgcctgtaatcccagcactgcaggaggccaaggtgggcggattgattgaggtcaggaattcgagaccagtctgggcaacatggtgaaaccccatctctcctaaaaatacagaaatgagccgggcgtggtggcgcctatagtcagctactcgggaggctgaggcaggagaatcgcttgaactcgggaggctgaggcacgagaatcgcttgaactgggaggctgaggcacgagaatcgcttgaactgggatgcagaggctgcagtgagccatgttggtgctggtgcactccagcctgagcaagaccttgtctcagaaaaaaaaaaagttcacaaagcccactgttcttactaagattcagctgtttttcttgaataaatgctccccgtgctactgtaattctttggttaactttcagagttctggaaagttggcttggcgcttttcgccgtctctctcctgctgccttggggtcctttccgtgaccgtttccctccctgacacgtgtacatccctgtgtatttcacatctctctatgctggaaagaggttctccacttctagtgccacaccacgggggtctttctggctttttccctgtttgcatctgcagctcccttccctggcagggagaaacctgccccactgcccttcaccagtttcttcactgagtcagccaccccttcctatgcagacacccctcacccctctctggccctgcttcaggccccccttccccgccgtgtgggcttctcgctgtcccctaagccttcgatgtcccctctga

SEQ ID NO: 45694 - DNA, 1049 bp, Homo sapiens
gcggctcgcgtcgcccgccacccagcgcgttggtttctgcgcacgcagcttacagtaacgtccctggcgcgcttctgctccgcgagccctctggttaccccggcaggaacctgcttttcttcgccttagggggacgtcagacaagggccaggtcagaagaccaagctggagaaatgcaccaggccctgcgtcaccgggacgcctgccttgcacgcgactcccaggctctccacctccccgcctgcagagcccggcgagaggagggcgagggcgagggcgagggcgcaggccccttggtggtgtcttctcagcccacccactctctccacaaggagctccacgtccctcaactctcagggcctcccagtttccaacgtgggccagcctctccaggatgtcagaagtctgggccgctggatcgccgggactcaagaggcttctgtgcatttgcacggcctgtgcaaccgccctgttgttttttgttttcttttttctttttttgagacagtctcactctgtcgccaggctggagtgcagtagcgcgatctcgtctcactgcaacctccacctcctgggttcaagcgattctcctgcctcagcctcccgagtagccaggactacaggcgcgtgccaccacgcccagctaatttttctgtttttagtagagacgggctttcaccatattggccaggctggtctcgatctcctgacctcgtgatccgcccacctcggcctcccaaagtgctgggattataggcgcaagccaccgcgcctggcctgttgttattttttctaaagatgggggtctcgctattctgcccaggctggtctcgaactcctggcctcacgcaatcctcccacctcggcctctgaaggtgctgggattacaggtatgagccactgccccagacatcttgtatgttaaatgaagcaactaatcaactgtaacagccacagttgcggcccaccttggcttggtgtgcatattgcacagggcatggagtgagaacatcctggatctcaggatgccagggttcactgaggactct

SEQ ID NO: 45695 - DNA, 1046 bp, Homo sapiens
tgccatccaccccgctgcccctggatgcatctcccaccccaactacaggatctgcccccaccagccccgcccctccctggagccacagccctccctgccgggcccagctgcttcaggctcccactcaggcctctgggttcctccctcatgaggtccctcccggggctcctacaggctcccaactgcccagtagtgagccccacgttgtgaatccccagccgcaggccgactcctgggcgtctccccaggcccccaggctccccgaaggctttgcagccaggccgggtcccatgggccgtgggaccctcctcacccactcccctggtctgcctggactctccctcaccgtcttgggggtctggccggcagcccgggcctgcatcctctgcagcagccagctcaggcccggggtcagggccttggggctctcgagcagggccaggaggtggtctgcatgagaggcccagaggccagcccgagcgtcctcacaggtgccctcggggttgctgaggtacaggacggcggcggcactgaggcgggcgacgtacctggcctccaggaccgggcccgggggcagccctgacccctcaggctcgcccaggcccagggcgtcctccacagacaggcactgtgggcagagacaagtgagcaggggcgctgggcccaccagggaggggagaggcaggcctggccaggggcttccccgagggcctgtttccctttcaagtccaacaacgtccaccatcctctctcaacccctggcgcccttccgtctccccaggcccctgtcctgcttccccaactacaggggtgcacgcagaggggtccccaacagtggtcccccatccccaggggactcccctggagccactgccaatttgatggcagagggccggcagggggagttggccctggggtcctggggagaagagggactgtgtccctggaaaggcctgtctgccctcatgagcaggagggtgggctctggcctgtggggagggtcagggtgcccaggtactgccactagcctcctccgcctcctggag

SEQ ID NO: 45696 - DNA, 1033 bp, Homo sapiens
tttaattctatgcatacttggttgacagtaaactcttaaagcattgcccagaagcacggaggagacagatgatgtggtgttcctgcctgtcattcctgggctttatcctggggttactcaatgatgtccccaggggcccagagccactgaaagttgtggcttagcacagctgagcgggcctgtgggggctccctgctgctctcaggaccctcccaccccccacctccgcagctccttggctgaccccttgccttctgtacatccctgttccctcaggtgtcctgggccttgggggcactgtcatctggagggcctggcactcagctccctgaggggcagcaagggcccccagccggatgcccagggcggctgccagaactcaagggtatgacaggcttgggagcctagcggggcagggagggcggctggaagaagtgcagcttctctgtgctttagggtctgcgaggcattatgctgacctgatccccactgcaggaaatatccgtgtgctgtgtcggctgaggccagggacatcttctagccttgtgagtgtggagcctggcccagggggcaccgtcaccacctgctaccgggggcgccatcgtcgattccgcctagactgggtcttccctccagacgccagccaggaggaggtgacagcctgcctttgcagccatcctgaccctttttcagagttccctgaagagcaggagaggctccagtttccccttcccagtctgggtgtccacctggaggagagagggtggctgggctctagccaggaaggaaagggaaccgagggggctgggaagcagggcaggcagcccagcttggtgcctcctcctcccaggcttcactgcctgcccactcccctttgctggggtccagggtttgcccagctatgagggcccctcattgctttatggccccaaggcaggcggtgggtggtgggggccgtgggtgaggaggcaaccttctagtcttagtgtgctctctctgccttgcctggatcccactctccttccccaccctt

SEQ ID NO: 45697 - DNA, 1088 bp, Homo sapiens
tggatgccctctcttgggaatgtccccagtcctggtcagctgtctctctcctttgcaattttgtctgcctcccctcagcctaaaagtgtgcagaaccctcaattctgttaagtcaccctgtggagttcctgtcttctgttttccccaggcagggtgcctgagctgtattccccagcacacccactcccgcagccctccagtgtggctgcaggcggtggtgcagccttccagactgctgcccagttgcctgatgtcagagcccctccacacatgagcctgctccctactgccaacaccgtggcccagacagagacgctttccgaggaagaggtacctgtgaggcgcaggacttgcagactggccaggggctgcagggcctctcggctgatggtgcccagctggttcctgctgaggtccagcagtgctagggaggacagccccgctagagcctggtcctccagcagctcaatgctgttttcttgcaggtgaagctcctgcagtcgctgaagtaaggacagcagatcgtgaggaaaaagggcgccgaggttgggggcatgtctctcttcttaccaagctagactgggttgccttttctaactattccagccctacagggcgaggggccataatggagtatcccgcccctttagaccccaggcgctcaccggcaggtgcaagaaggtgaaatccagcagccgcgccagctggttgcccgccaggtagagcacgcgcagctgggccaggcctacgaaggcgccgctgcgcaagccgcgcagccggttgctagtgagcgccagctccagcaggcgcggctgcgcgcggaaggcgccggcctccagggcgcgcaggctgttgttgtgcaggtagagccggcgcagagcggcgagtggcgccagggctcccggctctaggcgggcgatgttgttgtcctgcaggaacagtgtctgcaggccggggaaagaggaggcgcttaccccgttgcgggggtcttcctctccctgggggcaccccgtcctcccgcagctccacacggtgcccacctgcgtccctggcgggattcccagcgggacgacgcgcaaccgcagggc

SEQ ID NO: 45698 - DNA, 1046 bp, Homo sapiens
tggtggtccttcatctaaaattagcaccctcctccccttgacattttctgtctcagcaacagcttgatctgttgtcatcatatcactgctccattatttttagctcagtgctgtttaatctgattgaaggtttacttcctaattccgaagatagaactaaaagcaggtttttttcccctctaaccaggtagcccctccctgaggacatgcactccctagacatgagcaaacacaaagcagcagtaacttaccgctcctagtccaagtcctaccctagtcctgggttgcagttcttaccagagtggagggtggtatgtgttgaggggtcggggatcaagtcttctggcagcctcataccctgagatactctggttgccttgttggggtgaggacaacacgtgtggccatcgcagtggcccaggtgggtcctgccacagactgccctggacagacagtgagtgggggctgggtgggggtggtgtggccctgctcttccatgcgtttgcagtctgtgccctctgtgcaggggtgattcacgaatctgtctgatccacccccatcgcccttcgtaccctaacatgtcaaaagggctctgctgccaaatgtcacttcatagcattgtgaccaagcagccctcctgcctctaaacgcactctttatttttatttgagagagaacctcactctgtcgcccaggctggagtgcagcggggcacacttggctcactgcaacctctgtctactcaagcagttctcctgcctcagcctcccaagtagctgggattacaggtgcgtaccagcacactcggctaatttttgtatttttcgtagagaagggtttcaccatgttggccaggctggtcacgaactcctgacttcaaatgatccgccctcatcggcctcctaaagtgctggaattacaggcatgagtcactgtgcctggcctctaaacacatgctttttgttaactgatgcctaaagggaaacatctctttacaaagtggcagctacttagacggctccagctctacagaaatggatagcccc

SEQ ID NO: 45699 - DNA, 1033 bp, Homo sapiens
aaaaaagactatctccttttcctgttgacatgtggagccaccattttcatctatgaaatgggatgtttctgaaccctgttctcttccctgaatctctcttgtgggccagcttcctgcttttggtttgttttggtttttttttgtttgtttgttcatttgtgtttttggcttttttttgaaataaagtctcaccctgtcacctgggctggagtacagtggtgcgatctcggctcactgcaacctctgcctcccaggttcaagcaattcttgtgcctcagcctcctgagtagctgggattacagctactcaggcatgtgccaccacacccggccaattttttgtatttttactagagatggggtttcgccatgttggccaggctggtctggaactcctgacctcaggttatccacccaccttggtctcccaaagtgctgggattacaggtgtgagccaccgtacctggccagtttggctttgttttttattttggggtggtttttgttttttgctttaattttgtagtgtttcttaatactacaagaatactaaaagaattaaactcacccgtttaattcttttttttctgggacggagtttcgctcttgttgcccaggctcgagtgcaatggcgcgatctcagttcactgcaacctccggctgttgggttcaagtgattcgccgcctcagcctcctgagtagctgggattacaggcatgtgccactacacccggctaatttttatattttaagtagagatgaggtttcaccatgttggccaggctggtctcgaactaacctcaggtgatccgtctgcctcgacctcccaaagtgctgggattacaggcttgagccaccatgcccggctgcatactaattttagaataagttgagttcctaaaagccactggaatttttattgggagtgctttgaaactgttttctgtcaatgtaaaagttttgatttttttgctttgtgaatgtatttttagctgattattgctgtagtacaaaaatgctgttggttctggagg

SEQ ID NO: 45700 - DNA, 1141 bp, Homo sapiens
tgccccacaccagtgcctgtaggatggacctctctgctcacagaacccagccctgccccagcaatgaacattcattgctatcgaatgagtgaacaaggtaaaaagtatgaaaccacttttgagaactgtcaaaggctctgccttctcttgcacgtttccacctggggcctcacagtgctcagtgcaactatcctgggagccttgagccctggcccccgcatttgtagtcttatcatttctctgagcacagggcctaaggaacgtctttgttcctgtttatttcagattctacgattaggactgaaaatgagcaggcctgtgaggacatggacatcctaaaatcagaatcctatgggacagtggtcagaatctccccacaggactttcctcagaatcctggctttggagacgtttctgattctgaggtctggttagacagtcatctgggcagtcccgggctgaaagtgacaggctttaccttccaaaataactgtttgaatgaggagactgtggttcccaagaccttcaccaaggacgcaccccagggatgtaaggagctgggaagcagcggcctggattgtcagcctcttgaaagtcagggagagagtgcggaagggatgtcccagagatgcgaggagtgtggcaaaggcatcagagccacttcagatatcgctctgcattgggaaattaatacacagaaaattagcagatgtcaagaatgccaaaaaaagttatctgactgcttgcaggggaaacatacaaataactgccatggagagaagccgtacgaatgtgcagagtgtgggaaagtcttcaggctctgctcgcagcttaatcagcatcagagaatccacacgggagagaaaccctttaaatgcactgagtgtggaaaagccttccgcctgagctcaaaacttattcagcatcaaagaatccacactggggagaagccctacagatgtgaggaatgtggaaaagcttttggtcagagctcaagcctcatccaccatcagagaatccacacaggagagaggccctatggttgtcgtgagtgtgggaaagccttcagccagcagtcgcagctggttagacaccagagaactcacactggggagaggccctacccttgcaaggagtgtgg

SEQ ID NO: 45701 - DNA, 1035 bp, Homo sapiens
ggatctctcgcctgagtcagcatcagctgattcacactggagagaagccttataaatgcaacaagtgtacaaaagcctttggttgtagttcacggcttattcgccatcagagaactcacactggagaaaaaccatttaaatgtgatgagtgtggcaaaggctttgttcagggctcacaccttattcagcatcagcgaatccacactggagagaaaccctatgtgtgtaatgactgtggaaaagccttcagtcagagttccagccttatttaccatcagagaatccataaaggagagaagccctacgaatgcctccaatgcggaaaagccttcagtatgagcacacagcttacaatacatcaaagggttcacactggagagaggccctataaatgtaatgaatgtgggaaagccttcagtcaaaactcaacccttttccaacaccagataattcatgcaggggtgaagccctatgagtgcagtgagtgtggaaaagccttcagccggagctcatatcttattgaacaccagagaatacacactagggcccagtggttttacgaatatgggaatgccctggaagggtccacctttgtgagccgtaaaaaggttaatactataaagaaactgcatcagtgtgaagactgtgagaagatatttaggtggcgttcacacctaattatacaccagagaattcacaccggggagaagccttataaatgcaatgactgtggcaaagcttttaatcgtagctcaaggcttacccagcatcaaaaaattcacatgggatagaccacttacatataaatgtgtatatatgtgaataaacctatagccttaacttacttattttatatggaatcgtttatactgacaaacatgtagaatgttggtaaaggttcagaattgctctcaagaatatccaacttcaggccgagtgtggtggcttatgcctgtcatcccagcactttgggaggccaaggcgggcacatcacgaggtcaggaggttgagaccatcctgggtaacaggtgaaac

SEQ ID NO: 45702 - DNA, 1037 bp, Homo sapiens
tagttgatttggcagcaagcctgtgtcatcctcaattgctgtctccccagcactgcatacttttttttctttttttttttttttgaggagctttgctcttcttgcccaggctggagtgtgacggtgtgatcttggctcactgcaacctctgcctcctgggatcaagcgattctcctgcctcagcctcccgagtagctgggattacaggtgtgcaccacaatgcccggctaattttgtatttttagtagagatggggtttctccatgttggtcaggctggtcttgaactcctggcctcaggttatccacccaccctggcctcccaaagtgctggtattacttatatacttttaatacttcaactggcatatcagatctgtcttcaaaataaatctcaagtatttcacgttttctttatcctcactgctgctcattctacttaatgactgttcttaccctgcctactgtgttagccagactgccccttcatgtatgttggatcactgtcttctgattcagtgacttcactgtacctaggatatgatatgaaggctgatgtacaaggccctgcctaggcctgcacatgtttatgctcctgacggcctctctgatgttgtctccctctgctcctggggtaactggacttaattcaaggtcttcaaccttgctcttccttttgcctggattattcttcctccagatcttagcataactggcttccaggaaagtaaacatcagctttgtgtgagaaagctctgccctatcattcatcaggccgaggtaacagatttaggaaacagatttcctgcatggtcactgcagatttaaagtgtcataatgaccccattgagtgtctgttttcccactgagaatccttgtttattaaaatcatggacaaccactttgctgttagaaatcatcagtaggaaggaaatgtctgatctcaaaaagattccttgatttacaacccagatgcagagcttcaagtaagggggtttagaactctgcatctcaaggaaacagaagcctggttcactt

SEQ ID NO: 45703 - DNA, 1019 bp, Homo sapiens
tggagaagtagaaagtgtctgcattctgcaggaacttatattgtataaaatatattgtatattgtataaaaagaatttctctttattctaagtgcaatgtgaagccaatgaagtgctttaaacaggtgatgtgatttgattgaatttattacttcacttaacaaatattcattacatgcccactgtttgtcagatattgctgtagcccctggtgatacagtagggaataaaacaggcaaaaatccctgtcctcttgcagcttataatggactgcaatgtttaatatgtcagaggaggtccatggaggagtgacttctaagcaagaatctgaaaaaaatgaggatatctaaggagggaacaaatggttcaaaagccctataattgcaagcaggcatgatgaagcaattgcagttgtcctgactctcaacaccgtggaactcaaaggagatggaaagattccttctatccctcatatattttctctctttctgtctatatatatagaatatgagacatttccctaaccattatgtgtaattacaattacatatatatatgtaattgtaattacacataatgattagggaaatgtctcatattcttctactcagaaataagcaatatagcaattactgttttttacattttacagttacagtttcagagaaagtttgatatttatctaaaatttttcaatgtatgaactttttcatttgacaaaccataattgtacatattcttgggatacagagtgatattttctttacatgtatagaatgtgtagtgatcaaatcagggtaatttccactaatttaaaatgccacctttatgttattgtaatttatatatatgctgtatatatacacacacacacatatatatacatgtccacatacactgtgtgtgtgcacatgtacacacatgcatatgtgtatataatgcccagtataagcaatgtgcacaaataaaattagctaacagagatagtatagagtgagaggagaggcagattaatcttt

SEQ ID NO: 45704 - DNA, 1023 bp, Homo sapiens
tcacccaggctggagtgcaatggcgccatctctgctcattgcaacgtctgcctcccatgttcaagatattcttttgcgtcagcttcccgataagctgtaattacaggcacctaccaccacacccggctaattttctgtatttttagtagagatggggtttcaccatgttggccaggctagtcttgaactcctgacctcaggtgatccattcgcctcagcatcccagtgtgctgggattacaggcgtgaaccactgcatccggccgactctcagttttcacagccttaacagatgtaaagagcagagatgactccaagctgggtctgcccagcgtttcctcctaaacgtgtgcagatcctgtgttcctggcaggagcatcctggcgtggtgccgcgctctcctcactgcagcccacttggaggagcacccgtccatcccaccaccactggcgatctcacttggaaatggcaaatattcatttacaatcacaaatttcatcctgtcaagcttcggatttcactttgccagtggttttcactggccttagaaccgtggactccagacaccgagttctcctgcctgctgtcctctcccatccagtctgctacagctgcctgcagtcccactcatggggacatggactcccaggtgtcttggggattttatgtgggttccctcaacccattcacccagtgctgaccgtagttttttaaggctttttctagataagtccttcaagtcacagcaattacgatatctaaaagtagaaaagttaatgttgattttctaaagacaaaaaaataattcattattagattgtctgtgagacgaccgtcaatttttttttttttttttttttgaggatagaatctccctatgttacccaggctggagtgcagtggcatgatcttggctcaccagagtctccacctctcgggttccagcgattctcctgtctcagtctcctgagtagctgggactacaggcacctgccaccatggctggctattttttgcaatttta

SEQ ID NO: 45705 - DNA, 1058 bp, Homo sapiens
ccatttaagggatcggcagatataagccaagaagaaaaactgaaaaggaagagccaaaaaggtagagggagaagtaggaagtcaggagaaaaatgtatttcaggaaagaaatggtcgacagagacgaaaatgttataaaaatgccaagcatggcaagagttgaaaatatacgttgaatttagctacagaaaggtagctgaattactcaagcaaaagtggtttctgtaatgtattactttaatttcacgtcccgaacagacttgagtattttataatatagaatatttatatcgtagagaaaaatgtagaatatttacatcatggagaataaatgagagatgaacatctccaaacaccacctcccaactatatttagtataattaacaaaaaacaagctattaaatgggcacttatacaatcctagaagatacagaaaaaaaaggaaggaaattacatagacttcaacaatattcctggatcaaccacaaatgcttaattcttgactggtgtaggaaatgatgaagtaattattctttacacgaagaaaatctcaaaccttgctaaactgacttatagtcagaacatgtctttttcagtcacataatgattaatttaaattcttgctttagaaaatactttattccttaaatttcagcacaattttgataaactttgtctcacagaactgcttcacaactactgaacatcctaaaatgcaaaactcaatgcccatgttcagtcgacctaaagttatctaaaactgtctctaatagcatacagctgattttatgattttcaagaacattcccaccaaaggcagcaaagaccatgaagtagcagatgactgaagtggcaccttgagtctcataaaacacattcaacagaaaatggctgctaggaacatctctgataattatcaaattatctctcaatatcaacttgaaactgtggattcagaaatctatattaaaaaaaaaaatcaagtggataatcctgaaaaatattgctaacagaccaaatacaggattacttcaacgacaaacatttgagcaccaac

SEQ ID NO: 45706 - DNA, 1048 bp, Homo sapiens
atgaaaacacagtattaagcctctctatttacatcagtgtgatgagggaagtccaggaagacagagagaaaaccctgtagtcccaattgcccatggaaatttagtatgggaaaaagaggtatctcaacacagcagggaaggggcttttcagttagtagtgctgctgcagtaactggacagctactgcacaaagacacaaacagatttgttcctcacgtcatgctccaagataaattccaaatggagcataagttctcttctctctcctgaggcataattcatatacagcagaatagacttttaagtacagttcagggagtcctgacctgtgtacctcccgtaacacatacccaataaagacaccatagaaagctccatatagctattaagtcaatcaccagggaggctctccactctgcctctccttgggaactaagaggtaagccaccattgcgagccctgtgctgacgcaggccccagacacgactgacagcacagtcagactacgtgatgcctctggcttgcctattaattttcttaatgatgacttaaaaagacttttaaaggtgattttagacttgcacaagagtttcagaggcagaacacacagtgtccccaagtttccacccaccttcatgcagccatagaacaaggatcaacaccagaagaggaactctggcatggtactcccagctcaaccacaggctttgttgttttgccaggccacccaccagagcccgtctgctgctgggcccagtccaggatccacactgtacttagctgacacactaccatggccccccatgccagaagagtttgtagtctcctctcatcaccttgaagagtaccggtcaattattttgtagaatgtccgtcaaattaggtttgtctgctgttttctcctgattcagcttagggaaaaccaccacagatgatgtgccattcacacagcaccacaccacaggtacctgctgccaatatgatgccacctttgagttcttggttggggcagtgtctgccaggtttctccactgtaaagtactgttcc

SEQ ID NO: 45707 - DNA, 1041 bp, Homo sapiens
gcaagctcattaaattagaaagaaaattattggcttatctgatgcctaagtgagtaagtcacaatcctgctaattttggaagcatacatctaaaatgaactgtgattagctaaccatgaaaaagtaaaatagcttttttaagttgtgtgattagttatttttcctaatatatccatttgtatgcaaaagcaactttaaaaaagtaaacggcagtaacagaacactgggaactggaaggatgacctgtatttctgatgttatcacattatttacacaattgtttttgacagtatgtgtactgggtaaagataaaagaaaaatcccatctccttgcaccaaatttctaattaagatttagagtattaaaaatacagtgatcatcttacccttttgaacgattttatccaaaatgttgaagtaattcttctgtgccacgccactcaatgaagttaactgggattttgcaattagctgcaacagcttaaaggaaagacggaaaaaagctgagcgatatatatatttaatatggaattacaaaccacagtgatataacacacatgcatgaagatttctaacatgccatcctaaattaagtcactgtatcagtccgagtccaagtataggaaacagtcactacccatgcaaacctgaagagaccttcatacaagggagctgaggcagccgcagcctacagctctgtcttctagtcttgcaggctattcatttagttagtggaagcatatctcctcccggagcccaggctgcaagagtctgaaatggagcttttagctttccagcctctgtagcaaaagggcacaccagaaagaggctagaatgaatggttgggcactaacaagtattttcacaacctaagcccatactcgcagttgtttgctgaacagacaatcagaaaatcaaacagcccttccatgtagaaattaaaaaggaaacacaacaccaaaactcattgttaaataccattttgtatttaaaaactcattattaaatagcaaataaattgcactaaaatacaaaattgta

SEQ ID NO: 45708 - DNA, 1022 bp, Homo sapiens
agtcactgaagtctccctcaattcttccttccctcgcacccacttcaaagtcaccagtctactcttttgctcaagtatccccaagttcattcttcccatttcactgtcactgctcatgaatgcaatgagggtttacttccctccaacctggctggtccctgcctggcactgaaggggacctctaaacaaggacctttcaatgacccttggcagagagcagcaaaggctctgcaatgcccacaaagccctgagtctggtcctaatcccctgcaccttcctccaagcagtccacacatttggcataacacactttattagcccctggatgcggaagttcccataccttctcacaggagtcaattctgcaacttctgggaatttcgttagccagtttactttttgttggtggcttgaagtcagtcatagtgggaagctgacaaaggctacaaatcaaacctcttgcccctggagagccagttgttaagcactgaccaggaggccatcacctggatactctcccctcattctttgttttctttttctttttctttttttgagatggagtctccctctgtcacccaggctggagtgcagtggtgtgatctcagttcactgcaacctctgcttcctgggttcaagcaattctcctgcctcagcctcccaagtagctgggaccacaggcacgtcccaccacgcccggctaattttttgtatttttagtagagatgggatttcaccgtgttagccagcatggtctctatctcttgaccttgtgatctgcccacctcggcctcccaaagtgctgggactactggcgtgagccatcgcgcccggcccattctttaagctccacctaaaacatcacatcacttgtgaaccaatgtaatgtcaacagccctgtgtgcatatctgttataacaccccactgagttctgtgacacatcatgtgctcatctccctgggtccctcggaggccccatgctaaaggctacgcctgctgatccatgtgtcccacctcatga

SEQ ID NO: 45709 - DNA, 1066 bp, Homo sapiens
ttttctcaggtatctagtttttactttgaggatgcttccttatctaagctttctcataaaagctatttctaatatgctttttttttcagggccttaatgttagttactgaggcctgaagaacagatcattattttctgatgctgtgtttttatgattcagttaagaaaatgtgtacaaatgagatgcacctgcaggtgctaattgcaacttaactattctaggatgtgggtgcagaacagacatttaacttatttaaagcaactcttttaagaatggcaatgaccacagaaatggccaaaagacatccttaagtatgtttagggtctagatgtataaacacctgccaggcactctcattaacgccttttgggaacagctcgggcctgcacgtgatagggagtgtcccagggcaaactgggaggcagagggctcatcccaggcaaccttcatttacctcttttcctaggatctaaatcctccacacaaaattctatccaccccctcccccatgcccaatgctgacttaaaattcaatctactgttctcctactcaaattaatactggaattcttttgcttctcccgaacaagtccacttgagagagttttccccaaggcatccataacctctgctcggctaaatctcacaggcttttctttgtcctattaatctctctgtccatggccttgagagtccagctccccccaggttctggggcacctcattctatccctcaacattggggttggtgccctgaggccctgcccaggctgatcccgttgcctcctgtcctctccatatgcatctgtctaggccctagctccacatacctctcagacacactccgtgaggcccatgttcaggccagccccttcctgtggcagcccccatcccatcggggtcatcttctgatgtcttccctgttgcccttgtgcacttccttgcccataactcttattttcctgaggcaggatcctcatggatcctcttgtatccactccagcctagtcctcaaacaagaacagaggctcttctgaaagctgcaattccatgtgctttgctggc

SEQ ID NO: 45710 - DNA, 1042 bp, Homo sapiens
gaataccaagcagctgttaaacagacttaaatactccaatccagaataatgtccataatgtattattaaattaaaataagctacacacatcatatgtgataacagacttatatctagaatagataaagaacacttacaactcaataataaaaagacaaataacccagtttaaaaaatggtcaaaggacatgcaaagacatttatctaaataagtctcagaaatggacgataacctcatgaaaagatgctctagaatccagtcatcagggaaatggaatgagacccacttcctgcccactagaatggctttaatcaaaaagtgaaataatgagaagcactggggaggggtggagaatcaagagacctcacacactgctgggggaatgtgaaatggtgcagccactttgcaaacagtctggcaattcctcaaaaagttaaacagaatccaccatatgactcagccattctactcctaggtttataaccaagagaaatgaaaacatgcatctacacacaaactcgaacatgttcatggcagcattatttgtaaaagccacaaacttttatcaaacaaactaaatgtcaatcaactgatgaatggataaacaaaaagtggatatacatagagggggatattattcagtcttgaatgaagctctgatttattctacaacatggagccgtaaggacatcatgcaaagggtaagaagccagtcacaagatgagaaatgccatagattcctcttacattacacatccagaacagggaaacacagagacagaaagtcgattaggggttgcttggggctaggaatggcagctgaagggcatgttttgttttgttttgtttttcctgaggtgatgctgatgttttagctgtgtcccccgccaaatcttgaattgtagttcccataattcccatgtgccgtgggagggacccggtgggaggtaactgaatcatgggggcaagtctttcccatgctgtttttgtgatagtgaataagtctcacaagatctgatgattttataaagggcagttccc

SEQ ID NO: 45711 - DNA, 1047 bp, Homo sapiens
gtattttttgagacagggtctcacactgttgcccagtcaggagtacagtggcacaaacacagctcactgcagcctccacctctgcctgctgagtaactgggactacacgtgtgccaccatgcctggcttttttcctttttctttttttttttttttttttttttgtagcgacgaggtcttgctatattgcctaggctggtcttgaactcctgggctcgctcaagcaatctctggcctcgacctccccaagtgctgggattacaggtgtgagggactgcacctggccgccatttaagtatttagaaattaatgtcccagcatggtttttcagagttgcaaagatattttcacttacttactgataaaggggtagagttttagcttttgataaaggggtagagttttagctttcataagaagtgaggctattgatccctttgacgttacttctgtttagagttttaggaaaatatttttaaaaatttagataatttattttcaagaaagctgaacaaatctggatggtgtgggggtgatgggaaataccatttgagttttgagaagtgatttttttttttattctttggaaactagtgtttacagaaatctcttctccctagagactttaaaacgtgctattaagacagaaggatatggtaagaatttttattctgtaagaatcttcaaagctcagcatgaagatacacatctttcccatgggaatccaggctagagaaatgcaagaaggcggttccctctagagtctcctttcctgggagatgcagctccagatgggtgggtttctgggcaggaggggagaggagggtggtgtttattcaactgtttatttgggatcatgttatgcgtcttcaaaaagcgatataagagaaaatattggaaagatatttcaaaataagaattaccttgaagtaattcccataattaatgggtaacatttttgtgtatgtattttggctttttattgtaaaaataatgtattttcattgtagaaagttttttttaaaaagtaacgagtacaaaaaagta

SEQ ID NO: 45712 - DNA, 1072 bp, Homo sapiens
ggaggccctgtgaggaggggcgaggggcttcagggctggaactgccgaacagccagtggaggggccaaacctggggagcgtggggcaactcgtgtgggaggtgttctcgggcaggctcacctgcagcgtctttaagcatgcgctttcatagaatcctcttgcagatcctggggcacctgtgccgccaagagtcctgctcacctggctggctccttggtgccctgacccatggctcttctcacctgtgtgccacccccaagaggcttcttctttcttctgaaacaggccctcatctgtgaaccactgtccattgtggtcccctcctgttcattttgttcattttctgctcttctcttgcttgtttctcccttgacgccataaagtcaatttctcggtctaaatcctggttctcaaccctagagaggatcaatgtccccatatcaacaggaagtagagccagtgacatttctacctcacccagagtgaggaccaggttggttgtgtgaggtgaagcagagctcttgcggggggctagtgtcatacccctaaccccgccttccattaaggccaaagctgggccctgcggggctttgtcccatggccagacgttttcatcagaattaggtgctgttttcttcattgtgtggagagtggatttgatggaagaaggtcatgtaattgggggaggggggagccaagtctctagacagagtaggaaaactagtggggtattgagttttggagacatttctagggcaacaaggtatctttaggaatttggtccatggcagccttgggcagatgtttaaaaaaacagacttgtacctggaattcgcttttaaagtctgccagctgcccagggtcataggttcatttgcccaggctcctgcatattctaattttatccactgaggcccaggacacatggagtctctgctcagtctctatccttagaaggaagcttcaagccgggctgtcagagccgacggtaaacacatgatgaatgtccccgccgccctgaaccgtcttcctgagattctgtgtgcctgcccactcttccttgcagagtctg

SEQ ID NO: 45713 - DNA, 1189 bp, Homo sapiens
gctcagagtagtccaaaggttgtttaaacagcgctgaatgactgagagagcttgctgcttatttttttccttccagtagaaaaacagttatagcccagctgatgaggtagaaatgcactgagcaggtctcagccccagcggaaacagagtagccctcgtcatccaggtgctgtgttgcttggtaaaagtgtgtctgcctcgggctgcgacctgccacgtgaactctctgacccagcaccagccagaatcaacatttggggattcagactgcagcaacaagtgattcccctcttggcctgcagttctgtaatcccaaaattgtttctaattgtggatatgagacatcaaaatgagggctgaatcagatgaaattatgctcagttcagcctcagatttaagtgatttattgttttctagttcttcagacctaatagagctgctgtggtggctctgtcagtggttggcagtggccatcagccctcaccctgccattgggggccttgtgcgttggcatctggttgttgctagcagccctgagggggatggggcaggccaccgccacctctcactggctgctgggctcaggactggtctgctgttagggaagctgcaagtccagccagttgactgcacctatttaagaaaaagcactactctgttacctgagaacctttgagattcctgttgtgaaggaacaatcatatggaaatgaaaacttaagcttttagctaataacagaaaagtgaactagcttttgtcagttgttcaaaagtgtaaaattctactgaaagaagacagctcaatatttcaaacgctggagctgtgttatttggtaaccaagtagagacggcgcccggcagtaatctgcggctgctcagtgtggccctttcactgaggccttggtccacagcaccagccccgagaggggtcccagctgccgaccttcaggctttcttttctgtttataaagtgagggtattctcagagagctttgaggagaaaatagtgaagcttgaaggttgttggtgaagctgtgaaatattgaacacttcctaatcttagattaggttttctgcatcttagatgagtcttgaatagctataaccaaaggctcttgtttatttaaacactttaattatagagagctaaaggcaggaggcacagggtttgggtgggtgaggggctttgc

SEQ ID NO: 45714 - DNA, 1077 bp, Homo sapiens
tgaatagatttcccttgtttcttaatctagaccctggattctcatagatctgatttgctcaaaatcttgagtaccaccttcctattgccttgaggttctctcttgtgtgataatacttctttcttgtcagaactagttctttgcttatgtattgccaagtggtgtcctaaaatgtggcttttacacacttcattaacaacatatagtgactaatttttccttaattttaatatttgaaacttttcatatagacttgtgttagttttctaaacaattttttaaaattttaaagaattttatgtttgtaaaatggataaagcttgaggccctaagacctgggtcaccaacacctaactctttcatctcctatagaactaacttacgattaaaagaagagttgaaggcagagaagaaatctggattttgggacaatttggttttaaaacagaatatacagtctaaaaaaccagatgaaattgaaggttgggagcctccaaaacttgctcttgaagacatatcggctgaccctgaggacaccgtgggtggccacccatcctggtcaggctgggaggatgacgccaagggctcgaccaagtacaccagcctggccagctctgccaacagctccaggtggagcctgcgcgcggcagggaggctggtgagcatccgacggcagagtaaaggccacctgacagatagcccggaggaggcggagtgaggggggctgcgtggcaagtgtgccccgacatggtggccttttatgagtataccatgtagttgttgagtcttttccgcgttagaaagaatagagagtctactttttgcctatatttgatatttggacctctgtttctttatttaatgaactctcacacacactgtgactccttggtgaacacgtgcagggattgtacatttgattgccttattgcagaaatattcacctatcagtccatgttttgcagaaactggagatgtgaatttatgatgctctcccataatacagcagtaatgatttgcagtttctcacaaaatgattttcatgctgctctgtgttgtagttctgtttcagaactt

SEQ ID NO: 45715 - DNA, 1051 bp, Homo sapiens
cccttagtccctggttagttttcagggtcatctctgccctttgccccttcctgaggctgtgttacaccctggagacccccagacattgcacctggcaatcactgggtcacctcaaagggttgattgaattgtattcattatccttgtctcggatcagtgtcatgctgcagcctcaggtcagctttcaggattgctttatttttgtattatatttttaacaacgcaaagtattctaaagctggctctaccccgtgagagacccttcccagccctagcaatgtgatgatgaaccctgggaaatgttaatcagtgaatatgaagggccttcgacacacgccggattttcagatggttttctccattcttcttagtaatggatttcgttgtatccaagatggtattaattatatcttgatgtcagaaatgaaaaaattgtacaaaatcatttgtttacagtcaacaaaattatttcttctcagaaatctacacttgtagaagttagggcaagggtcactgtctccatggagatgctgacgcttaaaggtagtggcacagttgttccaggggaccttggagaagacccccttctaggggacctcttgtaacaaccttctcaaaggtcagtctcctatgtgttttgttgttgttgctgttgtttgttttttgagatggggtcttgctctgttgcccagcctggagtgcagtggtgagatcacagttctctgcagccttgacctcctgggtctcaagtgatcctcccacctcagcttcctgagtatctgaaactacaggtttgcaccaccatacctggctaagtttttgtattttttgtagcaacggggtctcactttgttccccaggctggtgttgaactcctgggctcaagtaatcctcctgccttggcttcctaaagtgctgggatttcaggtatgcgccaccatgcccagcccaatctcccaagttttaaggagacctaattcttatttgtgagggaagcttcgtctgattttaagcatcactttcataagctttttgaggcaaaatattgact

SEQ ID NO: 45716 - DNA, 1045 bp, Homo sapiens
tggttttataagggagtcttcccccttcactcatttgctctctgtcttgaatgctgccatattagatatgcctttgccttttgccttccaccatttttgtaagtttcctgaggccttcccagccatgtggaactgagtcaattaaactgcttttctttataaattacccagtcttgggcagttctttatagcaatgtgaaaatgaactaatacacatattatctgtagcagtctgtcttcaagttcacttaattttttcttctctaaattaaaatgtactgtaaaacccctctagtgaatattttatttcatgtattatacttttcatttctagaaattccagttggttctttttgataatttctgtctctttactggcattctctctttgatgcaacattgccgtcgtaccttcctttacatctttatcatactttcctttagctttgttaacatatttataatggttctttgaagtcttcttctgttaaatccacagatctggcagtttgtgttgcctgctgttgttttctgatgtatgggtcttcctttttctttggctgcctcaaaactttctgttgaaacaggacactttatatattttatttttattttttaactttaagttaaatagtacaggtgaaagtttgttatataggtaaacttgtgtcatgggagtttgttgtacagattattttgtcacccaggtattaagcctagtgcccactggttagaaactggacattttggatgatacattgtagccactctgggtactgactgttccccctttcccattgttgctgttgttatttgcctctttatttgcttagtgattggctggattattttagagaagtcaattctccaccctgcccccagtggtgtaatttagctcctgatgtggcttctggtggggcacggcactgttgggtgtggcccctcttacctgggatgatggaggtgtggcaggctttcttcctctgtccgtgaccgcatgcagctgctaaattccagtaattgctgctgattgctgtatggttta

SEQ ID NO: 45717 - DNA, 1037 bp, Homo sapiens
aaggattatttgatttcttcctttctagtttgaatgtcttttatttttttctggtgtctgattgctctagctaggacttccagtactacgttgaataacagtggtaaaagtgggcatccttgtcatgttccagatctgagaggaaaggatttcatttttcccttcagtatgaaaaatagaggagaagggaataagtccaaagctattctacaaggctagtattgccctcatataaaaccagactaagacataccaaaaagagaaaaccacaggccaatatgatgaacatagatgtaaaaattctcaattaaatactggcaaaccaaattctacaacatactaaaaagataattatgatctttttatcccagggatgtgaggatggttcagtatatgcaaatcaaccaacgtgatacatcatatcaacacaatgaaggacaaaacccatatgataatttcgattgatgctgaaaaagcacttgataaaattcaacatctcttcataataagaacgctcaaaaaactgtatagaaggaacataactccacataataatagccatatgcaacagattcatagctagtatcatactgacaacccagtggtgcattttaaagaactagagtctgggcatggtggctcacatctgtaattctagcactttgataggctgagatgggcagatcactggaggccagtagttcaagaccagcctggccaacctagcgaaaccctgtctctactaaaaatacaaaaataagctgggcatggctacaacaaatactgcagaaattcaaaggctcactaaaggctactcactaaaggcacaataaaggcatattgtgcaactatatgccaataaattggaaaatctagaagaaatacatacaacctgtgaagtttgaaccatgaagaaatccaaaacctgaacagaccaataacaataagatcaaagccagaataaaaagacttccagcagagaaaagcccaggacccaatggcttcactgctgaattccacctaacatttaaagaaat

SEQ ID NO: 45718 - DNA, 1110 bp, Homo sapiens
ggttgaaataatatgtggtgtgattcaatgttttcttgtaactactcacatctccttttagctattctttgccagatatttggctgtggttaatactaagcttgtggactgaagatgattaatatttcaaaataaagttttatagtgatatttttaaaaaatgaagttttgtccccacagtataactcagacatttgtttgatgtggaaagaagttgtgccaagaaattttagagaaaagacagtctgtaactgtgattaaagatggcatccttacgccttttcatttttgtcgtagataaaaagtgtccgtatgtgtggtttcttctgacaccaaccaattcttcagtaccagctgggtgtcctacaattcagtttccttctgacattcccttcccagaattagcacagatcctatggattaaggagtcattcccgcaagactgcacccacttcagatgccagataccaacgggtgcccaattcaccataagtctcttatgccactccacataaaatgtctgatgtcagcacaatggtggagtggaaagtcccggaccttgttcccccacggactctgactgacaacaatatacagtccaaaaggatgtatgagaattacagaaaccagtttagaagtcacagtaccccaggcaagctcaaagccaagaacagctgcattgaagtaggagaaaaaaaaagccatttaatttcacctgcctttccctgaaggtggcacagcttggcatgattggtagtaaacacccaactctctgctgggtagaaagtgaagaaaggaagtccaccattctgaattttggggggtcacctgatggactggtttctgtctctcctgactcagtgctgactgggaactggcatactttggatgcctgggggcttcagagaaaaaagagttaactggctttttgcagcatcagagactcagcagtgctgcggatggaggtcgggacagctcagcacagtcaggagagagcgtgtggttcttggcttatcccttgggcaggaatgggaagagtggaaagtgcatttaacattctggcttttcagggggactgcccaagagactgattcctgttttgcctgactc

SEQ ID NO: 45719 - DNA, 2455 bp, Homo sapiens
tagggcttaaggtggcatgacttagaatgtctaaaagctgctattcttattagagttaggctgtgggtttcactttgtgagtcagtcactgtcttgaaaactgaacgtcactgaatgtggagcccagcttgctcagccagggctggtgggttccacccctacactcacacctgcctcgggtgggcccacccctacgctgagacctgcctcgggtgggcccacccctacactgagacctgcctcgggtgggcccacccctacgctgagacctgcctcgggtgggcccacccctacgctcagacctgcctctggtgggcacttgtccatatggtgggaggccctgcagtctgtcttctgcttttttaagatcacctgttgggaggaatgggcgacttggctttacgtctgcctttggggagtggatgtacatgtggggctcatcagccttgtcttaggagttaaaagccaaagactgaagctcaagaggattttacctgttatttcagagtgagtcaagatgcagtccacggaccagggacacttcctttttctttcctgtctgctcagggcagggaggtcgttttatgttcgttttatctgatccttcaccccacgttagctggggttctgtcttggtgctgtatataaccaggcgaaccacagtttctgctttgggagttctgtgggggttgctgtgagggaagactgcctcctctcaccttggctttgtctagaaatggttggaccatgagctagggtggtgcagctgctcccaaagacttgggaaccaggcgagtgtgtggacagcccgcagaccagtttgaatctaaggagaggccttgggggctgtgggtgtggcttttttcaagatattaataaatgtatattaaaaccatgatgtagctttctaatctttcagatggaagtacaatattctgtacaaaaatgttatagactaaatggcagatattctagttctagtgtttgaaagataacgagtccttttatcaaggctgctgttgtgggcagagaatggaatgctttttactcagaatgcgttgtgtcgtttttagtcagagcgtgtcttggtttggaggatagaatcctggataatgatactggtgcctgccatgtgctgggcattggagtgagtgctttacagctattgcagcttctcacaatagcccaaaaagtagttacagttcatattcattatttgtggattccatatttgcaatttcagcttcttgctaaaatttatttgtaatccgcaaatcagtactcacagtgccttcaaagtcgtccacaacttgcagagcagcaaacactcatcatcacccagcgagctccttcccagctgaggcatgtgtctttcctgcagtctattgagaactaccttttttttacatgtttgtgcttgcgtatgatttcactgtttttcacagcccccaagtatagtgctaaagcactggctagtgttcccaagcacaagaaagctgtggcactccctacggagggagcacctgtgttagagatggctcaggcatgagttacagggctggtggctgagagttcggtgtgaatgaatcaacagcaggtattaaagcaggcatctttaaacaaatacatgtaaaacaaggtcacacattgttgatgaaaagttgttattcagaggctcgcgggaaccctagccttgtgtttcccttaacagcaataatttagtatttgctaattgactgtggcaactttgtacaacataactactgtgaataatgagattaaactgtattttatattcgatgatcttagagaagttaaataactcgtgtaaagttacaaccttgtaaataatttgtgttagtagccaccagtaggaatttgaatccaagtttctctgggtttatattctttgttgaattctcttaccttataggttatgacaaatttctgataccatttttcttcattttccaatttttaaaaatattaaataactagggcttcaacaatcagtgccttttgaaagcactgataaaattgtgttttggctcaattttcaatacagtaaacatgacagtgtacttttaatttttgtcatgcttgagttttgtattaaagagtttcttgtattaaagagtcttactatgggagataaacagttctcggtaaattagcaagtgagaagcgctagaacattgcgaggaaagagaaccggtgtacatctgcctaccctatactttatatacttcccttttttcttcgtgatcgggggagggggatagaaaatgaagcagttgaactgacacaggagggctgtacagggaagaactgggaaaatcccattaaggagtggaggcttcatttcttagctgaatgttgaagaattctgagtaaccccttggttgtattttgcaaagactacctgtttaaggaggaggggttgggggcaagatgc

SEQ ID NO: 45720 - DNA, 1045 bp, Homo sapiens
ggtccacgccgggtgctcgcgtcccgggtggagctggcggagaaggcctgaatcatcgcgcatccggacggcctcctcgcggacactaagcagctttggacgaccgtagctcaatgttaagtgggctaaatgtttgtttgcataacaagtattttcttaaattcttgatttttctgaaggaagccggcagaagtcctttgtactgaaaactgaaaggcctttacctgacgagtgtagagatatgtttggtatgtctagaattttgtaattgaaagggctcccaggtgggccctgtgtgccttagacgtgccctcccccaccccctccccccccctccctttttccattgcagtgctctttttcatgtacaatgaaatttaggtcagaaatccagcattctggatcataaaatatctctttctgttaaacgtgtggcaacttcctcctgatgctgttaaggccgaatggaatataaggatttgtacctgtcttccgaggacttggaaatagtttctgagcagaagagtttctcttagggtctggagttgtttcttcttgatagagattttctatgaacgttaaattccattcctaactcatggaaaatggagccgattatgttaagcgcttaaatatggttactatctgaacttgtctgagaaatttcttttaggtagcgttagtgcttacgtgccttttttttttttaatttcagaatgttatagttactctaaacagctctcttcttgaatgtaatgatgagaatttatatgtggctacagagttaactgcagaagctacaaataactaatattggtcaaagatgagccatattattgtttctggatagagccttgagaattttaaactgagtcttcctatgttctcccatttttcctaatgaatcctgaaacccacttttttttcttaagtttttattttttattttgagacagggtcttgccccgtttactaggctggagtgcagtggcgcaatctcggctcactacggcctcaacctgcctgggctcaagctattctcctc

SEQ ID NO: 45721 - DNA, 1039 bp, Homo sapiens
tcccaaagtgctgggattacaggtgtgagccaccacgcctggcccactttttgttttgtatatgtccttattattcctccattttcttttattgctttttcatattaagtggctattttataatgtaatattttttattccttaaatgacatttttactgtattgtttattttcttagtggttgctctggagcttacaatgtacatcttaacatcaaattttattttagatttatactagcctaataccagtgaaatacagaaacatactcctgtggaatgagttcaattccatagacttcatacaacatagtttcattccatagacttcttttttgtgctgttgtttaatatattgtccctgtatatgttacaaacccaacaatatattgttataattactactgtatataatcttaagtcttttaaggaagttgagagaagaaaggagagcaagtatatgtttataaagtttgttatattaatctccttatttaccatttctgattctcttttcttcccccggtggatactggttactatctgatgtcattgctttctctccagtacagctttgttccacctggcttctttgtgctgctattttcaaatgtattacgtttctatatgttataatacaaataatgtaattatatacatattcttttatgtaagcattttaaaaataagttgagaagaaagaagaaatatgttatactgtcttttacaattatctacagaatccccttgtgtgagataggtctcaccgggcccccctcgtgcgcggtgggtctcaccggggcctccttgtgcgcgatgggtcacgtgccctttctgttctcaaggctttctctttatttggctttcaacattttaacacggggctgggaggtgggcaacacaggtggccagagccccagactgggcactgggggagtagggcccccattttcttttccacatctgtagagagcagagcttccattttctcgatgggcttggagggagggctgaggctgaaatgccacagactctcactg

SEQ ID NO: 45722 - DNA, 1048 bp, Homo sapiens
acgcatggcactgtgcttagagctggagtgagccgcaagcaaacctgctgttgaaggtgcccgcccgacggggccgccctgagcatgggtgtgcagacgtatcctcgagaccctgttcagtgttttgggtgtacgcccaggagacgaattgctggatgctgtggcaattctatgtttacttgtttgaggagcttccatggtagctgcaccatttcacattcccgccaacagtgcacgagggttccaagcgctccacgacgctcgctcgttgcctttgtgttttgtttctatagcagccatcccaacgggtgaggtgagcaccgcttcgtggatttatcagctacttgtgtgtcttctttggataaatgttgattcaagtcctttggccatttttgaatcagggttttttttgtttgttttttttttttttttttgagttttaggagttctctatagattctggtttttaaccccttactagatgcatgatttgtaaatattttccccattgtgtgctctgccgttttactcttaatgtcatttgatggacgaaatgtttttgtttccacgcagtcccgctgtctgctttttctgttgtcgcctgggcctttggtgtcaccttcaagaagtcactgccaaatccaacatcgtggcagttttccctgtgtttccttatgagaggtttaggtctcacatttaggtctttgatgtactttgcactgatttttgtcagctgtaaagtaggggccaatttcattcctttgcgtgtggatgtcctgtttcccagcaccatcggtggaagcggctgtcttttcccattgaggagtcctgccatcctggcacctgtgccaaagcccattcgaccttgagtttgagggtttatttctgggtcctcgcctctgttcccttggtccatacaccacctttatatcaggacggtgatgctttcattcctgtggcttggcagtaaaattttgaatcaggaaatgtgagtctccagcttcgttctttttaggattgttttgggtaatcaggaacccttgagatt

SEQ ID NO: 45723 - DNA, 1026 bp, Homo sapiens
gccggggcgcagggattcagccgccttagagcgcgccagacattagccccaggctgagtgttttccacagagaatgctattaacaggatcccagcttttgcctctctgagagatggcatgaaggagcccacagcctcgttgcaccaggtggccctggcaaggtgcagctttgggctgtttctgccgaggcggaggccttctcgccctggttgaacggctcgcaggatgaggaatcaccgcacctgccgcgtaagagccgcttgcaagttaaatggggtgaacctttgaaggacctgctgcgttttggatccagagttggttgaacacaaactttggtgagccaaccgtccctgctgtggggtgcagcacgcatgtggaccacagactcacggacacacacacacacgctgggggagcgtcggccccactcgatggtgacaagtgtgctcacaccccgttgctagagcctccagggaccctgcttgggaagccagtcatgacaggtgagcgtgagggtgcagggacgggttgctgggagtccctggacacatcccgcagggtcctctggcaggtcggggccgggccggctggccactacgtccaggtcgaccacagctgtgccgcctgcgggctgtgatctgggctcccaagaccacccatgtatgagggaggacaggtggggactgggtggggcgttggtgcaggtgaacgccctagacagcccctctcacagccagccttagctgtcactattgttagtggtgatgagccctgcggggactttggagggaagctcaggctggtcccaacggcccgggcttggcgtttatccgttatacccggataaacccgtgtggggggctccatcacagacttagacgcctgttttctctatggacctgacgcaactcaagggaaactcataagctcggatgtgtatttcctggctctttcctgaggctgaggggcctgtcctcggggggtttcctgaacagaggtcaccatgaaatggtcacagggagaggc

SEQ ID NO: 45724 - DNA, 1052 bp, Homo sapiens
atggtgctgttttcaccttttggctgttagaataatgttactctgtacatgggtgtacaagcacctgttgagttccagctttcagtttgggggtttatgcccagaagtggaagggctggatcatacggtaattaaatctgggtttcattttctgaggaatttctaccccgtcttccacaatggctgtaccgtttttcattcccagcaacagcacatgagtgtgctcattcctcctcatcctctccagcacttatttctcgtttgtaaaaatatatgataatcatcctgatggttatgaagcagcacctcgtggttttgatttgcatttccttgctgattagtggtgccggacatctttttgcgtgcgtgttgacctttgtctatcttcttaggagaatttccattccggtcccgtgcctacttttgggttgttttgtttatcacagtttttataaaccagttctacatcagatgagctgtgtgcccctggtctctccaagtagcttaaattctctgagcctgaggcatctcctaggaatgaagacaccctgtaagctcaacaccattattcatgcctaagacaactacaccaattccccagcttttgaatgaccataggaattatcagcagaacaggacactttggaaagtgaatgaggtgggattaataattatgcggaaacagcaggtgtgagccagaaccatcccaggcaagctcgtggtcactttatgtgatatcaactccactccgttcctatctagatttccccactgtccccagcacatctttccaaccagcagccaacaacggtcgggctctgcatttggttgcgagcctgtgttgtctcatttatctctgtccactgcttccctaaaggtggtgactctgacggggccaggccccagtcttgctcttgtagaacagcttctccctccatcacgtaacctttcctcctgctggctgcatttcctgccaccggaagtaaggtcttcaggcgtcggattcagagggcacgtgggtgcagggtgagttcagggaaggcgtcgatggg

SEQ ID NO: 45725 - DNA, 1029 bp, Homo sapiens
tttggggaaggggagagtcccgaagcctcaccttaccccacaggtgacttgcagatttcgaaggggaggagcagctttgcaggggggatccagctgctggcactgagcacccagacgggaggcttgtaggggaaaacagaaaaagaaggaaccgggggagtttagaagatgctgtggggatgaggggcatgtccctcgaggaccgtgccagcagcgaggccattcggagaagacctgggaatggctgtggtcacaggcagttcagacctggcgggcaggtctacagcctgatttggggaagtcttgaggccatgagtctgcaggcacagagacagccctgcagcagcatctgcggaggctgaagagggagcccctggtgtccacctgggcagggggagggacctgttgcgattgggtgtaactgcgagaacagcatagtggatgggcggtctctgcacctgcgtgtgtggagggaaaagtaagacaggaaaggatgtgtcatgaaaaacgtggtcgtgagttaaaaatgaggcacatacaacaatagaaattctgcaggaatgtatttaaataatacactgtctaccgtgtgtgactgtgcatgagagaggagtggaatggaagtggggcacagaggaaggaaagaaggaaggaaggaaggaaggaaggaaggaaggaaggaaggaaggaatgcagaggacagaatgaatacagataaggagtgagcaagccagagaaaaggccacacatgcccccagaatgatcccccgtgatgaaggttgctgcgtgatccactcggcccctgggtcccagcaactgaccacagcaaagaagaaaagaggagctcctgcaagggcaggtgctggtgcaccatcgtccagaacacgaaacgcacacgtaggtaagaacgtaagtctatgtgagagacgggcaaacaaaaacgagtgagactcctattacatacgctcctgggtgtgctgacgtacagaaatcctctctgcaggcttaattactatctgccgtgttgga

SEQ ID NO: 45726 - DNA, 1013 bp, Homo sapiens
tcttcctcttctgggagtggctggggttgaaggcagtgctcgtgttcatggccctttcactacgtctgatttgtcgcagatccaacagcatctgggatcttcctctgaaaatccctctcattatcgcaaggaattcctgcacattactgagtcctttaatttaacatggcatgacatttatatcattctaatctccaccctcactcctgatgaaaagggcgcccctggcgttcagctgaaacccacgcagatgaactccataatcaagcccctgtacaaaatccagtggccaatgatgcatttccccacagagacccatactagatttaccatcagggagacaatggcgccagtctggactgacggagcaggagcatcatcatcttagacaagcatcgcccctgtgagttctacttgattcaaaactgcctaaatccagccccaaaacatcagcctaatggctaatgtcagtgtgaccttaaatcacaaatgaaacctctgaccagagacatgccaaccccgagataacctcccttccgaccagagacactccagtcctgcaataagactctcctccacacagaaacattcctagcctgcaataagctccccttcccggaactcttaaatacccttagtctccaagagaaaaggctcctgaccgaaatcgggcagaagcccctctcaggtttattctccaaaataaacctgtcttagactgttgagctgcttttcgtgtttctttcttcttcaactcttgcagtatctatcaccattattgttacagtttcatattccacattgcaaccaacctttaagaaactacagtttgttgagttttgctgttgtataaaaaaatccatatttatttgagaaagctattaacttactcccctcttccccaatctattaaacatttgctaagtaatagtaaaattgtttgctcttaaaaattattttgcactaaaatgcattatttaggttaacatataaggagtgtattgtttatctta

SEQ ID NO: 45727 - DNA, 1571 bp, Homo sapiens
cacgttgtatttgtttaatgcagacttggcctatacgagtttttgaaattaagggttttttccgtaaaactagcttaggagtttaatgagtcactgtgtctctcacctctgtaggatgagcacagagatcacatttgagaagcaggtgtgggtgttttctgctggtcacgtctcctctgcctctcctctggctcagcagttacttttcctcagtcatgggggctgcattcagctgcgatgccagcattagggccaagctctcccgcttctgtgacgttttattacacgtactctttatcagtagtagctgccattccctgagtgttcctcccaccgtgcactgagaagggctgaggatttccgaacatcaacctcctctaattctctgtatgggaattagatttttatcatcctgactgttggggctttctagagctcaggcaacttgcccctgggcgggatggagcctgcctggggggagtgtgaatgaggcttctgttgtctgtggcttggctctctgtggttggaaacttcagaagcagtagattccaggtgcaacatttggtgcccggacaagttgtaaaacctgaccttggggagggccttcactggcagccagtgtccacccgtgagcccggtgagcacagacgttagagccagggccggcgggctcagaggttggagccggggaccagtgggctcagaggtcggagccggggaccagtgggctcagaggtcggagccatgtccctgccgtgaagctctgagggttggtggtgacatcaggggcgattgtggcatcgcgattgtggtgtcttggctgcctttggccggcgctgccactgccctggtttcatgacgtaggcaccacatggtcctgtgttgtctcacttacggctccacttctggcttttttctacttgctcacccttgagataaacttctatttcattttcatttcggtttatatgtgggttttcttccaggtctgatgttaagcctataatattgcaatgtgatgttttgaagttaaggtgtaatagagccagtgaaccaagggttcacaccccagtgaaatacaaatattcagaattgagccactgtgttgccatactgattatgtaatgtgtgattaacaagtataatgtgtcactttcaacatcagtttcatgccaaagttgcattttattagattatttgggagttcactttgggcccaaaggctcgtgtctacataataataacttatgatttttctttttgtctttgttttattttttgttttgtgttttttgctttctagaccatgccagagtaatctcagctttctttagttactggatcacacatatccttcctgagaagagcagtgactaaaatggaatatctctttaagaacagctcctctttaacaaaaaaacttaaaagacaaatgtgagatgggcttagagttagttctctgggaacttgaaagacatttatgccatattatttattcacgtgtttgttcctggtgggcaagatgccatctgaggcttcagatgagaaattggggtaaaatggaaattttt

SEQ ID NO: 45728 - DNA, 1057 bp, Homo sapiens
ctactaaaaatacaaaaaattagccagtcatggtggtgcacacctgtagtcccagctactcgagaggctgaggcaggagaatcacttgaaccctggaggcagaggttgctgtgagccgagatcatgtcactgcactccagcctgggcaacagagcaagactccgtctcaaaaacaaaacaaaacaaaacaaaacacggtatcatttatattaccacccccccataataaaatattttagtgtagatctaacaaatgtgtacaacatctatatgaagaagctatagaactctgatgaaagaaatcaaagaagactaaaaattgaacagatattccatgttcatggataggaagactcgatattatagagatactcattcttcctaacttgatatacacattcaatacaatcctgattaatatcccagcaagttattttgtggatattgataaactgattctaaagtttagatggagacgcaaaagactgagaatagccaacagaatattaaaggagaaaaacaaaataaaggactggcattacatgacttcaagagttacttaccagaaatctacagtaatcaagacagcgtatttttggcaaaagagtagacacatagattaatgggacagaatagagagtacagaaatagacccacataaataccactgacttatctttgatacaggagcaaacaaaggctattcagtgaatgatcttttcaacaaatggggctggcacaactagacatccacatgcataaaaatatagacacagaccttaaacctttcacaaaaaaatcttactaaaaatggatctggactgggcgcggtggatcacacctataatcccagcactttgggaggccaagatgggcggatcacgaggtcaggagatcgacaccatcctggctaacatggtgaaaccctgtctctaataaaaatacaaaaaatcagctgggcatggtggcgggcgcctgtagtcccagccactcggtaggctgaggcagaagaattgcttgaacccaggagcagaggttgcagtgagctgagatgttg

SEQ ID NO: 45729 - DNA, 1049 bp, Homo sapiens
gggtctcagaaactgaagttaacctccgtcatcatcacttgccttggagaatgtgtcttttgggcctcgggcatctgtctgcaggtctgcagagggcctgcagcaggtgggcagggcaggcatcgctctccacacaagctctgccaaggcccctgtggactccccagccaaggccaggtcagggtgctgcctttttggggtcatttacttgtgtgctctgaagatggcgattggactgaaactggggcttgggccagccttcctgtcctctgaggaagacaggcgccttccccaccatacaccatgcccccagtcactgtggtggcccccttggccccgttggcttgtgcccactcagggacaggcttctgaggttcttgtcccgtggtctttggcagacgtctgtcccatgacagccccatgttaagctcttggtggctgcaggatcatctgccatgagagtcccatcagctctggtccctgcagtgcaactccgctcacctgtgagactgtgagaggaccccgctgagagacacgggaagagaccacctgggtgcagcacatcccactgagagacacgggaatagaccacctgtctgcggcacatcctactgagagacacgagaagagaccacctgggtggaccacatcccactgagagatgcgggaagaggccacctgggtgcagcacatcccactgagagatgtgggaagagaccacctggatgtaacacatcccactgagagacacgggaatagaccacctgggtgcggcacatcccaccgagagacacgggaatagaccacctgggtgtaagacatcccaccaagagacacgagaatagaccggctgtgcgcagcacatccaactgagagacgtgggaagagaacacctgggtggagtacatcccaccgagagatgcaggaagaggtcacctctgtgcagcacatcccaccgagagacacgggaatagaccacctatgtacagcacatcctactgagagacgtgggatgagaacatctgggtgcagcacatcccaccgagaga

SEQ ID NO: 45730 - DNA, 1126 bp, Homo sapiens
tttaaaactgataatcatgtttttccctttgaaatgaaaagataatggcaaactatagttataaaacaattgcttaaaaagaaaaaatttctcagtgaggcagaatgtggagaaaaatatggtctcaagtcttccttttcagggacacactgcacgtgggcttccccctctccttcaggaccagggaattgtcacctgatcagctcacaggttaaaaatgacctaagagtttttaagcagtcacatgctaggctctaaaatggacattcacgtatgttaatgagcaccagaaataccttgttcatgaccctctcctggaagcagggctggcaggctgtgaattcagtgtcgaggttcttaggagcagacctgacggtcagctgcctgcaaagctgtgcctgccttcttggtggggggcttcttgctactgcaggttttctccttgttttaaaccacaacacactcttctcttacattccttcaaatgtttgcactcttctaagcctggaataaatgctcttctctatgcaagaaattattatagcatctgtaatgtacctaatcaacttaaaaaaaaaacctttctccattcaccaaattaaagtgaatgaaagctgttaattgttttagtcattcactaatcaccttccctcgaaacagcctttttttcctattggatatgtgacagaatggtcaagtaaatttacgttgtttaaggacattgtggttggaaggatagattaataaatcccaaaagtttataaaatgtaggtgggaaagaaaatattagttttctgtgtgtcttcctcaagatcacctgaagagcccatcggctgagtggcacttaggctctgagaggcactgaagggaggatttagctggaataaaacttcccagcatttgtgacctgatggagcaggaaactggagtgtgtgtcttcttcagagcatttcccttctgcgtggcttgcaacgagtgaagttaggggaaggtgccgcaggaggaggggatggagcttggcgtgtccccttgcagggatgtctgttttcccaaggtccagctcagggtcatggggtggttgcaggtgggggttgggcgctgttgttgatggtgggagaggaggcag

SEQ ID NO: 45731 - DNA, 1046 bp, Homo sapiens
cggtggcaggaagcatccgcataccaaatagcagttgacgctgggtgctggcgctcacctctgccaatccctcacctctgcttcacacctgtcagtcttgtgtgtgcaggaactcaagaaacttctatgaattgggagcagctgtgtatacaaaaaatctgtcatagagtctgaacaattgaattccaaatctgatctaatcctcatgagttaagaaaaagtcagtcgggcggggtggctcacgcctgtgattccagcactttgagaggccgaggtgtgtggatcatttgaggtcaggagtttgacatcaccctgaccaacatggtgaaaccctgtctctactaaaaatataaaaattagccaggtgtggtggagggaccctgtaatcccagctactcaggaggctgaggtaggagaatcgcttgaacctgggaggtggagggtgcagtgagctgagattgcaccactgcactcttgcctggactgcagggccttgttttttttcaaaaaaaaaaaaaaaaaaaaaaaaaaaaaaaaaaaaaaaaaaaaaaaaaaaaaaaaaagccacttgatctgagccctagtttacatataaattcttactcctgtgtttgcttggatgatcaaacaacaataagaaatgccaacatacgtggattactttttctgtgctggtccctgggaagatcgctaatactttcagtcctgtcaataatcctgtaaggtggacacagttaccatcccgcttcacagataaggtcatggaaaaacataggcaaagaatgtatacaagatcccacagacagtaaatagcagaggcttcaaatgtagataattgcgggctcccaaacccacactctaaaccactgcagtataatagcctctcattacaaatgaaataatgtagttgaaagtattttgcaaactataaaatgtcagccacatacatcacgatggtaccttatttctattttatacttcatagcgtgttgctgaacacagggacagtacagaatgaagcttggcgattagatacgtattgttca

SEQ ID NO: 45732 - DNA, 1028 bp, Homo sapiens
cataccatggctgaacatggaggtgggaagagatgcacagtagcgtaccgtgacatggtatttccactgtgcagacccagtgcatgcaaataacctcaagaagagatagtagtaaaatagttacacatatttgaatattatttgtttaaatgtttgtaattataagcttatataatgtaattcttaataatggctcacagaactcctgaaaatttattgcctcttgtgaggcaatactcacaggctctagcactgccctgggttatcagtaatgaacctacactacatttagcctattatttcagttagctgcattaggggcttaaaacaacaacttatggtttctcaagattctgtgatttgactgggctcagctggatggtcgttctgctggacatggtgccagtgggagtcacaacgctgttgccttcatctggaagctcagctgggactgggacacccacctggcttcacacagacatctgcacttcagctgggggctggctgagtctcttccctccagcaggacagccaaacttcttacctgatgactctaggcttcaagtgagggagtgtggaagctgtgaggtctctcaggagctggtcctgtaaaaggcatgtgtgcactgcatcatatcctataggttggagcaagtctcagggccaaccagatacaaatgaaagggaaatagattccacctcttgatggggagagtggcaagtgtgtgcagcaattagaggaattgttggcagtcatctttgaagacaacctaccacccttatctatgtagtttatcttctgtcttccacattagcatataaaccacatgagggcaaggagttttatctgttttgttcactgctgtgtccctgacacccaggactgtgcttggcacacagaagacactaagtataatattagatgaatatatcagtgtcaaactattttcttaattctctggtttcttctagttcttgcccatatatatgtatatagttggataattgctccagataattgcttttaa

SEQ ID NO: 45733 - DNA, 1037 bp, Homo sapiens
aagcagtcctcctgcctcaccctcccaaagtgctaggattataggcatgagccaccacacccagcctcttctttttaaatagaaaccctattttattctgaaagcgggttgctttcttttttttttttttttttttttagaaaaaattggcccagccccagggaataaattgtgacttgtctaaacagggttggcaaactatagaccaagggccaaatctggccctctgactgtttgtataaattaagttttactggaataaaaccaggtccattcatttatgccttgtctacatatgttttaaactacgatggcaccactgcgtcactgcaacagaggttattcagaccaaaagcctaaaatattaccgtttgcttctttatggaaaaagttagccattccctagtctaaggtttagattctgagcttatcattttagcctacccccacataccagtgagtggctcaaaacaagtctatgattccattgtgactgttctactgagggaaatcccccttcttctcatgcagagctgatgagggaaagttgtattaataggacatatgctcaggttttctgaaaaatactattatctagaaatgcataggaatatgctggtgcctgaatgtaccatctgggggcctggagactgactcacactgcctccagagctggcgctcacacttactactgagaggcctgaggaaacacctgcctacccaccaccagaacctgcacacgtcacctggagaactagagatcagcctgccacacacacaacccaggagcccagtggcgcacccgcccacctggcccagtgctgccactgccagcaaccaaagaagccacctggaggcccagggattggcccatgcagacaggctatcatcagtgcccacatacactgcacatggtcactagtattgacacacctgttctaccaccactaccactgatgctgaaggacaagacttccaggcatccccatcctcagcaaagcctcaccacagcctccaataacaactgcagtctggct

SEQ ID NO: 45734 - DNA, 1001 bp, Homo sapiens
cccctagggatgggtttgggggtttttgagatatggaagaggcttaaagtcaattgttatggcaaatatggtttggaatttatttgcgatgcttaaaaatattgctgaacagaagtgaagtctttcctagagttggacggtgagattatttagtggaactacgagatccctgttgtgattctttccagtatcattcagcagcccttggtcagttgcgaggcaagtcatcaatggggtatggagattttccaggtgggtgtggttgaaggcagggaagaacgcgtttaggagcacattacaagaggaaggtatctgttaagtccaggctgagcaggaatgtatagcaagaaggaaacatgaggttgtgaagagaagtttagagggatgaggagtcaggagaggtgaacagttgcaggacgtagctagagtggcgatgttagatcttggggccagagagctttacaatgagtatgaagatcaaagggcattagaatcaagctataaagagccactgtttgatgttggtatgtaagtatgctgcaggtggatgtctgcacattgatggtgagaacgtggtcaccctggccctgctgggtctttgctaaagagactctgctctgttcttggggccgttttcatcacctgataagagcagtggttcccaaattgtgttctttggaccatctgtataaaatattcataggtcaaggataaaatggaaaaacagagaaaatgtcacagaaatgtgcccattggtgaaagaccaccagctgtcctttttggaggatttttctttattctaaaaatgtatatattctattctattaaaacatttttgtatttgcatttttttctcttttatgaaatgccatggggtagaaatttgtaatgtatccaattctcctgtctccatgcattgcagtgtggtgggggaagggatgtggctagtactggccaagaggctgggggcagaagtgcagtgttagacttctagcccgaag

SEQ ID NO: 45735 - DNA, 1214 bp, Homo sapiens
caggagaatcacttgaacccgggaggcggaagttgcagtgagctgagattgcaccactggaggccagcctgggtggaaagaacgagactctggaaaaaaaaaataaagtctgtcactgtggtctcataataaaaggacactccatttcctatctggcccctgctccttaatgttagcctcctcctgtggggaggagggggtgactttcagcgcaggttcaaacattcccagggctggctctgatctcactaaagcccatcgtcatgaatgaatgcttcccttgcaggttattctaagtattgtaaagagtgcacgtggagtgtcctcatgatgcctggaatggtagtgaatatttataggtttcttttagtgccttttttttttagtgttttctatacttccatgtttctacaacccttaggaacatcagaatcatgtgtgtgtgggtgcttattaaataaaccagttcctgaagctcactcccagtgactgccagcctgatgattagggtctcagctaggacctaggtttgcaaaatctcccagctgatcccatgcagacagcctggctctggctctggcgctgggagctgggttgggaactagtctttggtgctattctgctgatacttcaagttgggctctttgactctgtcttgtattgtcatcacttgtattcaggtctgttcttcccctggattgtaaactccttgatgtctgggtcatctcagctcatgagctgagctttcagtgggtgctcagtggaacaggtgctgaatggagtccggctctagggaggccagcgtgtgttggtaagtgagagacaaaaatcattttaaaaagaaactttttgcccttcagttgtgtttgccatgagttaatgtgatttactctagtggaagccagtgcagcttaagtggaggtcttgccctgaaatggagccaggttatggatcagcagagctgccaaaagcgttttgggggaaatgtttctgtgtcaccctcagttgattgaactcaagttttcactcccgtttaacaccacgtgggggccattctgacttcttcagagtgggtatgatcagatcttctgtaaaagtgtacatgagggggctgggcacggtggctcacacctgtaatcttagcactagggaggctgaggtaggtggatcacttgaggctgagagtttgagaaaagcctggactgcatgatgaa

SEQ ID NO: 45736 - DNA, 1038 bp, Homo sapiens
acagtctggggtccgttccacagtggacacaaagaggctactttccagtccttgatccacactcgatcacctggggagaaagggtgaactggggagaataaactaacagggcatctctcatttacccaggctgagattgtctgtgtaatttttcctaaagcctgtagctgtcgctgtaactcaatttcacctaactctcagggagtgcctggaagtccccgcaatataggagggggcctatgatataatatttcataaggggaatatcctgttcttttagaagtggtacatctaattttaaataataccatagggagagcctgtatccattttaatcctgtttcctgacatactttccctaaactatttttgatagttcaattcattcgctccacctttccagaactctgaggccaggaggcagcatgcagtttccgtgtgatccccaatacctttgccgccttctgtactaagtcagccacaaacgccggcccattatctgaactgatccataagggcagtccaaatctaggaataagatctcgaagaagcacatgagttacttcatgagctttctcagttcgtgttggataagcttccacctacccagggtaggtacgcccaagaactagtaaatacttgttacctctacactttggcatctctgtgaagtccatctggagctcttcaaagggggctgttccataagtttgtatgccgggtggaacggctggaccctgcctcgcattatgctgtcggcaggtaacacaccactgcgtcaacgtttcggcaagggctgacaaatgcgagatgtagaaataccagcctaacaacttttcaagtgattcctaacctagatgggtggtttcacgcacagccagtacaactgcagctcctagcagctgtggcacagctactctcccatccggtaaccgaattcatccttcctccatcacttgtcctctctctgcctggagaaagtccttttcttctttagaataagtaggtaccagatcaggtgcttgagggagcaggggg

SEQ ID NO: 45737 - DNA, 1059 bp, Homo sapiens
tggtttggatctgtgtccccacctaaatctcatgttgaattataatcccgaatattggagatggggtctggtgggaggtgattcgaccatgggagcgaatttccccctttggtgctgttctcatgatagggttctcatgagatatggttgttcaaaagagtgtgtggcacctccctcactctcttcctcctactcttgccatgtgaagtgctgactccccatttgccttctgccatgtttttaaatttcatgaggcctacccagaagcccaccatacgccaacatcttgcttcctgcacagcctgtggaaccatgaggcaattaaacctcttttctttatacattacccagtcccaggtatttctttatagcaatagagaactaactaatacactcagtatactggagactgcagaagtcctctgtttgcctgtttatccatccattgatctattcatccatccatccatgcacccatccatccatccatccatccatccatccatccatccatccatccatttaacgagcactttctatgtacatggtgctgttttgagcagtttataaataataactcattgaatctttctaataactgcatgaggtatgtattgtcattatccacattttatagatgggaagctgaaacagagagagattaagggccttttccaaaacacacagccagtaagcattgagtcaggacccgaacccaggccgtgaagcaccagtgttcatgctcttaaccaccacatcattggccatccttggtgactctgaaatccgtctaggaagttattcaactgctagcatcattgttcttcccagtagctcctgagggccctgggatactgtgcttgcctataggcaaggcagctggtaggagaggcccttttgtggaatgcagttactctcttgttagttcccactttttctcttttcatctccttttcttcccatctgctcctcttgtgtgaacagatgtgagtttcctccttgactttccaggccatgagttggaacacgttgttcttaggtgatcattttagagatgaa

SEQ ID NO: 45738 - DNA, 1025 bp, Homo sapiens
taacacttttagtctgctgtgtttccagatcatttatatagggctttgttgaatggttgctgtggtctgcttgagtcccatctgccccaaatcctaattatgaacacctccttggcagcccttgcttcggtgggctctggggactctggctcagtcgttgatatctagataaagatccctggagtcagtctgttaaaaggaaggtgagcagagcagtgacagatgctgtctttgtctagtgtgggccttcctgccataaccatgaaaattttctccacggtgacgcagaggaggatttaggcgctggagccggcgcccaggcagttctgctgttcttggttgcacatttgttctcacatccttcgttgcttcacctctgcccttctccccctgcccccatccccgggcagtgctgtctttgtaaaatgagcccatttttagtgcacatctccctaacacgtttttctctctcctcctacaggggagttgctgagtcagcccagaccggaaggagtggcagagatcatttgccccaagaacggcagcgagcgagtaaatgttgccttggtttacccacccacgccgactgtgatcagcccctgttccaagtgagttctcaaagtccctctggccccgggacctggctcctgatcccagctccatagatatgaccacaaaaatccaggttaaactgcatctgcacaaaccttgcaaagtcctcctgaacagacataattcttctggatgacatcagcatcatgatttatgcagcaaaacaggaacttttatttcctcttttttgtgatttttttttttttttttactttagctaataaagtcagaacattttttaacagcctttttgagatgtcattcacataccacagttcacttacctaagtgtacagttcattggttttcagtttatttgcaggtatatggaaccaaaaagaacattttttttgttgttgttttttgagatggagtctcgctctgtcacccaggctggagtgcagtggtgcgat

SEQ ID NO: 45739 - DNA, 1079 bp, Homo sapiens
tttctttgaagggctagatagtaattatttctcgcttcgcaggctatagcctgtgtggcaaccacctacctgtgccactgtagtagcatcggttagcagaattgcactaccttggaaagcagtcgtagataatatgtaaatgactggctgtggttaagttccaataaaactttatttacaagaacaggcagcgggccatgttttgccaacttttgttctaaataatcacaagaggccatgaaaagtttaatttccatacatgagaactgggtctgaatattgactcttctacgtagtataatgggtgtcccaaatactcttacccagtaaaggatcttttaaaattttaagttgaaaccatattcagtggcaggaatcctgaggaagtgagagagaaaagctttataaatattaataagtgctgaaaattaagttgttgaaaaaattgttcacataaaagatcattatatagcaagtttggaatttagtttcaattttcatttccttgtagaaacatcttcatcgtgaggaaaatgagggaattaatgaacatttgtttcctgagtgtgagctgtgataccttgtagtcactgagatggcggctgcatgatgggtatctcgtaactctgctccgggatgcccaccatctagaaagatgctcaagacccgtgggacaggatagtgtttaggaatgtgtgttttaaacttttcttgcagtatttaatttctaaataaactttattaaggtataatttatatacagtaaaaatgcacctatttttttaagtgtgtgatagattctatgggttttgacatgcattcactcccaatcaagatagagagcattcactcccattaccccaaatgtaccctcactcccctaatgctcaccctcgaacaaccactcatctgctttctgtccatgggaattaggttgccctattagagagcttcctatacattcagtcatttagtatgtactttttttgtgtctggtttagaggtttgcaaacttccttggttcacagtgcctttagaatccataattttttatggtgttgaaagttaaaagggatacc

SEQ ID NO: 45740 - DNA, 1047 bp, Homo sapiens
gaagaatctttatgtgtgtgtgtatgtgtgtgcatatgtaagaagtaacatccgctggagctggtattgtgcagaaaatatgttgagaaatataaaacagatatctggcttgtgttcctctatatagtcttttttgactgagaatgctttatccttgttgttacggatattttcactttgtttatttctattttggtctgaatcatgagtgtagttgatccttgaacaacatagatttgaactgcttgggtccacctcgacgccacctgtgcatacggagggctggctcatctcatatgcaggtcccgagggccaacttcaggactttatgcatagattttggtgtgctggggatgggggccctagaacccaaccccccatatatataccgagggaggactgtctatttttgttttttacctgtgaggccatcgccacaatgaagagagtatcccccaaaaggcatatttttaatatagttgtaattatagcattgcataatcgttttcagtaacataggtctcatctgttgctctaggtcttagtaaaataaatcactcttgttgaacccttcctaggctccaaaactggatgggccatttaatataattttaaatattaaatttaaattttctttcatttattagaattttcaaagggtaataatgttatatatttagattttgatgacatggagacatctgagacttgcttagttttaaaaaagcaaaatttatgtcatacagctcttgtaaggactgaataaaataatgcatataaaaatgcctaagacaatgcttggcatgtagtgggcacttactaaacaatttccttccttcccttgctggcttcttaactactccctgccttgtataccccctgtgctccgtcccaatttctgttcagatactagacagatggctgttgctttgggataggtcaaaggctgtcaggcgtggaggcaggcaaatgacccagatcagtgaacaccagtcattgtctcagagcattttgttttgttcagctcagctatttgaatcatcttgg

SEQ ID NO: 45741 - DNA, 1031 bp, Homo sapiens
tcgggttactgctggtgggcttgcagggacattgtgagtttggagcctgtttcacccatcttaggaaggtatgggtcaggcgtgatggctcacacctgtaatcacatcactttgggaggctgaggaggtggatcacttgaggtcaggagttcgagaacaggttggccaatgcggtgaaccctcatctctactaaaaatacaaaaattagccaggtgtggtggtgtgtgcctgtaatcccagctacttgggaggctgaggcaggagaatcacttgaacccaagaggcggaggttgcagtgagctgagattgcgccgctatactccaacctgggcgacaaaacaagactccatctgggggaaaaaaaaaaaaaacaaaaaaggaagggatgtcctgccctagaccgacagcccccagcacccagcctattgcaaatggtttctttcacttttgcaaatctgaacaagcatgcttgggagaagggcgaggaggcagggaaactggagtcatgttaagactactctctggaggtttctgttgtgcgtgtgccattctgccttttgggtgatgtggcttaatgagtcaagccctgatgactgatgctgcttttcttcctcatcttcctcctcctcttcctcctattgagtgaaagtcacataatatgaaaaagccattttaaagtaaactattccctgtcatttagtacattcccagtgttgtgcacctgccacatctcagccaagcacctttggaggggtggggcagatacattggtgtcattcttcctggggccaagtgactgggaattcttttgccaggctttgtagcaactttctttccaaggtgtaacttaagagtaggggttttggggctaggcctggagatgccatgttgattggagatcttggacacggttgtggggatcctcttagtgtggatgagaggacagaaaggagggcatccaagcctcctggtctgttctagggtgtatgtgatttaatgaggggtgacatacacgagctccgtaaagaac

SEQ ID NO: 45742 - DNA, 1055 bp, Homo sapiens
aagcaacccaaatcagtagacagaatgagttatgtggctttctttagctttactgtctttcatttactcagtaacttgatgcctttttgtatctcatgccaaatgtcttctgtccctcagtttcttgcacacggagtgtacctctccgacaacacagcatatttgacttgttttgttggtgtttggttgcgtcatgatatatctttgattaggttgttcacttgctgcttctgagccagagacacacccgagacttagtagcttctgcagagcctctcagatgtttgctgaatgatagtttggtctttttgtgagaaataactttttttttgggggggtgggggcagggtctcactctgtcaccgaggttggaatgcattggggcaataatggcttactgcagcctcgacctcttgggctcaggtgatgatcctcctacttcagcctcctgagtagctgggactccagaaacaccctaccatgcctggctaatttttgtgttgttttgtagagacagggtttcgctgtgttgctcaggctggtctcaaagtctgcctgcctcagccttccaaagtgctgggattataggcttgagccaccatgccctgcctgagaactatctctttttctttgttattcacacactcagtgaaaatcccaggtagtattgtaatgattatctggctttgtttagcttcccaactccctccccctcacagtgttcctccagcattcccattgtgcgtctatgactggtcttacccttgaatgggtccttcattttgaccactgaagcaaagcaaaattcttgccttattatatctaagttttagaattactggaatttgagcatgacctagttgtttggattgaattagtcattgtttttaattttacaaaggtttttcaatatctctttggttaagctttattaatattgatgcttcttggcttttctttttatgaataggcctctgaactccctgggactttgttttatgtaaaaatcaaaaccttaatcaggcactaggataaacaaatactgtgcagaatag

SEQ ID NO: 45743 - DNA, 1069 bp, Homo sapiens
gtgtttaagtagagcatacattaaaaatagattcattgaatccctagattattaaaatatatattaattcagcagaaaccctttgaatctattggcagcctttgccttttcatgtttttttgtttgtttgtttgtttttgagatggagtcttgctctgttgcccaggctggagtgcagtggagtgatcttgactcactgcaacctctgcctcctggattcaagcgattctcctgcctcagcctcccaagtagctggaattagaggcatgcgccaccacacctggctaatttttgtatttttagtagaggcgggggtttcgccaggttggccaggctggtcttgaactcctgacctcagatgatccacccacctcagtctcgcaaagtgctgggattataagcgtgagccactaggcttggccacctttgtctttttaagaagtcattttgcttctggggacattaaaaattgtttacttttatgttttataaaagcgttaagttgtcctataaactataacaattttatatgcaacgctgaaaaagttggactttgaattttcttaactttgggatgttacagtaaaagtaaatagtaaattactgtctctcttgattttatacagaaaaaatgtataaagttgcactaatatcttttaaagtatttttatgtgaaaagcctattttggccttgtcctgttggattttctggcctgagctgccctactgtagttgaccacgggaagtataatggtaaatttctcttttcttattttggtttatacaagaaaagtaatgggcagcgtgcagtggctcagggctgtaatccctttgctttgggaggctgaggcaggaggatcacttgggtcaaggagttcgagaccagcctgagtaatgtagccagactccgtgtctacaaaaaaaaataaaaaataaaaatcagctaagcgtgcacacttgtggtcccagctagttggggggctgaggtgggacaatcacttgagcatgggagtttgaggttgcagtgaactatgattgtgccattgcactctgaccctgtctcttaaaa

SEQ ID NO: 45744 - DNA, 1132 bp, Homo sapiens
ataagaaggagctctgagaggccagggcgtctgcacatgccccgtgtcgggggcaccaggctggagtccagaggatggtgggaaaggccaccccaagcagaggggccaggagcagtgaaggccggaagtgagaggggcacagcatggctgcgtgcacagggccacacccagctgtccaggaggcaaaactggattctgcggactgagctgggggacccagggcttgtggtcagtttggacagggtggttcatgacagccctatgtgccatgtgaaagagttgacttcatcacggaacaccaggacctccaaggatagcgtacataggattatcaaattccttggggttaagaacctggtggagaggtactgaggccagacgtgagaggttggggccatcccagagggaagtcggtggccgcatggaggacagcagaggctgcccattgagggatcccagagggtgagcaggcatgaggccatcatttttgatcagcaagctggactctgggcctgtgtgtgtgcgacagtgtgtgagcttcatcagatgactcatcacaccttctctgaacttgccagaaggtgccctgctcctcctccagcctggcctggcctgacggagcatggggtggggtcacctgcatcctgcagctgtgggtggctgtgtctgcctcattggcgaaggccagcctctgagcccttctgttcagccccagcagccgtacacaaaacccagatctgaaaagagaagtctgccaggctcagtagtgtgaatgtgctcagcagccgtgcctgggtgtcctggcggcttatcatcctggccgatgccccactgtggccatgggctgtgacctgctcctaagaggtcatacaaaccaagtgtagaccttgtcctgggtcaacagggaaggagtccctgggctgaattctaactttcggcccccagacactcttggctggttctgggtttcagcaaagcttgttggaagccggcttatgagacacactttcttggcctcggaccacactccctgggcctcgggttgagaagttcctggtgactcagaaagtggagggattaagtctcagggagaagccgctggctgccgggcggacagatctgtgcctgcaag

SEQ ID NO: 45745 - DNA, 1050 bp, Homo sapiens
gctccagtaaccacattttatcttactctctatttctattccatcttatcagtgagatcatgcaatgtttttctttcctgtctggtttatttcacttaccatagtgtcatctaggttcatccatgtcgtggcaaatggctggatctcctcctttttaaaggctgagtaatattccactgtatacatacatacacaccacagtttctttatccattcacctgtggacagacacttaggatgtttccatgtcttggctattatgcaaactgctgcggtgaacatgggactgcaggcatcttcacaaggtgatttgatttgctttgggtatatttccagaagaggggttgctgggctatacagtaattgtatttttaattcctttgggaacctccacactgtttttctttgagggtatgccaatctgcattcccatcagcagtgtacagggttcctgtttctccacactcttgccaacacttattatctcttatctttttgataataactctcctaatgggtgtgggatgatatctcatgatggttctgatttacatttccttgatggttagtgatgttgagcatcttttggtcatgtgtatgtcatcttttgagaaatacctgtccagcatctttgcccattttttaatcaggttatgtattttcttgctactgagttgcttgagttctttttaagtttcagatattaactttatatcagatacatggtctacaagtatttttccctaatttgtaggttgccttttcattgtgttgattgtttcctctgctgtgcagaagctttttagtttgatgtagtcctgtttacatatttttgctttggtagcctgagcttttggtgtgatatccacattattgccaaaagcagtgtcaaggaacttttctcctgtgttttcttctgggagtttaatggttttaggtcttatgtttaggtctttaatccattttgagttgatttttgtatatgttgtaagataaggtccaatttcatttttttacatgagaaacccagtttttccagcaccatttatt

SEQ ID NO: 45746 - DNA, 1031 bp, Homo sapiens
gtttgagaacttttgttctagaggaaaaaacagcttcaaccccagcttattgttcaaactgtcccagtgggattgctataataagaactaattgtaattagtacaacaaatgtttgtataagtgagtgctatcctattgcttgaagctacctgaaagtgttttttatagtaatttaaataaacattttcctgtgccttaggagttctttgtaattcaaactgtttataattaagtcatttggataatttatcaccgaagcatgattggatggagtctaagaatcttatcttttcgtagactggttctaaagtaaagtattaaaataagattctgatgggttaacttgctacgccaatccttccatagaataatgcaagaagcagcttaaacttagcttgaagttagtaggatttccttaatagctgtaagtgtagtttagaatatctcttgatgcttatctgtctttaaattgtaatcttatataattccattggaactactttgtaacaaccagaaatttctgtttaaaacacaatcttgaactagcttaaaacgttatgggaattttctaaaaagaagtttttttccttggtaagatttaaatgatacgctctttatgtttattagggatcagagtgctggtaggtttttctgtttctgaaggttctgttaattcttttctgaagccacctgagcctctaggaagttcactcagagtttgcatgtcttcgaacagcgggcagtctctgccaaagagcacgaggctgaaatgctttagtctttgatttgtcatctgttgttctttgacaagtttatcttttctgcatcaaaaaggcttgctttaagcaaagtactagcattaatgacatccccccttcagtcacctctgtcccctaactttagtccaggctcctttaattcacgttctgactcttaaaatcacatggaggttttaaattttacctgactggttttgaagcattttgtgggcctgaactccaaatagctttttaacaagtgcttaaactta

SEQ ID NO: 45747 - DNA, 1020 bp, Homo sapiens
tttcctcatctccatcctgcctctcactgcgctctgcgttggtctgaatttgctgattactgtctgctgcctggcatgctgtcctttcaacagtgtgtgtcttcctcttctgcccatatgacagaggccatggctttgtactttcataggccctggctcagggtcgttagtagttgctcactaggtaactaggtaactatatgagttcgttggtatagttaaaatgatagctaatttgaacttctttaatactcatgggaatcaagggtagttttacattgcaggttgatttccttgcttcttaattgatagccctatgaaagaattaagtttctccttcctactaaaatccagacacattatccactatactaagagttatacaaaattcactttcatagtaaatctgttttcaacagaaaaagagtatttttcagtctaataaagaacctactatttatggttcagccttagtaccacggaagtagaacaagcagaccttgtgtgctcctgacataatgcagtataaatctgaactcttcctgccaaaaagctgaacctaaatctaatcaaatctctagaagtatttttcattcacagaaaatataagttatagagatgcaatcttagaaggaaacaaacaaaaatccagaatgtgggacagagctcgaaacaattgacccaatttctacaataagtcagtggaatgaaaaaaatatgggattgtgggaaagaatagggtgtggtaactagaaaaaccctaaaagatacaagtatcatgcgctagtgtaggctttatttaagagctgatttgaaccataaaaagacgtccatgagctggtgaggaaactgatgatagatcgcattagatgccaagaaattattgtctgtttgattagatgtgctaatggcactgtgattgtgtaaggaaatttccgtactttttagtggtttttactgcagcattcaggatgaaatgacttgatgtctgggattcaccttaaaatatttcagcaaaga

SEQ ID NO: 45748 - DNA, 1071 bp, Homo sapiens
aaaaaagaagacttggtttattgattcctggcatttttccagactgacagaaatctttatttctagggtggtggtttgtttcttaatagtaataatttttagggagtccagaattaccagtggttagaagtctcattagatgattccctgtgcagattgggactgaattcctgggtcttttagcccctgtctgcccctgcaccctcagcagatggaagcagcaggctgggaaaggatacctggctttggtgcctgcgcggactatgctgagtcacgggataggcagtggtcactagggaggagccgctctgacatccggccgtgccggctgctccttcacaaggggctgctggaaagagccatggtcagacaggctggcttctggttgtacctctgccctcagtgctcaccgtgagacctggactacgccactcttccttgttcaccaaggacatggcctctggcttatcccagcctcctctccaacccctcttccttgactctctcagtcgtctccgtgtcctcaggaagaactagaattccagtcccgcgcctcttgaactccatctcctttgctctgcccaacagctgcccccaccccacgatcacaccctgagcctttgtatcaactccacgtccctcccataccttgagataacccccatctccccagccccgtggggctcacgtgccttctgtactggcgtttccacatccctgcacgttgatcctctcttctgcctgctgctcacccaccacccccagcctttgccctcccggacaccctctatgaaaatgtacagttgaacagatcagggagggaaatgttacttgtgggcttttgtagaactttaagagaatttatgtgtttggtgcagaaagctcttagttgtaagagatcagaggtttctgatcctctggcagatttctgtttgagaatttattgggtgttgggtgccttgaggttttcaacactgtgtggtgttacttgactctttggtagctaagtcatgttaaagtgagacatccacctgtgtttgaggagcttcaaaagcagttccctaatgctag

SEQ ID NO: 45749 - DNA, 1053 bp, Homo sapiens
gcagaagtgggctgtggatcctcagaacactgcctggagtaatgacgattccaagtttggccagcggatgctagagaagatggggtggtctaaaggaaaggtattttggagaaaagcggaaaaaaatctgagctatgaaaagagattagaaattaggggaaaacttccttcttaggagactggaagaaacttatgctttggatcagtaagtgattttgatcccaaatcaaaaattgttgtgaccttatgatgataaattaggattggacataagtgtcaactttctatcatttaagctgccatgcttagcatctttcatagacattgcaactaggctacacgctttttccctttccatttattcttgactccagtagagcctctgctgatacctctacacttaaatggttcttgttgaggtctttagcgatctctaagtgccaaatcagtgggccgcttgttttgttctcacattacttaactcctcagcagtgctggatgtaattgactactctctccttgaaatacttctgtcttggcctccacagtgctattgtctcttctgctcttcttttcacctcacttgccactcctaaatttgttgctgtctcttctttctatagacttttgattattagggctccttgaggctcaacctcaggccccttttttgcactttgctgcagtgatctcattcattcccttgccacactttgaattagctaaagtctgggaactgtcatttttctatattgagtccagttctgtcctctgagctctagatttgtaaattcaatagcctacttgatatttccacttgagtaagcatttcaagggtatcatttctattataaaactcttgattcccccaaatatatttttcccaggttttccccatttttcatacatggcaccgtctgccacttacacaagccagaaacctgacagtcatgcttgattcctccgccctcttgcctcccgcagcccagtcgtcgtttttctccagcctcccgcagccccagtcgtcattcttctccagcctcccgcacccca

SEQ ID NO: 45750 - DNA, 1085 bp, Homo sapiens
atgattatggtcaatgtgaacatcccaacccagccccgtgttagccaagggaagagggtttggatttaggatgtgaaatgagctaatgtctcattaacctatatttttgaggggtaaggaagaacaatgaaaataaggaacagcagaatctaaacctataaactgcccttactaaatctcctgtgagaacagcttttttctaaaaaatctcagtggtccatccatccacccagtgaccctacctgttgttcagccatcccaactttcctggacgtcttccattccagaggcatctgatttctccaggaagtcccttttagcagagcccgtttcaggaaaccgtcaactttttaatccaagcaggtgttcataatgtttgttatgaattccttttattgtacctctctctgcttttatctcaattgagccaccagaagccaaagcgtgttttcctcatgcgaaatagtagaccaggaacgtcttgcggtgtcattcttctaaaaaatggctgttggcctcctgacctcaccttcccctttatacgagcctggaggcacctggcttagctggtgcgttttcctttgggaggactctttgaggtttgtcccccaaagcttacaaagatatagtctagaatgtgtttttatttgaatttttgtggttttatttgaattttcaaaataaactctgtaatttgctactgaggcccttgattctttgttatccctgagaagggcccagtgagtccctactcctttccccagcttccagttcctaacagtctctttctaattaaatagatcctttttttattccaattagattatggtgctgtttctcaaagagaccaagtccctgagttgaagatctttaaagggctttattcctttaaaaaggtgccattccagccctttccagctctcacctccccactcccttataagtgacaccgcctttccccaccaggccctgactcaggctccagagaagactgaccatgaccctgtgccacgccaggggcccaggcaggacctttagtgacctttcctggaggtgggtactctgtgaagaggtgagcagctata

SEQ ID NO: 45751 - DNA, 1033 bp, Homo sapiens
atccctagtgatcctgctcctcttccaggtggactccacctcatccccctcctcatggctcacaaacaccagggagctcacagtgcctggtgtggaatgtttgggactaaatccaggaagcctgagcattgttgtttgcattcagttggcccaagaaactaggataagagtggggaaaattcagggacgattaatgaaatacagcgtcacatggaaaatgatgcctgctttccagaggtcaccctgagccctaccccttcagttatgttctggaggagatccgtggaactggagccctcccaggtgcactttgagttgtctgtttgggttgtcctgagaactttagtgtctcctatctgtcttgttttgtttttgttctccatgaccttgagagatgactttcagataaatggattattttcctaaggatataggggggatgagaagtcggagttagaacaaattaagaaatttaagcttcacggggtcagttctgaggcagtttttgcagacagtgactgtgactcagcagcgagaaggagcagtcccggaaggaccctgtgctgggctagggagaaggcaggctgaggttgggggtgaccatgccagggcctgggaactggcatctgctcctgtcctcactgctcttgggctggccgtcgccttccatgagccccaatgtcccaatctctaaaatgcaggcataaacttggtaacctctgtgattgatccaagccagaaaggtatgaaaaaagtgagccaggcaaatacatttgataaagtgtcttgaatgatgaatagataccttcagatttgggaacagaaaccactctaggaccctaagtcaacaaatgcaaataccaacatcaaactagcaggctgaagacggtgattttcacttccatgtgaaccggttaaaaacaatagaaatgagagaagaggccgggtgcagtggctcacgcctgtaatcccagcactttgggatgccaaggcgggaggatcacctgaggtcagaagtttgagaccagcctgg

SEQ ID NO: 45752 - DNA, 1050 bp, Homo sapiens
gggcccggatgaacccccaagcagtcggggtcggaaggcactcagggtgttccagccagaggcgattggcactcgcaacagaaatatttaacaacaggtccgagatactgatgcattcaactgaatgtcacttctggggctagggtccagtgggattgatcggaggtggagggaaagagctgtggcaaggagatgagactaaaaaatccatttttggaaatcaacaataaatttgaccccaagaaaaatttcctttattgtatatgacacctactgcaacaagcaacacacattatctgaatgggtgagttcctcattcccacagtgggctccatggtggcccaagatctgagcaagaggacgaggtggtgggtggccagcgtcccctgcctcctttgtgtgcagagcccacatccgtcctctctttgggactttagtgtccccattggcaagaggggatatttccatggtcctgagaaaatggtacaaaaagtgaaggtagttaggaccgctgggcagggccaaaccactgattggcctcaggtaagttgctcaacttctctgggcctaagtttcttcccctagaggaagggttggtctcctttagttttcatgttctgtgatccctctggaatattgatccctactcaactccaaagtgtatggaggctgctcgtaattttatttttttatttcaaattaaattaaattaaattaaattaattaattacttttcgagatggagtctcgctctgtcacccaggctggagtgcagtggtgcgatcttggctcactgcaagctccgcctcctgggttcacgccattctcctgcctcagcctcccgagtagccgggactacaggtgcccgccaccacacctggctaattttttgtatttttagtagaggtggagtttcgccgtgttagccaggatgatcttgatctcctgacctcgtgatccgcccacctcggcctcccaaagtgctgggattacaggcgtgagccaccgtgcccggcgctgcttgtaattttaaaacacacaagaacagga

SEQ ID NO: 45753 - DNA, 1045 bp, Homo sapiens
gggacctacattttgttagcaaattgcctttcctttcccccagggaagactttgagctgagactaaacctgggaaggtgctgctgaaaagctgttgggggaacctgcctgcacctcctggcctccaggagggaacccataggaaaggggaggctccaaccttactggaagtgtttgcagggcctgttgtgtaattagtgtccttggggagcccgcagggggttttcctgcctttacggaaggatcattcacaggccagcacaggttaatagttttcctttagaaactttccttttgtggttggtcctgtgcctgcttttgaaaatctggtcatttttaaaacagtttttccagaaggggcgctaagggccgctacactcctttggagtcttttcttcctcacacttaataaagattgagattacatagggaggatgaatgcttaggggctctgaaaatatggattatgcaaatgagctatttaaggacctttaaaaatgctgacccggtaccagagtatttactggctgttaaaaaatgtggattgtctaaatgggcatttggggacctttaaacacagattatgatggatctagagagcctaacaaatcccttctggcccgttaggcctgtctgccgtgcgagtaaaggcacgtttggacaaagctgactttttaacgcagtgactgggaatggatttgggtctgtcctgcgggcctggatgttggtggcttcacagggaccctcccatgaggggctccggtacaggtgggctggaaggcagggccgtggtcaggatgactcaagaggtcccaggacttcacacagcaaattccttctgtgtaaggaaccctgctgaagtaggttttgacttttgtttaattcattctgccaaacatgggtggggaattggtataaacatgaaggtgctggtttccaaaccagctaggggaggccctcccatccccgctaattctaggagcactcaattaatggatggggacattcccaccagcaacacagatccggggccagatctaggcact

SEQ ID NO: 45754 - DNA, 1029 bp, Homo sapiens
tgggaggagctatgaatattcatgaagggggaatgcatgcacgcatagtaagcaaacatgcactttatgttccatgttcatttttggttggagacttaacatttaaatgcattacagttaggttctgtacgttaaaaggtgaggcaaggacatgaaggccctcagtgctcagcctctgtaaaccagccagaaccagtccacggtcagtggtcttatcaggagaaagttactgaaatcagtctcttgtccaatcaaagctgtagttacagctggtggaacaggggttcggttagtcactgtctggtggagctgcaagtggtttactattgcttatcttgaggcaagtgttgtttagctgctggagaaaaagaagaaccctgtgacagttagagcttagttgattctttaagtgtaggtgtgcctgacttcaccattgcctgcacggccttaggtcctgtttataattgggtatcttatcaccacagagtctgttctgtcagtcttatgatctctgctttggcattaatgctggtcagttgtttctagtgtttaaatgaaaacgggagtatgtataatgaggtgcatccaacctcctgtcctgtcatgggcgggaacttagtttttaagatttctctggggttcccttggccaagaggtgggtgggaccattcagtggtttgggaggcttaggattttatttttagttctcaggtgggaacaccttttcattcagtagagatttcctggactgactctgcccaggggaagtgcaagacccagtgcctgccctccaggggctctgcagctgctggggcagagactgaggctcaggggacgtaaaacaaactcctcaaggtcaaacgtgaaggagggacttccagagagtcctgggtaggtaaaggaggaagaggtcagggtcggctccctgaaggagcaggaagaggaggctgggtggcccaggaggagatggacgatttcctagacttgcagccatccagccgcttagctccaagcatgtgagctgagttc

SEQ ID NO: 45755 - DNA, 1031 bp, Homo sapiens
gctgttctagggacctcacagatgtggaatcatgtggaatttgtctttttgtgactggtttctttttcatggaaaatgggccaatgacatatttgaaatgtagtttatatttgcattaaagcagtaaatgtacacagtagtggaatcaccatcctactcgtgaagcccatgaaagccacatggtatccctgatgaaaaattgaaaaataaaatattcttaacatatcttttgtgttacaactggtttcatgaactctgcttcccctcccagctttattgaggtgtagttgacaaaaggaaactatgtattaatggtgtactgtgtgatgttttgatacactgtgtatacattgtgaaatgattcccgcaagtaagctaattagtgtagcttcccctcgcatagttatttttttcttgctgtgagaatatttaagatctattctcttagtaaatttcaggtagacaatatgttattaactatagtcaccatgctgtgcgttagagctccagaactctttcatcctgccgaattgaaactttgtgccctttgaccaacacccgccccccatttcccttctccccagcccctggcactcaccgtcctcctctctgcttctatgagtttgagttgtttagattccacacataagcgagatcatgtagtatttgtctttctgtgcctggtttatttcacttagcataatgtcctccaggttcatccatgttgttgcaaatcacaggatttaaatatcttttaaggatgaataagactctattaaacatttatctatgtatctatatctttatctgtctcagattttctttgtctattcatccatggatggccacttaagttgattccttatcttggctattgtgaataagcggctggcttatttcacttagcactacatcttcaaggtttatcatgttgtagcatgtgtcagaatttccttattttttataactgaaaaatattctgctgtatgtaataaccacattttctctatccattcatccaccggtgaaca

SEQ ID NO: 45756 - DNA, 1070 bp, Homo sapiens
ccccactgaaggagtcaggaagagcattgtggaggaggtgaggtttgacaggtgggcattgaaggtgaggacaggaacagatggtgacgtcagaccaagcttggacacagtcgccaatggagcctgggtccttccttcattccacccaacacagggactcctgctgaacaaaactacacccgcccagcctctgtgaccgtgggaactcatgggaatgcctcacatgtgtgaaatgagggcaaaacacttacctcagcgtgttgtcgtgaggatgagccacgacgatgcacttgacaagggcagaacactgggactactggacaaatgtcacttctcgtccatttgttcattcattcattcgaaaggtggtttttgagcctctcctttgtgtcaggccctgtttgtttcaaagcagtgaacaaaacagacaaaaagccctctcatgcaagcttacattctagtgggggagggagacagagaataccagaaataaataaggtatctagtgagttagacagtgacaagtgtgacaaagacacataaagcaggcagtgtggagtaggggggctccttatagagtaattgatgttattccttattctttagtttgggtgacaaataggatccatgaagagagggagagtcataggaaaatgttttgtgcttcgattgggtcggggcatcaagaacggcttttgagtaaggatgtgatttgggctgtgcttcaagatggtgacatggctgcaccttgtacgcagattggacaggcagccaaggacaaggcgtcagacgtgggctggtgggcaccaacgtgggggtagaatccaccttgcctgtgggtttcttagcctggactgggagaagtgagactagagacctgaagggtgagactagaggcctgaaaggggccaagagagctgcatcctcccagctgatcccctggctggagcctgagcagacgggaggagcaggaaggcagatgcacccaagactgcaagacatggaaaagggctcaggctccctctcccattgaagaaaaggtagtggggtcacacagggtatgagcaccc

SEQ ID NO: 45757 - DNA, 1028 bp, Homo sapiens
caacctgtgattgaactacgtgcagtgcaggtatcaggatttagtgacatcttttaattctctattattgatgaaaagttttggtctggaaaggaaaactggctttgggattgattttcatcagtttaattcatcttcagtattgatcagtgcatatgttacagcgaaagactaaatctgggctgtttcaaaggaacagggaatgttattaccagagtgtccaggtttggggcattgtcccaggactgttgacaccttaggcatgtctcactctgccttgtatgccagtccttcatatacaggtcttcttctcctccaaagactgtgaggtctttggaggcaggatgcatctctgaaataaactgacccccaaagacccaatgtagttcctagcacataggtgaccctctgccagtgtttgcttaagtgcggtctccagagttcatcaaagcccttaattattatgcatcaggagggatcccaatactcaactcataaaaggacacatggattccacagggactcggattttgggaaaggtgacgatatcaatcagacaagctaatgaatgattgcctttctcaggaaaagatagacaggaccctaagtctgaaatgtgctaatcacagggtcctttagcatgtgggggcaactttttgtttgtttttgagatggagtctcgctctgtcgctgaggctggagtacagaggcgcgatcttggctcactgcaccctccgcctcccaggttgaagcaattctcctgcctcagcctcattagtagctgggattacaggcacccgccaccacgcccggctaatttttgtatttttagtagagatggggtttcaccatgttggccaggctggtctcaaacccctgacctcaagtgatccacccgccttggtctccaaagtgctgggattataggcttgagctaccttgcctggcctagcatgtgggggcaactttggcaggcagcctcaggcacagttcagacactctggccacacctgttttgccctctgacc

SEQ ID NO: 45758 - DNA, 1072 bp, Homo sapiens
cacagcagtcatctgggaagttggtggaaatgcagattcctgggtcccacctgcagacattctgacccagtagattttcagcattctcagactccctgagtgacgcaaggtagggcatctgcaggcccttgctccggcggcagtggcttcgagctggggtatgaggaggaaggggagagactggtggaaccagaccgttgctgtcccagggccatgctgacggtctgaaattggactcttcagaggagaggcctgtgggaggcctgcccgatgctgaccaaggcagggcagaagggaagcctcatgggagaccatcctatggcgggcattctttcctgggcaccccagtgaataatctcccgctctggccccctcctcgtccagcagtgcccactccccattctcctgcctctggccaagatcacttaggagattggtatgaggattaatgcagcccacgcatgcacaagcacagacatgcacacacacacacatgcacatacatacacacacacacacacacctctttcacctctgacaagcatacacttggcactctccgtgggctaggtcccctgcaggaggatgtgggcttcttgagagcagcaaccgcaccccatggcatgtggcaaccagagcaggcactccaaggaccctgtgagtgagagcacgtgcttcgcctgttgccacagttagagagacaatgaggctcccacctagcatgggggccgcagaggaggatctgagagggtgatgggaggaagtctgtgtgatgcccacagagatctgtgccaactgctcttgggtgacaagaaggggaggtagtgcctgggaggccagggagtgctgcagaggagaccctggaaggaggaggcggaggaggaagccaaggggacgaaggaaggctggcaaaggctggatggagggatgagctggggggtgggaaactgcaggtgcacctggatgcaggtggttgcggggcatttaccctggggatggtggtgcaccttggatgctgttcttcagcagatttctttttgtaggagtaaggcactgttttcttaggagctga

SEQ ID NO: 45759 - DNA, 1885 bp, Homo sapiens
agttcctgaatgaccagcggagggcaggtgccagcctgtggcaaaataggaaagaaaaggacaggatggggacttcaccatttttttcagccttaaattgttccttaaaccttcatgtccttttctctaatgtatgttcttgtttggtaaaataaaaaagtttgtaaccctgagttctctaaagatatacattcttttttactggtttgtgaagtcagaaggatgagagctgctatttcttggaaccgtgcaataaatattagcatattcagtctcagttctgcctagaggacctatttgcttttctttatctcgtaacccataactcacaggacattaaccagggtgtccaagaacagtctgggaaagttttgataattacttcagcattgctgtgtgatgggagacattgttttaaaaaccgaatgtggtagaggttaaaaggacagccgtcaccatcctgtttcaaccaacgcttgactgagaactctttctggaaatctctcgaacagacttccaaaagttatatgtgaaaaagcactgaaacctcacataacgcaaagatccactgcaatacaggcatttaggaaatcatttacactaccttgctgatcacttttcacacttgatcttagccaaaaggccaagaagcgatgtggataacttttcaacctgtaaaatagccaccaatctgcaaaaaaactaattgaacactaataaatgaccaaaattgatgcaatggttataactggtattatttttatttctgatcatctacaatatcaagtttaagactgactgtatatgtcacagttttgtgtgattaactacttttattaattgtctttaaagaactgcacaaaagcgccctgaaggaagagaaaccaaggatgaatccatgagggattcgggctgtgtggcgattgccttcattttcccagtggaaggacattttccagagaaatttatgctgaatacccatttttatatctcgcccgattgagtgccaatcactgtgccaagggctgtatatatactgtgtcaaggagaaaatttccaagaaagatactgagatttcttccttggcctatttaaaattggggttgatactcttcctcaatggatgccggcaggcaggaagttcagaggaagtcagtgatctccagtcagattcacagttctccaaagtgtgtccttttatttcccaggatcttgcaaaactcgtgctgaattgctcattagggaaagcttgccatacgctacattaagtgtttcccttagagacgttttcttaggaggcccgacattgaattattaaaccctgggctatgattagtgaggcagacacctgctttctgtattctgtgggacttgaaagcaagaatgaaattactgaataaaatgaaattggtacgagggatattttggacttcatttgcagtattactccgcatctcctcccaagggtacgacagctgtcagcaatggcttttaaattccgcaacagtggaaggcattactttgccattaaaattttgaattgaatttattttgaacattcccaattttgcagcagagaaaagatgctaaatcaatacttattgaaatgattttgcctaaaatatgacatgatcaaaaattgtgtcgatttgcagttttgtattttgaagagaaagcacaagtttttgactgggtaccttgacacagaagcagggagtttatctcagtctccctccaaagcaagctccatttttagtcaaatagtatctcagaagttctcccttaggaattaggattttctttactacttgaatggttctcagtgaccctttacagccccattttgaccttagaaacccacatcacagaatggattagcatgcca

SEQ ID NO: 45760 - DNA, 1111 bp, Homo sapiens
acaaacaaacaaaaacaaaaaaacaacattaagtaggtttttaaaagtcacgttaaattttaatctgaacctctattggctgtttagtcattttcttattatgacaggcttttagaaacttttattctgtgatgctttcgtcagtagaggtgtttcctcttagccagttctagccacaatattgactgggcccaggcatttgctacactcagaaggaattaaccaggcaggagaaaacttggtccctactggaatgaatagtttaaaggccatcttagatgctgaaaactctgagcacaaatgaaagcgacccaagaaggaaaaacttcagagcctaagaataaaaaatggtggtagggttgggggataaactcgcccagagctgacttaaagtgctgtcagggaaggaagtgcctttcctggggaggatgagatggtccatgccgggtctggagctgtgggcgttctgatgttggatagcccaccctagcaggctgcagtgtcttaagggtagtggcatgagatctttggaagtatcgatacatttcctaacagtgagtttgagtttgttctggtatgttctgaatggatatgtggctcaaagattaacttagctaaaaataagtatattagatattagggaaatattgttaataaaggtcttctgtccctgttggataactttagaaaataatgtagacaactgaacgtagtggagatgatggcatgaatacagtcagggtttgatgcttgcttcctagaaacttcctagaaatagaacacatctagacatagggaaataaggttccaaagaaaaccttacacttttattcagattttatgttggcctcagttgtactagaaaagcgtttcagtatgtgtctcttggggaatctgcaccttcttggtcactgcacttcatagcccggcatatcactgagaattcagaaatctgactctttacccagggacgaatacatcgttatgagttcaggtgcactaaatacataggaacacccagagaaaatgagcccgaaacaatggttctttttattttggaagtttcagacaaactctttggaaaattgaagaaatctatggatccttttcc

SEQ ID NO: 45761 - DNA, 1115 bp, Homo sapiens
acggtttagcattacactgacctttcttgccctggcacatacacacacacacacacacacacacacacacacacacacacacacacatatgtgatctaagtagctgacttcattaaaatattgttaaatttaactctattaaaaataaatgtttggccaggtgcggtggctcacgcctgtcatcccagcactttgggaggccaaggcgggtggatcatctgaggtcaggagttcaagaccagcccagccaacatggtgaaaccctgtgtctactaaaaatacaagaattagcaggcatggtggtgggcacctgtaatctcagctacttgggaggctgaggcaggagaatcgcttgaacccaggaggcagaggctgcaatgagctgagatccatgccactgcactctagcctgggtgacagagtgagactctgtctcaaataaataagtaaataaatcagtgttttataatctcaggaaatgaatcaaatatgactttagctttgtagaaccaacttggatttcagttgttacgatacccagcggctaacaggataagacgggcaccactccattcaaaataggattgtgattctctgtgtagaaatgtgtacattttcatttttctgtgataaaaatggcttctaatattttatattttagtgtcatgttagagatttcattccatgctcatttgttcattcacatgtatttttatttttagctctaagcgaaagacatgaggcctcagcctgaaatgaggttgttttgaggtcatctgatttctgactagaaggtgagcgatcgcctcgtcctgaaaccacttcagcccgcatggtaaatggcaaagccagcgagagggaggccttcatgtgtttccgtgtctgtgctgccccagttccttcctcttcaagattaaaaacattttaaagttgtaaaccaaaggtattaaacaacatactgacatatcgtacctaaattagctcaaatgttttacaaaagggcttacatcataaatgctaattaaaccttttagagctgttttaacatggctttttaaagtgagctcttgtgagctacctaatcagcaacaaaatatttattatatgaaaaaacc

SEQ ID NO: 45762 - DNA, 1024 bp, Homo sapiens
caggaggtggaggttgcagtgagccaagattgtgtcactgcattccagcctgcataacagagcaagactcttgtctcaaaaaaagagagaaaagtcaagtaagagttgagctgtgggtagccgacaggttctctgtgttgacacaggacaaatttgggatacatagatgagcatgtttaagacttagagtggaaaaagggtatctatgaattagttacgttttctctgaagcttcctatgaactgaaaagaacagtgccctccgacatacatgggaaaggaggacgggtttcactgcttgcacataagaccagcatacagttttccatgtttaaaatttgaatgcagcaaaatctaaaacttaagaatcatcttacgaacatccgtgggaaatgtactttcaaagcttattgatttgcttaaaacccagatatgactcccaatagttcttgtcttctttattctaagtatttaagcataaactgcagtatattactttaaagtattttctgagacctatgaacttcagagtcaaaacatttcacttggtagtatttgtcaagatattaaatttagttagactccatgaaaaattatagaagataagccaactcagaaatgtatttattcttctggttttaacccatttatgctggaggttgcagatttttttgtgaaaaatcaggccttggtgatgatcttgagcagtaggacacaaataactcccacaagcttagcgttgcagtaatgggaccctaggcagaaatgggttaagatgaacatggagcttaatttgaatcaggtgcatatattttgacatttttttggtaacgtatcatattcccacacaattaaaaaatgtcattggtatatgtagaaccagcagagaaatgcaaaacattgaacgataatgttagtgtagactatatgtgataatttatgaataatatttaatgggcatagatgaatggtgtaaaacattctgtaacatatttgtcttcattacagtatagctagggccaatt

SEQ ID NO: 45763 - DNA, 1025 bp, Homo sapiens
gacatttctggatgttattttggcttaaggaatgaagatagagatgctgccttaagtttcccaaatggccagccgctgtctccacgccgtcattcagacattctgttttcttcctgtggaatccttcagtttgggattttctgactgataaatgtgttgtgtttagggtgcaagctgcatatgtgaagttgcaggactcccacagaaattaagaatgctgttggtttttgctgggttaggagacaagaggcgtatgtgtcagacaggaaatcttagaatctgtcaggttctgggagcagaaagaaaacttctaagaggggactgcagtgttcaggttgcagtttcacccctagtgtatcatgggggttaaccctttctgcaaaaaagattcagtctaaactaaggaaacagtttttcatgaaaatatctttgacgttgaatgttcttaaataaatagcatttgtttttatagaagtttgactctatagttagtctaaatttgtaactaactcactagaattcatcaatcctattaaatgggagacagtgtaatattactgaagtggtggatggagttttatgagtagtaaaagttaagactaagtatatagttagtaagctgaaatatacctctgaggattcagcctccttattttatcatcaaaggcctaaagtggaagtagtgaaagttttggagttaggacagtgtcgcagttgttgtcgactgtaacctgcattacaaaacatcaagtggttgaaggaaaaagggggaaatggcagctgtgactgtggcatggatgaggttgtgagatgtaagggggacatctgagttcgggaggcgaatgaaacctctcagctgcttttagttcttgccaacgaatggtagcaaataggcctggtgtagtggctcctgcctgtaatcccagcactttgggaggctgagacaggtggatcacctgtggtcaggagtgcgagaccagcctggccaacatggagaaaccccgtctctactaaaaatgcaaaaa

SEQ ID NO: 45764 - DNA, 1062 bp, Homo sapiens
tacacacatacacacaaccagccacaaaatagtgttatttccttaaatgccaaacactgtctagttctagaagtgaaaaggaccttcttgtcttttcagaagtgtgtgttttgagtatgtaatgagattacctttctgtggctttggagaattaatttcagcgctttattgtcagatcttctctgtaagaaatgtgatagggatttcccattcaatctggaactaagaattcagattgacacttgagctttgtacctcagatagcgtttttcctcatctcctgttatatatcaagcagctgagattggtttttaaaaaagtgaagattgaattgtcttcacacatttattgtgaacttgcagaaaatggaaaggattatgctttaaagacagttggcttggctggatagaaaagatccctctgtcctgtttccctgtcctccttcccacatcgatttaaaaaattagatgcaaatgcaaaatccttaaattatagatttatgataaatttaaattctggtagaatcaaggttttataacatttaaagtgtctgacactaagtgtatataatcttttaagaaacgtcttcttaacagcgcatggtattctgtgactgttcgtgtaccatgaatattcttattgggttctagagttagttactgactcttgaagatgggcatctaatggtcctcctgtggaagtggagagcagctctccactgtttgataacatttaaagccaagggtgaaccactcaagaaacatttggtggttataatatttttttgttgttgttaagtaccatcaataaaactgaaaaatctcttaagtacctgactcctgcagtgatacaactgcagtgataaaacttttagctttttacatcaggggtattaggtattttctcacagaaatagccttttgaggtgaaattcacataacatacaattaaccattgtaaaatgaacaattcagtggcgtgtaagagtatgtttacaatgttgagcaaccatcacctctgtctagttgcaaaatgttttcatcactccaaaagaaactcctt

SEQ ID NO: 45765 - DNA, 1050 bp, Homo sapiens
aagcgataagctttttataaatgtgcgtttaggtttcaattcctcgtacccacaccctctcccttgtatgcttgtatttaaagccaactatattcatatatttgctttgcagtacaacttgaaactcactgtctcctcactataacattagatgtcaaatgaattactttttgccatttttcttacaagatttttgatctcaaaaatgtgtaaatttatttttaactcttcttttttacttgtatctttttagtctaaattgaaaagcaacttttgtctttagagcatttatttctggcatctccattggaagatttttttttttttcacacatcatacaaagcattacaggtgaaaagaaatgtaagtaataaaaaaagtcttccaagaaaaaaaatgtgcgtgtgtgtgtgtgtgtgtgcgtgcgtgtgtgtgtatgaatgaagggacagagccagtatgaagaaagtaaaagttgaagattaggccattgccaggtatgacatagaactttaagtaacaaagttgaccagacgcggtggctcgtacgtgtcatcccagcactttgggagatcgaggtgggtggatcacttgaggccaggagttcaaaaccagcctggccaacatagtgaaaccccgtctctactaaaaatacaaaaattagcctggcgtggtggtgggcgcctgtaatcccagctactcgggaggctgagcaggagaattggttgagcctgggaggcggaggttgcagtgagcgatccgagattgcaccaccacactccagcctgggtgacagagcaagattccgtctgggggaaaaaaaaagaaaaagaaaaagaaagaaagtaagttatttaggtttggttaagaggaaactagtacagactgtagaatagtgttgtttagacagtagctctgtaagtaccacctgtgactgtgatgcattcactttgatcttgaggataacttgtctcaaagacaactgattacttgattttatgagatcaggcttttcaaagtatgggcctggcatacctgggagcttgttag

SEQ ID NO: 45766 - DNA, 1051 bp, Homo sapiens
tttttgagacagagtttcgcttttgttgcccgggctggagtgcaatggcgcaatcttggctcaccacaacctccgccccccgggttcaagcgattctcctgcctcaaccttctgagtagctgggattgcgggcacccgccaccacacccagctaatttttagtagagacagggtcttgccatgttggtcaggctggtcttgaactgacctcaggtgatctgcccaccttggcctcccagagtgctgggattacaggcgtgagccgccgcgccaggccaggaatttttgaaagacataaacattcagtccctagtaatggaggaaaccagcatgtaagtcctatacgtaaagtcccataaagcttttcatccttttttattgcctcgcagatacttccggtggtgggatgcactagtttttatgttctaagaaagaaaaaaaatggcaataatttataaggtgccatctattgtaagaaatatctcaattccatagataaaagaatgcctcttagaattgttgaaacactggtaactttgagttatataaacaatatattaatctattcctttaaaatgttatcagcctttttaagtggtttttgcattttgggagaaatattttctgcttttaaaaatgtacttttctgtatttttatcttgtttagtcttccttccttccttccttttattcttttttaattatttagatcttgaatttatatgaaatttttttctgtatggtggttttttcacttttttctccttttccttctttaatttttttctccttttatttgaaattctacctcagaaattacacatgtacatgttttcagacattttttcatgaattcacccattttctgttcctctgttcataccacactattttagttaatgtgattttagaatatagtttaatatctgataacagcaagaattagaaaaaggcctaaatgaccgataatagatcaactatttaaactatagtaaaagtcatctttctttgggtcttccagtcctaattgttacaatgatatttaaagata

SEQ ID NO: 45767 - DNA, 1032 bp, Homo sapiens
attgaagattctagagttgcggtgcagttcagaaagcctgaggtttaaggggaaatggtaaagagaaagaggaccggagcaggattcgattcagagccaactggttttcttctttcctatttcaggggagtagcttcttcagcagactctccgctgcttgtgctccacattgcattgctcacaccatggcatggtgtttccattcattgtctcctgagttcatttggtgtagaagagctggttctaaagagaacttctccctgctgtctttttcttccagaacactggggtgatgggtataccgcagcagttgcctggccgtctcctaggttagtgtagcagagattctattctcagataagacttccgtgtcggctgaagatgtaagggactgtccacgtttgagggagaatttcttctcactattctagctagaatatgtgaatgaagaaagatttctattatcctggactcctttgtattttttataattgttttctttttctcacttatgctctgatatgtattggtttcttgaataaattaaaacttaaagcactgctttagtagacatttctggaattcctgtctcccgctttcctcaccacatacagctcttctccactgcctacagctgtatgttttagcatgatgatggatggatggactggagctagagcaaggttaaccacatatgctctggtttcagaaacatcagagagggaggtggtgacatttataagtattcatcttttatttacaaatttcacgcacatttgtagtctactgtaagcaacatagtgtcttctaccatctttttcctcttaagggtcaacactactattctatttcatatttaccatttttttcttttaaaagaattcatgtggtgggtcattgtagaaaatttagagaatatgcaaatattgaaaaagaaaaagaaatgatgcaacctgtaaccacactgtgtgtaggtgttctctgtgtgggtatcttagtttgggcttttataacagaaatatcattgcctgg

SEQ ID NO: 45768 - DNA, 1038 bp, Homo sapiens
tgtggttgataggcttagataggtggtatgttctctcagtgtatagcttcagatcgtttttcattcggaaaacgtttcttggattgtagtcttcagtatttgtcctgttccattgcttcattgttgcttttatagtcagagactcctgttatctgtttcaggtattctttgcctgtctttagtattcatttcttctcttgcattctttttatctcttctttttttttttaattaaaaaattttcttcttcgagccgcctgtttctcttaaagcatttttgtgtttacgtgttcttgtcttccatataatctttatgtataaaacgagtttctcctttatttgtacttcctagagatttgcccgctttttgaactttaaaaaggaaatcattctggcttaccttcgttcatggcttgtatcattttcacatactttagctcagtttgaattgtattttcttcagtgtgctttccttgtctgtggggattttgctgcttaaatctttctctcgtagtaagtttgtgtggggtctgacctcagtgctttcggtgcttgtttgtatgtgacgctagttttcctcaactcatggaaggagacttgggagatacactgccctgttacagccccttcggctgtggcttttgtacaggtttcctgcttcccctctcccagttttacctgccttttctttgtccctgtccctgttttgctcctttttgaatccagtcccagcactttctcctcagtgtgaggccttggcttggagcgggagccctggagcatctgttttccgagttccaggaggtgaggctcatctagtccctcggactgcactccctgtctctgtggagtggccagatccctcctagtagcagctgctggcaagaaatgggtctgctgtgcttttcagtgagtgcctcaggctgttggggtgttctgccttcccgagagcccatgcctcctctagtggctggtgcaggggcagtgactgctggggcctggtcactgcctccctacctgcgtgtgccttgctgtcca

SEQ ID NO: 45769 - DNA, 1086 bp, Homo sapiens
aattgaccataaatatgtatttccgagcttgattctgttccattgtcctttttgtgtatctcgatgcccacaccacactgtctttattactaggtttttcattataaagtcttgaagtcatgtaagtcctcaaacgttattcttcctttccaaaatcattttgactattgtgggtcgtttgcatttttatctgaatttggaatcagtttgttaatttctacaaaaacagtgtgctaggattttgatcgtgttgagttagcagatcagttttggaagaattgaaatcatgacaatattaaaccttctgacccatgaatatggcgtatctctccatttatttagatctttaatttctcttagcaattatgttgtagttctcagtgtaaagttcctgtgcaccttttgtcagatttctctctgtttcattgttgatgctattaatgtcattgtcctattaatttctatttttgttagtttatttttatagaaatacagttgatgtttttatctttgcatatcctgcaatcttgctaagtcttagttgcagaaacttttttttggtagcggctatgggaatttctgtgtagatgatcatgtcatctacaaataagttttataacaatgtactttgatgtggatgtcttcatcttttgttctggttcttggccttttcagcaaagaaaattattatctttagttgtgggagacttagagacgtttctggtgcagactgagtcctccttatctgaaacatttggaaccagaagtgtttttggattttgcattttttggattttgggagtatttgcatcatgcttaccagttgagcatgatgtagatatctgaaaatctaatccaaaaatctgaaatccaaaatgctccagtgagcatttcctttgagtatcatgtcgttgctcaaaatgttttggattttggagcattttaggttttgcattttcagattagagatactcaggtagtttgtttccttcctccctccctcccttctttctctccctttctcccttctttcccttcctccctcccttctccctttctccatccctcccttctctcccttccttc

SEQ ID NO: 45770 - DNA, 1038 bp, Homo sapiens
acgtgccaccacacccagctaatttttgtatttttagtagagatggggtttcaccatgttggccaggattgtctcgatctcttgatctgcctgcctcagcctcccaaagtgctgggattacaggcgtgagccaccgcgcctggccgccatccatatatcttctttagtgaagtgtccgttgagatttcatgcacatgttttgagttgtttggcttcttattattgatttttgaggaatctttattctaggtacaagttcttttttaaatgattgacacataaaaagctgtacctatttaatttatacaacttgataagtttggggataagttcatgcccttggaaccattaacaccatcaagagcataaacatatccattaccaccccaagtttcctttcaccccctttatttatttattattattattattattaattttgtggtaagaacacctaacatgagatctaccttcttagcaaattttaagtataccacacagtattgttagcttcaggctgtattttttccctttgaccatcacctccccattttcctcttccccagcttgtggcaactaccattctactctgtttctgtgagtctgactattttagattccacatataagtgagattatgtggtatttgtttttctgtgtctggcttgtttcatttaacataatgccctccaggtctgtgtatgtagtcacaaatggcaggatttccttcctttttaagaacaaatgttttttcattgtgtgtgtttaccacactttctttatttgttcatctgacaatggacattgagattatttccatatcattctcataataatatcttgtaatgagtgggagtttttcattttgatgaagcccattttgttagtgttttttttttttttttgacagggtctcactctacacaggcaggagtgcagtggcatgatattgactcactgcagcctctctctcctaggctcaggtgatccccccaactcagctttccacatagctgggaatacaggcacatgccacca

SEQ ID NO: 45771 - DNA, 1079 bp, Homo sapiens
ctctctcttgacccagtaaattggtttatttgggtcaattgggagtagttatctgaaggaaccattaagattgagttcagttcttcacgtagcttttcttctgctttggtggtggttatttttatataggctcagtttcttcattggattaaactgtgaatgttggcacctataataataattcactgggtaatgtggaataatctaattgtattctaattgtaattcaaaaattaataattccttcaaatagcaagattttgttagtattactctgtgatcatagtcagaaacaaaccaaaccgtggcattctgtgagctagtgcagatctgtgggctacagcttgggccattttaaagccccagtaatccagtaatatttttgctgaactatggaaagtaaaaccagtatgcttaggactgcataggaaacttctcatcattcagaattttgattggataattatatttgtttatatcagtggctgaaaggaatgaccagaaaagaaacactctgtccacaagctagttgaggatcaacatgtcatttcttggcatggcgctttagttctctgggttacttagttctgttcacttgttatacaaaagcaaacagatgagtgaaataaagcaaactgggtgttattgatattagaatgagaatctttgttcaaaatttgtatttattaggacaaacgttcagggaaagttcttcaggggcaagacatctcatcctgataggaacagattatgcttatgtggtgaggtgatttaattttcctttctcccttcttctttccttccttcagactcttcctccatcttacccatgatttattatgtatctagatttttaaaaatcccactcagtatattcgcttagctttaaaaatgcgttcaaccttgactggcgtagataaggccagcaacatgcccagatgttttctggaatcagagggctgagggtcttctgaatgtttcaggaagggcaactgtagagaagcaaagagcccttaaatacttcagagaagtttgggtaatacacttccccacagcctgtatctcacagctgatagcac

SEQ ID NO: 45772 - DNA, 1034 bp, Homo sapiens
cggaatgttgccaaccaaggaatctcttctgatttttggtgtctagagtttttattagagcttcctgagatagcatgtttgattgattgattgcccacaaagttgaactccgtcaccatgtctactggtatcgtgtgagccagagctcccaccctaaatcacatgattggtccttctcatatggccaaccctaccctaagatccagtgtggccaacccccaccctaaacaaggacacttctattagttatgacacagattacctcccactagccgagggcaaaggccagatgtctcttctcggcaaggccagcttctttcctacccacctaggcttttaaaaggattgcagtgagttttatgttgggaatggtcttgaagggcaggggtggaaacggagagaccaattaggaagaatacttgcagtagtccagagggaatattcgtttcacccctggtaatggtggtagggatgataagtggttggagtctggaaatatttgggaggaaaggagcatgaggatctgttgatgggttggatgcaaatatgcaagaaagagagaggaaggagtccaagatacctcttaaggcttttggcttgagcagatcaaagaatggagatctcattactgagatattcaaaagtcagttgtccatcctaagaattagaggattactgctgctaccaccaattaagaggaaatcacagaaaccagcccaatactggttggtatattgcaactcatttaaagaaaattattccttgtatttcagatatttgaaaaaagaaatctgttatggcttataatccccatgtcaggagttcaaatgagcaaaagaccggtttatatgatgttattacttttatattgactttatcaaagtttataaactgtattgagatatttttaattatttccaaaaagcagtagtagtagagtttttggggctaaagttatccaacctattgatactgctcacattttcagaaatgcttgttctgtatgttatacatgctacatgcacgagtaattc

SEQ ID NO: 45773 - DNA, 1027 bp, Homo sapiens
actggggagtatttacctacgtcatttagaattcttctgtaagcaagattttgtctttccccttcccaccccaaaatagatattttgatttaccactgtgcagtcactttgtagtattttgatgacaattgaatagataatgggtgtctactatatgttagatactgtgctaattttgggggcaataatttttaacttctttggggtcacatgcctctttgacaaactgatatttgctgtagactttttctccaaaaacattaagatacacaaaatactgcctgcaattttaggtgtttcacagatctttgaaactcttatgatttcagttaatgtaatgtctgccctccaggaattcagcccagctgaagaggcaggcaggtggggagatagaataggatgtgttgcatgctctcagacatagttttacattggatgagatggtagggaaagctgcagaggggagatgttatttgaatttcgccttgatgagtgaggaagagttaaatcaacaaaagttggaaaagcattcagaacagagggagaaaaaccgacaaaggcctatgcaaagaagcatgatgcacttcagaattggtgcagattctgaccttgccacagtaaaaggtgaagagggaagggactggatgtaaaattagagaggcaggagaaggcatagagtggaaagagaattggataaagtcaaaatctttacaagaccttgttttgttgcaagtcaggagagacttgaatgtgtttaaataaaaggaaagcactagtagagaaggaaagcaggtaattgaaatagctcctgcaaaggtggaagggttgagttcacacagaataggcgcctccttcattgcatcaggagagaaggaggacatgatctaaatttgcactaaattgcttgtgtggattgtatttagaatgatcagctttatcctgaaaatgcaagagagccattgatgacagaagatcatgtttgcatttcgagtaagatcactttgactgcagtggaatggagtgggac

SEQ ID NO: 45774 - DNA, 2001 bp, Homo sapiens
ttgccattattagttcagtggttcttggtcagtagttttcagactggtctgcatcagaatgacttggaggacttatcaaaacacagattgccaggccccacctgaagagtttctgctctagtttggattggggactgacaatttgtgtttttcacaagttcctgattgaagctgatgctgctgatgtagggaatggggatgggtccagcctgcctgaaagcacatggcaagctgatggccatacagaagcagcgtctgttagcagaaagtgaggcggggcagctgtgaggacagcagctgttcttttctctcgcgatctaggtcagtatttgccatagctgtcgtaacagactgcattgtggtcattacttgggggttgtatagactatgttattagtaaagtaagttttgagaatgacttacttaaattatatgcagcagtggatcaagtaagttgaagataatgtttgttattctctgatgacatgctttctagagggtgaaggacaagggtcattgagaccccaaagaattgggtacccctctgggaatatatggtggatgttagtaacagctgatgtgtattaactcattgaaacggccaactaaattcatgagctagtactgttaatgtccacctgtctcaaggaggaaactgtggcttaaagaaggtaagtaatttgcctaatgtcatacagcttgtaaatggtagaaccaggtttcagaaccatgcagtttggcctcacaagccacacttttaatcacgtgtcctactgagtgccggcaagcgggtcctcagttgcaggaagggtaagactgagaggttcattttatgttcttggcttgtatgcagtatggtgggattagtgttctggtaattattccctttctcctaggcttatctctgcctatatttttgcatttgatgtacttgaacctaagcgtagaacttaaaaaattgtgttagctgtgtctgtccgtttcgtcatctttgcatttagaagcctgccattcctgtctgtgcacatgctggagggatatacgattgtataaatagaattgagcacagagacctgtgtttaaacgttttgttttgtttttttgctattgatggaggtggattcttttcataagagggattgtgttggtcagggtctcaatggcgactaatgaagtaaacacaaaggtttttagttgctccataattgttgggaaagctaaagaaactcaaggcgaagtttctaggcacagctcctgaagcagagtgaaaatccggttgtctgatttcttgccaggccctgcctagcactttcagctgtagccatcctgaacaactggtcatgttctcttgcttgtagtctttgtggatgctgttttctttctctggtacactcagtcttcctcttttcttggcgagtgcttctcatccttcaggccctattctaagtgttacttttaaatttttcctggtccttccataataatctcgctcagaccgttagatgcttctgctctctgcttccattgcacactgtatttcccctgtcattatggctgacgattgattattgcctttccccactcctcactgagtcccggtgcctggcacaacaccatgcttgaatgtagcaagttgggtggttcagaattgaaaagtcactgattacacgtttgaagcttcatcatcaagaaatagataccaatcaccaacttttaagttgtaatttataattttcataattgcaattgactcaacagatttttgctttggtttgagtgtaacaccctttataacatatctaatgccgcttgatggagattggataactggcctgtttgctaataattctttgaagtttggaaactgggaatctcagagatttgtaactagataaaagagactctaagaaataaacattttggccaggcatggtggctcacgcctgtaatcccagcactttcggaggccaagatggaaggattgcttgagaccgggagatt

SEQ ID NO: 45775 - DNA, 1025 bp, Homo sapiens
ttaactcttggattatagtttctttgctaattcttttgaaaacatttggcttccttttacaattaggtgggtccctgtgtaagcaaataaaaagctttctatcttggtcatatcactttatttctctgggtcagtttttttacatataaaatatgatgaagttggattgctttctagatgtagaactctgtgaagtgggacgagatgagaaaaggtcctctggtgggccttcctcttttctttttctttctcattttgctcagttccttgtattcactacaacctgggtaagtaagtaaaatttatctttagaaaggcaagctaacccttctttcatttccgtctttttcagtgaagccaaccagaattttgagttgcaggtacctgatgatatacttcagtaaatattttataattttacaaatatattaaatattaaaataccaataataagaaagtttctgtgatagcttccaaagtgattgactgactaatcagtaagatttactaaggacttaaaatgctcccaacatagtaaagaactataggagccactgaaagtgtttacagtatatgagaaagatgaaaacatctgaaagaaagaactgccaggcactaaatcatgctctgctgagtgagtgtgccccagcatggggatgatgtgtgcattgtggtcattgttagcacctactgagtttagttgtagttcagttgtagtttgtgagatgcaagttatgggtgagtgaaaagagttaaagacaatctaggtttttagggacatcatgagcaaaggcactagacgggaattaggctggttcaggtgaggagaggagaggaatgaagagagggtatggatagctttgtgatatggacactgagtaggcacttgaaggagtagaagacttaccaaggtaggtactggtggtggcaagataactctagaccccattcagaggagtttagattggagggagggagatactcggaagcgtttgtgttggttccttgaattccatcctatatct

SEQ ID NO: 45776 - DNA, 1053 bp, Homo sapiens
ctgaggcaggagaatcgcttgaacctaggaggcagaggttgcagtgagccaaggtcacgccatggcactccagcctgagcgacaagagtgaaactccatctcaaaaataaataaataaataaatattagattaaataaacattaaattaaatgcactaaatattagatttttgaaaaatcttttgtgatgtcttagtccatcacggctgctataacaaaatcccaccatagactaggttgtctataagcaacggccctttatctctcacagttcttgggggtttggttttaatgcatgaatttagctgggaaacaaactttcagaccatagcagatgccttgtgatcttcatgacaccttgaggccacattttgggatttttcccccactgtgaacacgcatcctgaaatgacccaaagcagcgataaatatgatttggtttatatacaactttatagtaacatcttcactggaaaatgaaggatagttcaatggtctttttcctcttcagtgaatagtatggctggccaacatggcaaaaccccgtctctgcaaaaaatacaaaaattagctgggcatggtggcatgcgcctgtaaatcccagctactcgggaggctgaggcaggagatttgcttgaatccaggaggtggaggttgcagtgagctgagatcacacaactgcactccagtctgggtgacagagtgagactccatctcaaaaaaaaaaaaaacccaaaaaactatatatatatatatacatgaatgtatccatcaaacagtggtcattgcacgtggctttttcagaacttatggttccttcatgtaacgtgagatatagtataggacacagtatatgcaggagaagacaagttctaccattgtacgtgagctagaaatgatcatctcaacaagaatttcaggctctttgatgcaagaatgtatggtgtctttctggtgttccttggccacttctgtctttgatgaatcattttgatactggattgggattcactgttaatttttcaggagtacagtctaagagttaatacactg

SEQ ID NO: 45777 - DNA, 1048 bp, Homo sapiens
gttttcttatctgtgcctgcagcctgatttttcaggctgtttctctttttaaaggagttttgccaaggacctaccctaactacctaactttctctatcaatactttgtatgacttcagtctttttaaattcattgagacttgctttgtggacaaacatagtctcttctggagagtattccatgtaaactttagaagaatgtgtgttctgctttgtttgaaaaaatgttctgtatatgtctgttagatctagttggtttatgtgttgtacaaattctctgtttccctatttatcttttgtcaagttcttctatctgttattgaataggatgtattgaagtctattattctagagctttctacgtctcactttagttgtgtcagtgcttgcttcctatattttgggactctatgtttggtgcatttatgtttataattattatatctccgattgaatttattctttaatcaaatatagtatccttctcaacttcaacaacatattgatattaagcatatttaagaaagttgctttgtaaagtctttgtgtagtaagtacaatgtctggccttctcagggacatgttctgtcagttaatttcgttcctttgaatgggctatactttttccttatatgccttaggattttgttgctgttgaaaatggggtgtttgaaaattacagtgttgtgtctctggaaatcagagtctcctctttcaccgaggtttgctttttttgttgtttttggttttatgtatctcttttttttgtcaagtgacttttcccaactatttttgtagggattatattccttgtcttgtgtggtcactgaagtctctgtttcttagttaatcttctggtactgttttttttgtgtgtggttttttttttttttttttttttaagagatggggtcttactctgtcacccaggcttggcaggagccactgtgcctagcctggtagtgttttgacagagatttccttgaatgccaggagctaaaacaaataaacaaacaaaaatactttttccagtttttgcaggttggctc

SEQ ID NO: 45778 - DNA, 1021 bp, Homo sapiens
attgtagtcacttctcattttccctttcccagcccctgggaactgctaacctgtagtctgtgtctgtagagttgcctagtctggacatttcattaatgagtcatagaatgtggtcttttgtgattaacttcttttactttcacataatgttacaaggttcatccatggtatagcctgaatcaatacttcactcctttttatgactgactaatattccattggatggatctaccacattttgttcatccttttagtatttgagttgggaacatttggttgttcccagtatttgacttttatgaacataataaggctgctagaattcctgtaacaaggctttgtgtggatgtgagtcttaatttttgttggatatatacctaggagtggagctgctgggtcttatgataattctgtgtttaactttttgaggagctgcaaagggcagcaatttagcactctgatttattctttttttcagtacaagacattatctaataaccagaaacttgttcaacttagatctaacgtcagatccagctaggagttgcagacttccattttcaagtctctccaagagaaattttgttatgtatgtctatgagatcacaatgactgtcccatctctctctctcttttccccacttttttatattaaaaatttattgtaaaatatacgaacacaaaatataccattttaatcatttaaatttttattgtgttaaaatatatatagtgtaaaatttatcatttttaccatttttgcacttgatcttagccaaaaggcaaagaaacagtttaatcattttaaagtgtacagttcactggcatgaggtagattcacagtgttgtgcaattatcaccactgtccatttccagaactttttcttcatccctagcagaaactctgtacccgttaaatactaacttcccattttctcctttctccagcctctgataaactgtatgctaatttctctctgactttgcctgttttaagtgcctcatgtaagtggaattgtat

SEQ ID NO: 45779 - DNA, 1065 bp, Homo sapiens
ttggttcatgattttgcaggttgtacaagaagcacggccctggcgtctgtttccagtgagggcctcaggctgcttccactcatggcagaaggctaagagggcttgtgtgtgcagagatcacacggcaagaaggaaagcaggagagagccagaagggctaggctccttttaacaaccagctcccgtggggactaagagtaagaattaactccctatacccaagggaatgaatctattcatgaggcatctgcccccatgacccaaacacctcctgtcaggccccagtactggagatgaaatttcaacatgagatttggaggggaaaaatatccaaactctatagcatggagtaatggcattgagagctgcaactcttaatctctggtaattagtggttaagtagacgacaggatatttttccttgggcatgttttgaactctgtgtgtgtgtgtgcagtcgcacatgcgtgggtgtgcacttaatgataaaagcagcaccatttgtaatggcagttcatgttacagagtgcctcatatacaggtcggctgtgtggtggaccacacttcagcagatcctttctttcttagcagttctgtccttctacccaaccaggcagttgacatttgtgaaaacacagagtttaggatttcaagaacaaagtatataaagatggtgaaacattttctcagttctttttcatgatttctaaactaggaagagtcaagaattcaagattgctaatctaaattctgatgttggagtagtcatttgtgaagggtgatagaacagagtatcattcttagttacaacagcaaaggttaattacctagttacctagttcctctgtaaattatttaaagctcagaatattctccaacattacaaagacttaaaaagcaaaggagaattttgagaatgtactccatgcacagatgctattgttgcgccccctgagattttgcttcagtacttgagatgtgtatcagaatgttgaagggcagcaatgatgtgtaacagttttattaagatataattaacgtactacaaaatttacccacttagatt

SEQ ID NO: 45780 - DNA, 1864 bp, Homo sapiens
aggagtgagtgacttactgcttgagaggaagggtttggaatctccacgtgtgttcctaatgcaatttgaggttccctctcattttcattcactgagaggtgataatcggcagctgtagtcattttgttttgtcagagccttagccagtgtgttgcatggattaatagaattaatagaaattaatcgagttggacctgatcagtggtggttttattttttaaagcaaatgtacaaaggaaatacatgatgttgtcaacaagtcagagaaaaatacagatatgcatagaataaattgtgaaagtactcccctcatcccaaagcacccgagggtaaccccatcagcagtaagttgtcatgttcttccctctttttttcccactgtgtcccgtctaataactaggtgtccaagtgatctgtgagcagaattctttattctagtagtgacttgtgggtgggtacatactggcagtcacacactggttctcttgaggcggcagtggcatcagggaactggtgggtgggttgtgagcagaagaaaacccttaaacaggaccactggccaaaaaggcttgctgtccaggtgtaattggaatcacagtaacaactgctccctcacagtgggagtttcccatgtacaggacacccaacgctgtgcatgtgtgtcactcactgaactctcatggtgaccccatcttacagatgtggaaacccaagcacacagaagtcagcagcttgtccagcatcctgccgcgtaataaagagattccagtttagtcagtctggctccagaatcatgttctgacgatgctgtgccatcttgtaggagcagaactctgttctctgggagctgttatatatatatatgtatatgtatatatatatgtatatatatttgtgtgtgtgtgtgtgtgtgtatatatatatatatattttttttaaggcggagtctcgctttgttgcccaggctggagtgcagtggcacgatctcagctcactgcaagctctgcctcctgggttcacgccattctcctgcctcagcctcctgagtagctgggaatacaggcgcccgccaccacgcccggctaattttttttttttttgtattttttagtggagacggggtttcaccgtgttagccaggatggtctcgatctcctgacctcgtgatccacccgcctcagcctcccaaagtgctgggattacaggcgtgagccaccgcgcccggccggaagctgttatatttttaactcatacctttttggcccccaaatcaggtaaatggaaattatagatctgttaatggcttaaataccggataatagattttatacaattgattgaatgtataacttgaaacagtgtcgccgctgccagcctgcctgcaagaatctttcttgtggttttgctttgtaaaagtaaatgttttccccgtgaatcttctgtagtgttttattcttggtgtttttctttggggcctgcatgctttctggcctttgctcctgctgagtaggcagacatatctggagaaaaccatggagtaaaggaaaagctttggaatttaaaattgatttatgtggaagctttttctgtggttgaaaaaaagtaaagaaaaaccctcctttctacattaccaattcccggcaacagtaagccaaacctgttgtatttgggagcaggcctgggtgcatggaaactgctcagaacagggaggtcaatgccattatgataatccagtgacttccatgggaagccatcattgagaaagggtacttgtgcagatctaaaatttggaacaaaacaccctgaagatggccaaactgatataacgttatgtaccttggtggagtgtcttggtctgtttgtg

SEQ ID NO: 45781 - DNA, 1029 bp, Homo sapiens
aacccttaagttcagcgtgactttcaccatttttaagcacgtgcagcaaaagttcacctgtgtccagccccactgtttggcctgggcacacctaccgactctaccattgtaacatcagaatgataccatttctgtaaagtgacatctttcagttacctggtggcttttcatatatgcaacctcgatggcctgggtaatgtcacaagtgtttgtaaagtgaacatgaagatttaaacctcttgatttcatgattgtgtagggttttctgggtcaagtgagtagtgaaccgttttcacagatcacctcaggccgcttaggggaagagcaacaaattctttcagtttcctctcccctgtgattttataaagtaaattttcatgtacctgtcctagaaagaggaaaagggaacctagtaattctaaattactgtggaactttagttaaatactgtcttgtccagaaggcagacttggggcatttgaaaaggtgaaggggtccgttgatcatccgttctcttgtgcttctctggtgctgtggatgagataatgagaagccctctagtatgtgctcccgagactccaggtgagagctagacttggaaagtgcgaagggcagggcatctgtcctgtaactgagcgtgacctctgggtggttggtaagtaaccagaggaagacacttggtgctctttgtaacagtcgcagccgctttgttccttgcctcacaggaaagaacagaatgtctaattataataatcttctaataattacaatattttgtattcattttcttttaaaaatctgtttgagtaactactagccttcagaagatgctggaaaatagtatttaggcagcagctggcagctcccagtgttggagtcgatgcggtgctcggctcgtaaagatttcattagctggacatacactctgatttccttcttgctgcacaagtacattctgttgagcagctgttttggaaagggaggtacaataaacacttctgcacttgttttaaatacgtgggttttgtt

SEQ ID NO: 45782 - DNA, 1050 bp, Homo sapiens
tggcaggggcatcttgctgccagggtgccagactttgcccagcgtccagctacctaaaagtcaccaggaagacagccagaggaggtctcctgcttggatttggtggctttgcggggtgggggttttctttgaggaagatactgcagatctagggagatgccctaactgctgatggggcctaagagtcctcgaggctgtggcaccatgacacccagagtggctggggccgacttcatctgcctcccaccctgtacttgagtagtcttaaaattttgggggatgaggaatgctgtggagcagtatcttaatatttaggaaaagaatttgatgtaaaatctggcttgacataatttctttaaaaatatatacaaacgttgcataaaggaatattttaataaaaacaccagttaaccagtatatttgaaaccattttttcccaagtattggtgtcatgcttaagttttcttttaggtgactttatttttgacatagtacacgtaacagatcttcatttaccatttattatatgagacataccacttgactcagctaaacctccgtttctgattctataaattggaaataagagtaaccattttactcatcttagaaatggttataaagatcaaaacaaaggatttatgcatatgttggccaattcgaggagataatttcctagggttattacagttgtgagatttttccggtttcaaaatgggataatttgtaaaggtgttttaaagatgctaagcacaggtcagtgatgatcatgtcattttggaaacattcattatacaagctgggaaccttgtaaaatgagtttcacaaggtcatttgctttacacccacagagtagtgtatattgcagctgatcacattcttaggggtcagaaattaatattaatttgtcaggcttcaaatgtaaatcagcatttccctgtttttcttttgagaagaccaaagttgctaacctgtattcttgttcttggattatgctgtttgtaataaaaaaagatggatcatgatgaatgctgattagcaccttgggga

SEQ ID NO: 45783 - DNA, 1030 bp, Homo sapiens
cctatagtgtttcaaggttaagtgacatttcttacctttcttatgctttgttggcccttgtctacaataaagaactgaagtggagctatttttgtccacttttacattctgcctccaaaacctagccatagggtgggatgctataatttcttgatgcagcattggtatttgaacaacacacatgaagcaggaatggttttacattttggttcatttgaaatatggttatagtgaggttttaaataaatcatctgagctacagtaaacaaaaaaagagcaacactagccagttgtcaaggaaaagactgatgggtagaataaacagactgctttctgcagtctaaacaatctgttttcatggtttttttctctttctttttgaagggtgattgggagaacttccaaattaagtagaagttagttaaatatgagaggcagtaaatccacaatgcgtatgttagtgattattacagcctgttttctcaatagctctaataacaacaatgtcagtgactgaacacagtagaacagtattgtttgtcgtggggtggtatggctggtggtggcttcgacatcctcagggctcaacacctcagcattcagtcagagaaaggaaagaaagtatagagaaagtataactgtttcttaaaaactctagcttgggccaggcgtggtgtctcatgcctgtaatctcaccactttgcaaggccaaggtgggaagatcacttgagtccaggagtttgagaccaacctgggcaatgtaggcagaccctgtctctacaaaaattaaaaatagatgagctggatgtggtgtggcacacctgtggttcccagctagttgggaggctgagatgggaagactacttgagcccaggaggttgaggctgcaggggcctgtgattgtgccactgcagcctggataacggagcaagactctctctctgtctctcaaagccctggtttgaagtgaagtgaaacacatcacttccactcacatgccattgtgaagaactagccgtggaccatacct

SEQ ID NO: 45784 - DNA, 1680 bp, Homo sapiens
aggaaaggaaactatattgaatattctgtttatatatatagtctcacttaattttcacaagcattttgtgcccattttacagatgaagaagtgagcttaaagtgataaagtaacctatggcactggtggaggaaacttttgaagccagagctcacagagctgtgggcgggacagaattagtttgctttacctctgggacgttgttgtctggcttattgaagatggaggaatgatattcttcaacctctggggcctcttggtatataagctgaggttctttgagacctctgatgtctagtctaatgtgttaatattaaactctgcagagcttagggtaggcttgtaagtcttgtagttgattgtaactgctgatgaatcaaacagctgagtaatattaatacctctgggtctgtgtcttaggacacagttttcagtacctcactccattctctttctcagggtagatgcaccttacaaccccgtgacttccacattacacaaaggaatatgtaggtttggcataccccacaggtcccatgtaaatactgcactcaaatatgttggttctctgttgacctgttggaaacattgagaacagcagttgtatcccaaggatataaagaagctgttttcttttcttttcttttattttcctttcttttcttttcctttcctttcttttcttttcttttttcttttttcttttctctttctttctttctttcttttctttctttctttctttcttttctttcttttctttctttctttttttttgggacagtttcactcttgttgcccaggctggagtgcggtggcgcgatctcggctcactgcaacctctgcctcctgagttcaagtgattcttctgcctcagcctcccacgtagctgggattacaggcatgagccaccatacccgtctaatttttgtacttttagtagagaaagtgtttcaccatgttggtcaggctggtctcgaactgctgacctcaggtgatctgccctccttggcctcccaaagtgctgggattacaggcgtgagccactgcacccgtccaaagcagctgttttcaaaccttggctgtgcatcagaatcacttgaggagccagatatttgagatctaccataagagactgtaatccaagagatctgggatgggcccaagaatctatatatttaaaaaatctaggttttcagaaagttccctaagcagtacacagacagggatgagaagcatagttgtacaggctgatttctgccaatatctatgagttagttatcaaggagaaggagcatatgttagaattgcttgggaatttgttttttgtttttggtaaactttttatcactaggcatcttagatttagaggggcggaatggataaaagaaggtcctcaggtgattctaatggattaccagtatttaaacaatctgaatggaccttttagctggagtggcttggcaaaaagtctgtattaaccaaagagttgctgttgccatatattatgcctggatttagaatgcaggaaagacatttaacattaaaattatgacatataattgaggattcctttgatccaaaagcttctttctttggaagtttgaagtatttcaaggtcattattatgaacacagatgatccccattggtgctcagaagtgccaggttagaggcattt

SEQ ID NO: 45785 - DNA, 1062 bp, Homo sapiens
ttgttgtttgagatgtgttctttaactttgaaaagttagtgtttgtaaaaaaaaaatttttttagtgataccatcaggtcacttgagctcttttaggaaataattctgttaagtgaatttttttgtttgtttagattaaggtataagttctcttttgacactagtcgaatttttaggaaagatggaatttgctgagagaattcagtggctattgttacagtgacattaatatagttctacataaaattctacatgagatttttcatttctgtatttctaatgtgggtagatcttggtatattgtattattttaatatagctcaaaacatactacagcaccctatggtattttacagatttctaacaaaaaatttcttctcattgacctcttttacttttgaaatattaaacaagtggtttaaaaaataatttttgttttgaatggagtgtttttgtcttcttagtttaaatgaggaagcaatttctgttttatcttggtcactgatttagagcatggactgtgctcatcattcatttctaggaagaaattagagtattcatttcacagagagctacatattgttttcttcaccaccctcttggaggaaaggtagggttgataattacggtttgccctggccacatgctttcactcatgggtaggtgagctaaaacattcatatcaccatgatgcttccttttctttccgtcttaaatagacaggacaaatgaggaaaggcagcagatttgaggaagatgccaaacccatggcttgggaagcttgccagtgaagttgagcaggcagggcaatctagaactcaggcccctccagagggcaggtgcctgactttctcacttcagctgtgtttcttcaagtgtggcagagactcctgtgttaggagagcccacggggccattaacatgcggattccaggccttactacagactccaggatcagagcctcagggagttgggccagggagtgtgtatttttgctcaatttttattattgaagctttgaagcacacagggaaatagagcagtataatgaacacctgtta

SEQ ID NO: 45786 - DNA, 1037 bp, Homo sapiens
ttgcagcacttaaatagaaaggccgaggcactgctggacctgctgaagaagactccctggggaggacacaagaagtcatagttttagaagaaccacaagtgatcacgtgggaaccccacgcttgagaactggatttcaggcttattccacttggagaggaatattagatttgtgttcttaataaatatgatggcagaattgggaaaggaatgatcgggtaccattaagtttggcccctggataataccataacaaaatgactttaccttggaagcatgagtgtctaaaagtacctcaggtgtactcaagggtatgcactaatggtactccatgttttctgttttttttggttgttgttgttgttttttttgttttgttttgttttgtttgctttttgagctcaagtattaatctcattctgaaagaattcgcaaattcaaaacagtgttcaataaatgtagcccacttctctttgccttttatgggatacaaataatgtttatgttgcgtgtgaaaggtataataattctgtttaattctgaagtgattctattaaataggcttgaggaaacataactgggattatgagtggtgttgggataagtgatctgtaatgtccctctaatgctaagattttgtggtttaagaatggtaatattcaatatttagatacctacaaatgaggagattcgtttgtgtggggccagggtaccattatagacacattaatagattgtatacttgcatttgtgggctgtgtgggtgtgtgggtagagagagagtgtactttatatgcttattaatgggtggcaatctaattgtaaaaatagcttttttttttttttcattttatccataaacttaatggaattctggtttaaaagaaactcagtgggaggccgaggtggcggatcatgaggtcaggagatcgcgaccatcctggctaacatggtgaaaccccatctctactaaaaaatacaaaaaaaaattagccgggcgtggtggcgggcgcctgtagtcccagctactcaggaggc

SEQ ID NO: 45787 - DNA, 1032 bp, Homo sapiens
ttttaacataccagtagaattcagcagcatgtactggtaggcttctgctgaacaagccgaagtgtgggcagtaaaaatgttggtgtcaggttaaaattcctgagagaactgtttctaatggaatctgtcctggacacttactagtagtaagctttgagacagaatgaaattggagtagaataaaatcccacctccattcacctaaatgttaattgtttcttggcaaagtggaagtccagattttagggcaaactgaaaagtacatttaaaatgtcaatttagcttttgtagttgtatgtagggtagtattttttttttttctgatcttaactttcctctgcattgatataaagtgcctgtgactttactgtctagttttttttttacatcttttttcaagattagaatatatctctaaatatttcctaaagttaacttattaaaagacatgctaattttagtaagttatttcttctaacatagctatacttcaaaagcagtatttactgaggaaggattttattaaaaaaattttttttcccagttagatggttttgcttgaaatactgcaggaacatggtctgctgttttaatacctgctagccatgttgtttgcgttgaaatcattcatatgtaaaagctttagaggaattcttgttttaatctttcggcaaacaattgcttgtcaatgtgtttgaacatacatcatctctgtttttattgaagatcttttggggttatagttgttgccttaaacatatttgctgtggaaactttgctatttcttatggtcacataacataaaggttaagatctaatatttctatcatttggtttgggccgcatctctaagaaaagatgtcagtgaagttgtacattgtcaaaactgattccattaacccgtgaatacttgtctctttacattttttaatgtaaaattatttggttatagcttggacagagcacaacaccgatttaataaaacttagtttccctcgatattaaagtggggcacttctctgcatcttgcca

SEQ ID NO: 45788 - DNA, 1109 bp, Homo sapiens
acaccctactggctggttgccaactcctggaacactgactggggtgacaatggtgagtggctgcccccttcctgccaagaacagtgaattgtgagccacaccccgtggccatctcggctttctctgttctacccaccgcacagccttaaaccctggacctacggccaggctgtgagctcctcctaagtgccaggcagtcaggagttcccttttgctgtgagggcagactctgagcagcttcagagccaacgcctgcaacagttcccacagcatcgcgccagatcctgtgatgggaagggtgaccgggcagggggcttgcccgtggaggtgtgccccacggctccagaagccttgtggtgttgaggactgtgctagtgggccaacagcaggagtggccagggatgagtgacttaaggtcttttaaggatgagtctgactatattggttgacccttgtcacactttaaaagcaccttactttttattcccaggcttctttaaaatactcagaggacaggatcactgtggaatcgaatcagaagtggtggctggaattccacgcaccgatcagtactgggaaaagatctaatctgccgtgggcctgtcgtgccagtcctgggggcgagatcggggtagaaatgcattttattctttaagttcacgtaagatacaagtttcagacagggtctgaaggactggattggccaaacatcagacctgtcttccaaggagaccaagtcctggctacatcccagcctgtggttacagtgcagacaggccatgtgagccaccgctgccagcacagagcgtccttccccctgtagactagtgccgtagggagtacctgctgccccagctgactgtggccccctccgtgatccatccatctccagggagcaagacagagacgcaggaatggaaagcggagttcctaacaggatgaaagttcccccatcagttcccccagtacctccaagcaagtagctttccacatttgtcacagaaatcagaggagagacggtgttgggagccctttggagaacgccagtctcccaggccccctgcatctatcgagtttgcaatgtcacaacctctctgatcttgtgctca

SEQ ID NO: 45789 - DNA, 1068 bp, Homo sapiens
tgcccgcctcgcctcccaaagtgttgggattacaggtgtgagtcactgtgcccagccatgtgtttagacttttaactaatctcttttttagtttcaagccttatcgtccgcctctgtagaccactcctgtgcctgtttcctgatccttccaagggccattgtattccctgtctgctgcccctcttttggattcttctgcacatttttttgttcatgcattcattcatttattgtttgattaatgacagggtcttgctttgtctcccaggctggtgtgcagtggtgcgaccacggctcacggcagcctcagccacccagatgtaagcgatctggttcccacctcagcctcccgagtagtaagtagctgggaccacaggcggtgcccaggtttttttttttttttttttttttttcgttggtagagacagggtctcactgttgccaggactgctctgaaactcctggtttcaagtgatccccttgcctcctcccacttaggccttccaaatgctgggattacaaggcatgagtcacctccaggcctttttgtacttttaaaactctgcatcagtgtataaacaatgttattaaagtttatatgacttcagttacactacatggatcctttttcactcacggttgtgagatttatttctgttgctacatccagttctagtccatttgtgttaagtgcccagtgtgtttatctactgagggacagttatgttatttcgtgttcactattatcccatgctacaataaatatcctgtgtctcccagatacttagaagagtttctgcagggcacatgtgggagagtttgtttctgggtcatgaggtgtgttcatcttccatcttgctagatgctggcaaagggttctccagtgtggttgcatcaatttactcgcccagcagtgtgcagagttcctgttcctcacatttaccaacactagatagtaccagactttgatttttgccaatctgatgggtttgaagtggtacccctgttttaatttcatgaccagaaattcaaatttaatctttgctgtaggacaacagtaacccactt

SEQ ID NO: 45790 - DNA, 1052 bp, Homo sapiens
cccacactgccccagggagtgccccattccctctggagctgtgtgaacaaggctctggccttctctccaggaataccaaagggagcacagagaccagagggcaaaggaggaacggcaaaaatggagtgcctaaatcacctgcacaccttccgtcctcagccctccggtgtgactttggatgacttatgagctctaaatctcagctcctcctcctatttgaggaaacaatgcttatccccaaggattgttatgaagcttaaatgacacatgtgcaaagcacagggcctgaaacaaactagatgcttactaattgatacttttgtttctttatctatgaaaggataaaaaaatacttcccaatggggctgtgcaagatggatcacacctgtaatcccagcatttgggaggccagggtgggaggaccacttgaacctaggagttcaagaccagcctaggcaacatagcaagaccctgtctcaaaaaaaatttttttaatttaaaaataatttaaaaatttttcaaaaagctttctgatgaacactactgctgaccattccatgcaattctgagtagtgttattccctctagagcatcccaaaatgccaaaattcattcatttattcattcattcaggtattcttcttacaaacatataattctcgcctactatgtaagtagacaccctccaaaaagcctggaggtctgtcctctttgagtttacagcatagtagagatgataaactaaaaaataaataaaaataaacaagctaataattacaaaaatggcaattgtttggaaggaagagtgcagggaaagatttatatatgtacatgtgcgaacgtgtgtacatacatacacacatgtaatgtgctgcacaacatacgtaccacactcagatcaaggtatcagatgttcccaccaccccagaaaagtccctcatgccattctcaggcattaaccctaccagagacaactactactctaaattctgtgaccatcagtgaattttgtctgtggctgaacttggtgttaatggaatcacactgtgtgc

SEQ ID NO: 45791 - DNA, 1084 bp, Homo sapiens
ttcagtggtcatcagtatatcccactttaagaatccactgatagtcactaaatggaacactctaaaggaatgaattttatagtaaattctatctcaataaaaatataaaacaccaacattcatggaggaaaggtgtaattctgtataattatataaatgatggaatcttgaaatacattttaaaacgtgctctgaggtaatatgcgcctcagaaacgataaataagtcaattgataatctaaatctcaggtataaaccacagtttaatatgtatttattataaagtattggtggattttaaaattaatttgggaaagttagattgattattggtgttggtaaaaaaaaatttcatcgtatggattatttaccatatggttgtttataacagactttaatgatccattgtgtttcttttatatcagttgtaatgtctcctgttttatttctgattttatttatttggcattctctcttttgttcttggttagtctagctagcagtttataaagtctgtttatctcttccaaaagtcaactttttgtttcattaattctttgcattttttaaatctcgaattcgctgagttctgctctgatttttattatttctttccttctccttagtttggatttcattttttcttgattttcttgttccttgaggtgcatagtagcttgttcataatcttactatgttcttgcagtaggcatttattgctataaaattctctattagcactgtctttgttgtattccataggttttggtatgttgtgtttccgtttgcatttatttcaagaacatttgttattttcttcttaattttctcattgactcaatggttgttcagaagcatgttgtttaatttccatgttatctgtatagtttccaaagttcctcctagtattcatttctagttctattctatttttgtctagaatatacttgatataatgttgatttttcaaaatttgttgaaacttgttttgtgtcttaacatatggtctagcctggagaatgttctatctgatgaggagaagaatgtgtactccactgctattggatgaaatgttctgtaaatg

SEQ ID NO: 45792 - DNA, 1113 bp, Homo sapiens
ggcgtggcggtgcacacctgtgatcccagctacttgggaggctgaggtaggaaaatgggttgaacccgggaggcagaggtagcagtgagctgagatcgcaccactgcacttcagcctgggtgacagaacaagattccatctcaaaaaaaaaaaaaaaaaaaaaaccacacacacacacacaaaccaaaaatactgatgcccatgtttcatccccaagagattctttaataattgatctgggctgcagagcccgggcattgggggttttaaaatctccccaggtgattctgatgtgcagctgtggttgagaatctccttctggaatgaacttgttcatgttttacttgtgttgttttctagcctgccaatgtctttctgtttccgttcacatctttgggttgtaatttttacaatgcagtcttaacaaccagctgcctcaaaatgcactgggatctctcgtaaccaggtagctccccatctctaactctgacctgctaagacagaatcttgtgcgtgtggcccaggactgtacatattgaaacaggcaatgacctgggaactatttctgaacacccctaggtttcccgtgtttgccctttcctttcacatttggacccctttgtgtgctgaccactgggctgtttcacatggacataacataaaaaagacaggccaggtgcattggctcatgcctgtaatcccagcactttggaaggccgaggtaggcgaatcgcttgaggccaggagttcaagatctgcctggccaacatgagtaaaccccgtctctaccaaaaatatgaaattagctgggtgcggtgatgcacacctttgatcccagctactcaggaggctgaggctggagaatcccttgagcccaggaggcagagactgcagtgagccgagatcgcaccactacaccccagcctgggtgagagtgagactcttaaaaaacaaacaacaacaaaaaaaaaaaaacaaagagacagagatgatccttcctttatggagctctcagtaaaacaagaaagctcatgatgtcctgtcatttgtcagaaatatatttggtatatgtagctggggtcacatgcttgacatgcctattgaaagcttctg

SEQ ID NO: 45793 - DNA, 1046 bp, Homo sapiens
tagattgattccatatcttggctattgcaaatagtgctgcagtaaatatgggggtatgggtatcccgttgatacactgatatctttttttggatatatacccatgagtgggattgctggatcatatggtagatttgttcttagttttttgagaaatctctgtactttttttcataatggctgtaccaatttacattcccaccaacaatatacaataatttccttttcttcacatgcttgccagcatttgttgtgctttgtctttttaatacccattctaacaagtgtgagatgatatctcattgtggttttgatttgcatttccgtgatgattagtgatgttgaatattttttcataaacttggtgatttgtatattttcttttgagaaatgtctgtttattttttgatagtttcttttgctgtgtagaagctctttcatttaattagatcccatttgccaatttttgcttttgtggcaattgcgtttggcatcttcaccatgaactctttgcccatcactatgtaccagatggtattgcctaggttgtcttcagcgtttttatagttatgagttttacatttaagtctgcaggccatcttgagttaatttttgtgtgtggtgtaagggaggggtgttgtcttttcactctgttgattgttttaattgatatacagaaggaatttaatttaatataatcccatttgtctatttttgttgcttgtactttttaagcgttagccatacaatctttgttctcaagcgtttctcctgtgtttatttctagtagttttatagttgtggctgttacatttaagtctttaactgattttgagtttatttttctaagtgatgagagataagggtctagttttattcttctgtgtttggatatctagttttgctggcaccatttaatgaagagggtgtcatttattcaatgcatgttcttgacagctttcttgaaaatcagttagctgtaaatatgtggattcatttctggattctttagtctgtttcctttgtttttgtgtctgttttaatacc

SEQ ID NO: 45794 - DNA, 1108 bp, Homo sapiens
aagaaacaacaatgaaagagcaaaattacgctgatgtggtggtgtatgcctgtaatcctagctactcaggaggctgaggcatgagaatcacttgaacccgggagacagaggttgcagtgagccaagattgcaccattgcactccagcctgggcaacagagtgagactctctccaaaaggaagaaaaaaaaaaaaagtatccgggcttggtggcatgcgcctgtagtctcagctactctgaaggctgagacgggaggatggattgagaccaggggtaatttgaagctgcagtgaactacgattgtgacagtgcactccagcctggactgcagagcaggaccctgtctcttgtacatacacacacacacacacacacacacacacacacacatacatacatacccaggttctacctctggtgattctgactcagtagggtggggtatcccctagggatcctgctgtccagcctggtctgggatccacttttcattgggaactgagacactggctgtgagcctttctgtcctgagatgtagaggtcatggcgatgcaggttcaagcttaaggagacctgactgtgcgttaggtattgtgctgaacatcatctcttactctcacagcaacatccttagaaggttaatgatgtatccgtgctctacagatgaggaactgagctttcagaggagattagcttgtttaaaactattcttcctattggaaactttgtaccctttgaccagtgtctcctatcccctccctttccttcaccccagcccctgataaccactgtcctactctctatttctgtgagttcaacttctttagattccacatacaataaaatcatgcagtatctgtctttctgtgcctggcttatttcacttaacacaatgtctttcaagttcatctatgttgttgaaaatgacaggatttctttcttttttaagggttaatagtattcctttgtgtgtatatagtacatttgctttatcctttcatccactcatggacacttaggttgattctatatcttgggtattgtgaatagagctgcagtgaacataggaatttagggatcccttcgacatattgattttgattttttt

SEQ ID NO: 45795 - DNA, 1056 bp, Homo sapiens
ctgcctcagcctcccgagtagctgggattataggaacctgccaccatgcctggctaatttttgtatttttttagtacagacagggtttcaccatgttggccaggctggtctcacactcttggcctcaggtgatccacctgcctcggtctcccaaagtgctgggattacaggcatgagccaccgcaccaggccaattttctctatcttcgattctagccatgcttatgggtatgaagtggtatctaattgtggttttgatttctgtttccctgatgatgaatttcattgagcatcttttcatgtgcttattgaccacttgtatgtcttccttggagatgcgcagtattttcatattcaaaaatgaaagcacaggtccacacaaaattttgtacatgaataattacagtagcatcactcctaataacccaaagagagaattaatccaaatgcccatcaccagatgaagagatacacctattgttgtctacccacatggtggaatattatttgatcacaaaaaggaggatagtacatacgctacagcgtggatgaaccttcaaaacagatgaaagatcacattctacatgatttcattcagatggaaatctacagaaataggaagtcgattagtggttgcttaggggtggtaggggcatgggaggatggggctgttagctaaagggtatgaggtttctttttgaggtcatgaaatgttctaaaattgactggtaatgtttgtgtatatctctgaatatattgaaaaccattgaaatgtaaaaaatgcaaagaaaaaacagcccaagttgcaattttattcaacgcttgattggctttaaaaatagattccaggctgggcatggtggctcacacctgaaatcccagtgctttgggaggctgtggtgggaggattgcttgaagccaggagttccaggccagccttggcaacatggcaagaccctgtctgtacaaaaaaagaaaaaataaataacagctgggtgcagtggtccacacttgtaatcccagcactttgggaggcagaggcgggcagatcacctg

SEQ ID NO: 45796 - DNA, 2280 bp, Homo sapiens
ttttttgggaaatgggatcaagagggtttttgtttgcttgtttgtttgagacagggtctgtcgcccaggctgaagtgcagtggcgtgaccttggctcactgcagccttgaccttctgggctcaggtgatcctcccacctcagcctcctgagtagctgggactgcagatgcacaccaccatgcctgactaatttgtctattttttgtagagatgaggtttcaccatgttgcctaggctggtctcaaactgctgggctcaagcagtcctccatccacctcggcctcccaaactgctgagattacaggcatgagctgctgtgcctggccaaggttttttttttattattattacaaaaacttttcaataaacataaaagtagagacaccagtttaatgagctatcatatacccatcacatagatttaaaaactattaacatttgcaatatttacttcatttgtttttctgaagtatttacaaaatagttgacagtagttatgtaattgcatcctgatattcatccctacgtaatttactttccctctaaaaacatgagggcactttttatatgatcattgtcatacctaatcaaattaccagtaattccttaatatcctctaagatcaactttacattcagatgtcttgtcctcaaaatgtcatttgtgattatttttttctttgaccaaagatagtaagatctcaagatttaatgacagagattccatgttagccctgatgtctaagctctgtggtccattgtggctttacttgaaagtctgaggctaggcgtggtggctcacatctgtaatcccagcactttgggaggccaaggtaggcggatcatgaggtcaagagatcaagaccatcctgaccaacatggtgaaaccctgtctctattaaaaatacgaaaattagtcaggtgtggtggcgggtgcctatagtcccagctattcgggaggctgaggcaggagaatcacttgaacccgggaggcagaagttgcagtgagctgagattgcaccactggacgccagcctgggtggcaagaacaagactctggaaaaaaaaaaagtctctcactgtggtctcataataaaaggacactccatttcccatctggtccctgctccttaatgttagccccctcctgtggggaggaaggggtgactttcagcgcgggttcaaatattcccagggctggctctgatcccaataaagcccatcgtcatgaatgaatgcttcccttgcaggatattctaagtattgtaaatagtgcacgtggagtgtcctcatgatgcctgggattgtagtgaatatttataggtttcttttagtgccttttttttttaagtgttttctatagttccatgtttctacaacccttaggaacatcagaatcatgtgtgtgtgggtgcttattaaataaaagagttcctggagctcactcccagtgactgccagtctgatgattaggggcttagctaggacctaggtttgcaaaagctcccagctgatctcatgcagccagcctggctctggctctggcgctgggagctgggttgggaactagtctttggtgctattctgctgatacttcaagttgggctctttgactccgtcttgtattgtcatcacttgtattcaggtctgttcttcccctggattgtaaactccttgatgtctgggtcatctcagctcatgagctgagctttcagtgggtgctcagtggaacaggtgctgaatggagtccggctctagggaggccagggtgtgttggtaagtgagagactaaaatccttttaaaaagaatctttttgcccttcagttgtgtttgccatgagttaatgtgatttactctagtggaagccagtgcagcttaagtggaggtcttgccctgaaatggagccaggttatggatcagcagagctgccaaaagcgttttgggggaaatgtttctgtgtcaccctcagttgattgaactcaagttttcactcccgtttaacaccatgtgggggccattctgacttctgcggagtgggtatgatcagatcttctgtaaaagtgtaagtgagggggctgggcatggtggctcacacctgtaatcttagcacttgggaggctgaggtaggtggatcacttgaggccaagagtttgagacaagcctggacgacatgatgaaacctcatctctactaaaaatacaaaaattagccaggcgtgatggtgcatgcctgtaatgccagctactcagaagcccgaggcaggagaatcacttgaacctg

SEQ ID NO: 45797 - DNA, 1050 bp, Homo sapiens
gttcgagaccagcctggtcaacatggcaaaactgtctctactaaaaatacagaaattagccaggtgtgatggcacacacctgcaatcccagctacttgggaggctgaggcaggagaatcgtttgcacctgggagacagaggttgcagtcagccgagattgaaccactgtacttcagccagcctgggtgacagagcgagactctgtttcaaaaataaataaataaataaaatagaattctgaattttatttttaataattatttttgtaaagagaatgtcttgttttttggagttgttgaatttattgaattggcaaaaattatgtacaagagggtatacaacatgatgtgattgaggtatgtatacattatgaaatggctaaatcaagctaaataacatatcacctcccagacttactttttggggtgagaacacttaaacaatctactctcttagtgatttccaagtgtatgatatgttgttattaactataggtaccttgttgtcccatggatctcctgaacttattcttcttctctaaaaatgacattctgtgtcctttggcatctgcccacttccccaccctggcaaccatcattctactctgcttctgtgaattcaacttttttcttctctttttttttttcttttttttgagaaaatctccttctattgcccaggctgtagtgcagggttgtgatcatggctcactgcagccttgacgtcccaagttcaatcaatccttccacctcagcctcctgagtatctgggagtacaggcatgcactaccatgctccactaatttttgtattttttgtagagatggggtattgctatgttatgcaggctggtctcgaactcctgggctcaagcaatctgctggtctcagcctcccaaagtgctgtgattacaggcgtgagccaccatgcctggccgagttcaacttttttagattccacatgtaagtgagatcatgtggtatttgtcgttctgtgcctggcttatttcacttaacataatatcctccaggctcatccatgttgtctcaaa

SEQ ID NO: 45798 - DNA, 1068 bp, Homo sapiens
gtggttggttttccatccttttgcttggcaggtttctgctgatagcttcaacctcaagagtcccattatacagacactaatagcacctcctatgtgtcagtctgtagtgcctactatgtgccaggcattggagataatataatgatgaacaagataaacatgacatttggaaaagagagtctacttcccactctcagcccaccccaaagagaggccagaattgggcttccaaagatctcagatgcccttgcatcacctccctgaagagggcgggtgaagctttggtgtctgcagagaatttgtctggacaatcccccaggtttggaagaatgggaaggagctgccatctgtgtttaaggtgagaattgggggagtggctggatatcagcagaagccaagatgaagagaaggtttttgtgagttcctatgcatagtggagacctgttctagtgagggtccctggggctgagcctgtgggtcagtggaatgatgctgtgaggagggtcttgctatagcagatggcccaaagaatgttgatggattgtgagcagctggaagaatggagagttcaggggatgtagttcctacctggctttccaacagtgtgtaagcccagaattcttacataagcccatggagaagggaaaggaatgctggtaacgacaagattgaattctccacctgccaggcatccagggactcagagcagatttaagtgaagttacagaaataggaatgtgacatttcctacatccgggtgtgctggagcaaatgtattccctctctggtttgtggggaaggagaatgctaacagacaagactctaggttttcactcttaaacctggtgcctagagatgcattttctactggatgcagacagaagctccatatagacatatccatcgctgtatctctcatgccttctgttctccctaattttccctttttaacccacagaggaagaaagttccagcatcacttctggcctctcaagagtgagtttggtggccaggttgggttattcatgcctgtaatctcatactgaaggggtggcctgcccctccaca

SEQ ID NO: 45799 - DNA, 1033 bp, Homo sapiens
gaaaaggctgggcgcggtggctcatgcctgtaatcttagcactttgggaggccaaggcgggtggatcatttgaggtcaggagttcaagaccagcctggccaacaaggtgaaaccccatctctactaaaaatataaaaattagccaggcagtagtggttcttgcctgtaatcccagctacatgggaggctgaggcaggagaattgcttaagcctggaaggcagagatttggtaagctgagatcgtaccactgcactccaatgtggatgaagattgtttaaccaccaccaaaatgggttctgagtccaactattaatatgaagatgacatccattgtggtcttgtacattttgttgcctttccgggatgaaggacattggtgaccatttgtttcctctggagcggtcgattgatcatgaacttcctggtccagatagttgctgtgtcattcatcatggtggttgatcctcaggtagttagggaggaaaataaacaagaagttatgtatttaaaaccacgtttcaattttagacctgattaattgactaaataaagggcattagcacttctacttcctacagtccctccctttacctctggaaactagtgatttctaggttgttttatgttgttaaggttggccacctttcctttctgttctgcaatcatagtcctatttttaaatggattcacctctcatcactagccttttgtcatggtcattcaattcacaagttgcttattttttaatttcttggctgactaaattttattatgaagacttttctttaaagagctcagaaatactgtattctttaagttcttgaacttgtgatggtgtttattgcctattttgattgggcaataatttagctggctataaaattcttggattatactctatttcccttagaaattataggcacccatccactcacatttcattgtgctttcttttttttttttttttttttttttttgagatggagtcttgctctgtcacccaggcttgagtgcagtggtgtgatcttggct

SEQ ID NO: 45800 - DNA, 1079 bp, Homo sapiens
aatgcttatctttgtaccccgacagtcttagattaagaggactttgtaccaccctgacgttacaggcggccatgagtccagccacccctgaaatgtacacacgtctgggctggggttgcagcaggtgagtcccaattttgcagatctttggtatcaggagcacaacccaggattttgagtggggtttcctcatcactgtggctgggcactgggctagtgtgctttctgatttttgtatggggaagagaaaggagggaggaaatggcaacttgttgccctgttctaacattttcctaagatgggtctccaggtaagggcttgggatctcaccttgcacagcttacaaaacccagtgaggccggctgtcttggcgctgccactctgagtgatggagcccctaaatgactaggaagggagataaaagaatggtttctgcaagctcaagaactggcgttattgaaattaacatttcccccaagttttacaatgtctaggcacgcatatttaagtgtctgcctcaaaagctcatgctaataacgagatggtgcatttcatttcctttttttgttctctgagcaacatgcagcttcctgcacagccctccttgcaggcaactgcactgaggtgacagtcctcctggctgccagcaaagatccccaggacctctgagagccctgtattctgggggcagcctttcccccttctatttggccccagctggaagggggcagattacccacatcacagcacaggtctcccgccttagcttctgtagggagtctggctccctctgaccctctagacctcactagctgaggatcagagccccggggcaggagccagggccagggggcattggggggtggtttgagagtgcagctctggaggggggcagggcgggccaaggaaaagctgctcaggggagactgcaaagagatggcagagttaggacaagagggccaggcatggtggctcacacctgtaatcccagcactttgggaggccgaggtgggcggatggcctgaggccaggagtttgagactagcctggcctacatggtgaaaacctgtctctactaa

SEQ ID NO: 45801 - DNA, 1045 bp, Homo sapiens
tttgatttagaggcctaaaagggaaatcagtcccacgtgggtagataacaaaacactctccaccttgggctcatggagtggaatttgaatatgaagccaaaactcctatctctgcctgcttcactaattacataaatttccttgctacattctgcagctgtttgtatgaatacagcgctggttcccagagtggtccatctcaacgcaaaggttcaggggctcagggcactcatccctgggctgcaacccagactccagtgttagttgtatgtctgttgggtgtaccaggggaccctggatttgtttctctctgtcataaaatgaagctaaacaaactacctaacctgtcttatgatgcagaggtgtcaaagaaaaataagacagaggaaaaaaagaggagagatgtgtggcgggcggggggggggggggagggtggtggttgtgaacattaactctagcaataaagattactgaggaaccttaatgaaaagcactggaagaaaagcagggctagatctggagggaagtatctgtccctccctttaaaatgttccagatttcactatgggaaagcttcacagatatcacaagatactgtttgacccgaggaagaacaagcacatattactggatgcatttcctcttctcttacctgtctcagaacctctcgccagccttgtctaacaagattcacctttgttttcataggcgtcacaaagttagggtcaaggtacaattgaataatcatgaattttccccaaatacacaaatgatttcaacacaaccgtttctaaattaaaatcaactgtagttactccaagtagagcaaatgcattgtaaaatactgtttcttttgtttattatgtagaaagatgaacaagtttcactgaatatggctcccataaataagtgtacacttaacaaaagtcagacacacaattaacccctcttgatgatatggggtgattgggcggggaccccagagatacactatggttaaaaacatgggcttttatatgacacacagatgaaccaataaaaatgt

SEQ ID NO: 45802 - DNA, 1030 bp, Homo sapiens
tattgtacagttgggtccatacagcagacatggctaagatacataaaagatgagactgcattattgaagaggcatcaaacagggaaaaggaagctgctatgtggtttctttcgccggaaatgaaagcctctcaagtttcatatttaattcacgcaaaaagccaactcattagtgttttttaaagtagcatatatattcaaatggtatatctttggatttaaaaccaattattttctaacatcttttcaagattctgtaatttatgggttctctgaaactctgatgagtcctgattaacttgggaagacattattctttaatctgtatgtagaaatatagaggcttctgttgttatttctatatattccaaagatataaagtgtattataggtgacaatagtgcccacagaggtgtataatgcacaactgtgcacctctatacagtgggcccaggtatatgtacacgtctgtgtagtcattttgctttcctgagctacatacagccaaaaatgtctgaagaaaattctgttttctcagagcctataaattccttatctgtgtatatttaatgttgatattatcatgcagaatttttattaagtctttcactgtatctttgagcgagactaaaatgaagagcagtccattaatatctgtcttcaactcccactacattcaacatctctttttgaaatgtgaggattccaaaagaaaattaagccatttaaaaatctatacatagcaaatagaaagtgatacaaataaaaaatttaaacggcgcccttcagtaaagcaaatttggatgagatcaaatgaaaagagtgaaagcttaagctagaaacaaacatttagtcaaacggaaaacatttctggacttctgcttttcagacctgtctgcctcccaagctgttatatggtgatattgaaaatgctttacatatcacagagataactgaaggattaaaggcatgtttgaagttcttggaactattctaagaaagccactcgagaaagcacaagcaccgtcaat

SEQ ID NO: 45803 - DNA, 1046 bp, Homo sapiens
gggaaagcaggctccaggacttgctaagattaaggtgtttgcattcaattgctattttcggttaaaacaggtgagatgatttactaagtcttttcagtttagtatgatatggtaaggaaacagaaaaaggaataaaatcaattgtaaatattccacatttttgatagctgttttccctttaatctgaattttgtgtcatatgtccatgtgcatacacctatgcacatatctaaacaccacacatacaatcacacacacacacacacacataatatgtatttttctagaggagaaccaccacttacacaagaagccatgttaaagcaagtcctctcacaatgaacgaggacatccaatgacaatttttaaaaaggcattgttactctctgacatctgtgcaagaagcaaagaaaattaccaagaacagcttcttccttcaaatctcattttagatctatgtctattaatttatctacaaaatttgcatgactattcttatttttaactgatttcacttcttatgctaatgaattccatatgagctttcttacttgatattaatggctcaactttagttcttacaccagtccaggagttaacccaaattctgtgtatgttattgcaagttttggggacttgatcatacgatggcttctcatttcccttaatccactggattactgtttgtgaacctattctagcttcattataatgtattttaaggtacatgatactttaacagtgaacacagaagggtaggattagctttcttgtttgggttcttgataaaacttaatgttttctataaataagttctgagccaatttaatagacatgtggctataggtcaagacactcttcttcctccctttcctgtgtcattactatttggtcagagaccttaagagggcacgtgtaatggaacagttctttggagcatgacgtaaatcttttgctcatttttccacatgatgatctttcaaatatttgaaagcaagcaagagagatatcctcttaaactccaggttatatatccattattgcaa

SEQ ID NO: 45804 - DNA, 1052 bp, Homo sapiens
gggccaggtggcttatacctgtaatcccagcacttttggagaccaaggtggaaggatcacttgaagccatgagttcaagacacctgggcaacatagcaagactccgtcattacaaataatttaaaaattaggcagctacggtggcatgcacctgtagccccaaatactcgggaagctgaggtgggagggttacttgagcccaggtgtttgaggctgcgcgcctgtagtcccagctactcgggagactgaggcaggagaatggcgtgaacctgggaggcggagcttgcagtgagccgagatcgcgccactgcactccaacctggacaacagtatgagcctctctctaaaacaaacagagtcaggcaagttagtgcatcatccttaatgaactggccattctcctctttataagacaaaaagacttgtcattccaaagtgctataaggttgtatttttaatcatattttttaaaatgacatactgacttgttttcaaagtttaaaagtactaaagcctaaaatatgccactatttaagatagagtgatctcaactgatttagaaatcagaatgaactaaaattggaagttatactttaaatatttcaatttacacatagattaccctcagagtttagcacatatgggctgtagaactgaaacacattgtcctaagtcattgttgattccacagaatttcagccaacaacagaaacactcttaataaaaacaaattatcaacttctagacaatcaaaatcaccaagacatagtgaaaagacatggcatattattgcttggtgaaatcctggttggtgatttttgaaagccctgataccataatgtaacccttctctcttggttctttctttctttatgtgctcaggtaatgagcacatctaggcaattgcacacacacacacacacacacacacacacacacacacacacactcctcaggaatcacatgacttcaaagaacttttctttataaaagattgaagattcctgagttataggttgctggtgtaaaagtcataatataacatctgattg

SEQ ID NO: 45805 - DNA, 1049 bp, Homo sapiens
tttgaaaacgcgaggtcacctggactgcccctgaagggaagacctgctatgtgacccaggagcagcccggcgcggacccaggtgagtcattgggttgcacaggaagcgagacgcctccggatagctgtgctgcagctcgcgcgccccgcgagggtgtcgccggcgcagggtaagtctttccagatgtggccgccgcgcgcgcttggccgcgggccaggaggccgcctgcagttggcgcttcccggggccgcagtgccagccgcaatgccggcctcctgaaggcaggcgacagcctgcggccgggagcacagcgcggggcggagtaccgaggcatggtcgcggcgcccgggctgcgctgaaggcgtctgcgagcggatgggggaccccaaggcccacgtgatggcgcgccccctgcgagcccctctccggaggtcctttagcgatcacatcagggactccacggccagagccctggatgtcatttggaaaaacactagagacagacggctggcaggtgagaggcagagggggattggagaccgggggtgaggggtattaaaaagaaaacaatttactgcgaagacgcagtgataagcttggttcatgaatgatctcatcagctggttgaagtttcattcttgtcatggcagtgtgttcggtctccctttctctagtatttaaccttgatggagtgttgagatttttgtgtgtttgttttgtgtaacgccgctctggttactggtctgattatttctagataaggaattatgagagttgtggggttttttaaccttcaaaagagaagcaaggtccttgtgactgtcaggaaatcggtagtgatgaacaactgctgcaaaagccctgagatcctcggggctgtctcgggtcagctttggagctgaagctgatcaggtgtgaggtgccctggcgtgtgtgcaggagaggggcctggcaggtctgtgtgtcagtggagtgatgggcgctgcccagtgaaagcctgctggtatttcctctggcagcctggagctactctcggttccaagacggtg

SEQ ID NO: 45806 - DNA, 1034 bp, Homo sapiens
aaaaccatagtgaagcatttagcatactcttaatgattattcataatggctttgttttgtaaaaattaagtgaaaactacaaatggatggtgggaagtttaagaaaatatgaaaaaaatggtgttatactagcttttcagttttataattattactggattgatagactatgagtgtacttgataaatattaccctatatgtggtctgcttccttcccatatctaggagagtatttacctgtcatatgccctaaaacatgatgaaaatacattttcccaattaggatcttgttttctattaaatgatactttttccgcattcaacaaatacattagtaattcacattctctgtttcttccccccaatctttataagattcacctttacatactaaagtttatttttattttggtcagcgtctaagtttataatttgtgaatttaggccttgtaagatttttcttcttgacaagcaattttttattttttctagggtggattacaggaggtggcagaacagttagagctggaacggataggaccacaacatcaggcaggatctgattcattgctcacaggaatggcctttttcaaaatgagagaagtatgaagacatcactgcctttttctcagttggttgttaggttgagaacattaaaaatcttgtggccaaagattttgggcaacaagtacctactaagtaaagatataattagagataccatatgagtcacatccaccacacttaaaagtattcaaaaataagtcatcttgaaatgtagttcagaaggaactgggagaacatgttcatcatagaaccaacaattttaaaacataaactacctgagaagtcatgtaggtccaaccatattatttctcaggtgagaaaacaggctaataacttccatgattaaacacattactagtgggagaactccagagttcttttctgactcccattggtgctcctcctacaaggcaaggaatctttatattaggtttattctagcatgaccccttttaaggtttaaact

SEQ ID NO: 45807 - DNA, 1065 bp, Homo sapiens
cgatgaggcaagctgtctttgtagtctaagtaagaaagatcttcacatacgtagatgtaaagaaagacaggaatattaatctgatgtttctttgtaaagcaggtatggggtgaagccatatgctgcaagtagacaggtgaagggtgttattggaaacttaagagaaaaaggtctaaactacttgtatacctataccttggcaaatggccaagaatgatgtgcacctggagaagaatctgttttttatccctttcattgcttatagttgctaaggcatgcctcagtgtgagcactgggacctgatgaatgagattctaattttttgaggtacatatttttagcataggaaagctgtggtttcactggaaaaaaaaaaaaaaaaagaaactacttcattgggtttattctgttacccttcctaaaggattttccaggggagactgacttttacgtgattgttgtggtttccttctcttttaaaatatttccattgttttgtaatttttcagacatttagaaataaattgatttctaaaggactaaccataacgatactttttggcccaagtgaagtgaaccccatggtttagatttgtcaagtgtttaataggaattccttttgccaagaggtagaaaccagtattcttacaatttaaaaagtaaataaaaaaacactttttcacgtattctcaaaaatgtatctgtattttggtaacttttttgttttaatatttcagatacagatatattttggaaacttttaatatttcagatacacatatttgtggttggaaatatatttgaggttggagatggctttctttttggcttaagtgaaatcttgaagaattggtttatatttagatttcctggcttgattttataaggcagtcttttaggaataggattgttggcagaagaaattattgctattacagtacagtcctttatacagtgttgcttattggaggcatttgcaaggctcatttgtgaaaggaggcatctccttctttaagatgaagtgtagtttaactcatccgcatgagacattttccactgggtctc

SEQ ID NO: 45808 - DNA, 1023 bp, Homo sapiens
atgctaacaatagctgttgagctaaaaaaaaaaaaaatctcaaaatgttttaagaaagttgacaaatttgtattgggctacattcacagccatgccgggccacatgtggcccactggctgcaggttggacaagcttgatttacactgatgttaggagatgtttaaggagaaggatacagtgaaaaacattaggtagaagaagtcatttggaagataaacgagtaatgcctaatatagagagagcaccgtgaagagaatcttggaaatttggaagaaagatcaaaattgactttttaatggggtggctagaatgagtgtcagttacagtgctagacactagggatttagtactgaggaaagttggtcgtggtctttataactcagtgttttgtaactcttctgttttctctctattgcctaagtctaagaattacaattgtaacgtatgggaattctctccaaactgaatttggagttgatacatccatgaaaattgaagtggagtactgatgagctgtgaagaagagaagcattctgtggaaataatgtcactgataaagaggattaaaacaaatttttaacaaattctcacttttaggctgggcgtggtggctcacgcctgtaatcccagcactttgggaggccgaggcgggcggatcacaaggtcaggagatcgagaacatcctggctaacacggtgaaaccctgtatctactaaaaatacaaaaaaaattagctgggtgtggtggtgagcacctgtagtcccagctactcgggaggctgaggcgggagaatggcgtgaacccaggaggtggagcttgcagtgagccgagatgccactgactccagtctgggcgacagagtgagactccgtctcaaaaaagaaaaatcacttttggtgattgcagtaattcaataggatagtagaaattacagggcaccttgggtttggtggtaacagaaaggatgctgatgcttcatttaaggaaagtggcagtgtaaagaaggagatagagagtgccat

SEQ ID NO: 45809 - DNA, 1046 bp, Homo sapiens
tgcctactactttacttccaacagtatgacaggaagcttttaacttgttggcattattttatgttttgaatgttgaagatagctaataatctaatagctaaaattatcaaattatgagcaaattcatttcattagcactaatggtacaaggagcagataatactttgaatgggacatgagacatgcctgtcatcttctttcctgcaccccagtccctgttttagggaacctctcatgctcccttctcataatccactccctcagcccagtcgactgggcagaggatcacatgacaccaattcattttgaattaggtagtaatctaataattgaatgttgaagatagctaatgttgacgacagctaagaatttaacaaccaaaaaaacaaaaaaacgctcttgcttggaagacagccttcgcctacaagcttctagaatgtaaaaaacactgatcctttatatcaattatctaactttaaatatctatgtttaaaaaaatggacgtaaattctgctactgttaagcaggaagattaacagatacaagcttcaaggcacagttacacagcattgaagaataatggagcagaaatcaatgccttactaacactataaccataagtaagtcactaacatctctgaacttcaatttcctctcatgaaaaatgggaatgataaaatccacctcatctgccttaacaggagtgtgtgtatgtgtgtgtgtatgtctcacagatgtttcataaagtttactaacaaaatactatttttaaaatgtgattatttcagacaaattaggtaaatattttggactgtattaaaaggcaagaaactattaagcagacttttttggatttttctttaaatacaacagaaatatcagaacagaacagaaactgtttctcaatttttaaaaatgtattctataatccctgtacgttattctttctttcaacaagtggtaaaacaagtcattgaggagtctatttcaactattaggactagatttatcagctgtattacagaatgatacagatactaccattt

SEQ ID NO: 45810 - DNA, 1050 bp, Homo sapiens
gagtatttgcttcttattggaggagctcttgtgtaatggggccccttagggtgaggccttcgttgcacttcctgctgaaagctgctggtcactaacagcaaaagatgttttagttggatatgctggcttagactgtgatgggaaaagccagaggagcttttaacatgcctgttttaagagtgggtagaaaatcaggtgagggatatgaccttcctagagtgggcaaatattttctctctgttcagattctgtaaatattaaagatttgtctaaaatataagaagcttctgcataacaaaggaaattgaagaaaagacttggaagccatatacctgataaaggattaatacccaaaatatgtcaggaactcaaacaactctataggaaaaaaaacaagtactctgattaagaaaaggacaagggacctcaagagacattactcaaaagaagacatagatggctaacagatacatgaacaaacgctcaacctcaataatcattagggagatgcaaattaaaaccacagtgaggtatcgcctcacaactgttagaatgacctttaccaaaaagatggaagacaacaaagctttggcaagggtggggaggaaagagaatgcttatgcactgttggtgggaatgtaaattagtacaagccattatggaaaacagatggaggttccacaacaaacaaaaaatagaattatcgtatgattccacaatcccacttttgagtgcttactggaaagattgaaatcggtaagttaaagaaacgtctgctctcacattttcgttgcagcactattcacagtagccacgttgtggaatcaacttaagtatccatcattggatgaagagataaagaaaacatggtatatacaaataatggaatgctattcagccttaaaaaggaagacattgtgttatttgtgacaacatggatggaattagagagcattatgctgagtgaaaaaagccaaacataacaaataccatatgttctcacttacatgtgggatctatgacagttaaactcatagaagcagagagtag

SEQ ID NO: 45811 - DNA, 1050 bp, Homo sapiens
gtggaggttgcagtgagccaagatcgcaccaccgcactccagcctgggtgacagtgagaccctgtctcaaaaaataaataaataaataaataaataaataaaataaaaatagttggagaaaaaaaatcatgggtaaagttaaacaattttaaaaactcccttaaccttttagttcccattcccattacagaagtatatatactgtgtttatacacacacacacacacacacacgcgcgcgcacacatgcatatgtatataaaatagatacagatacacattgtatacatatacattatgtatgttttttatatacatgatatacctatacattgtatgtctatgtatttttatatatgtataatatataggtatttgtgtgtgtgtgtgtatatatattttttgttattgctaaccttttctaaatggctttagagccttcgattatgggtgaaaatggttaagagaatcttgcaactaccatgcttttgttgcaagtctacttagtaactataagtttcccactgtagtggcagacatatttcattacatatcagacattcttatatctcatgaatctgagaactaatgtcacactctgtttcgcagaagacacactaaagttattttagtttttttctaattcttggtttatccttgcttagttagacggtattctgcacagacagccaaagtgaacaacagtattgatggtagtaattaagcttcttcctaaaagggtctattgggtggctttctaggtaaacttgaacagggctgaggtcaccctccccaaacctctaattcttcaaaatgcctccacatcttttttttttttttttgcaagtggaatttaacctaaagtagcacctgaacaaaggtgaattttgaatggcactagcagtaaagttgacttggaacaaaaaaacatagatgcattgagcaaattcactgtgtgggtgatggggaggaggtcagatgcagcacacgtctgagccatctgatgtggctattctctgcaagatgctctatgctgttgatgctactcagt

SEQ ID NO: 45812 - DNA, 1048 bp, Homo sapiens
tcacaaggtcaggagattgagaccatcctggctaacacggtgaaaccctgtctctactaaaaatacaaaaaaaattagtcaggcgtggtggcgggcgcctgtagtcccagctactcaggaggctgaggcaggagaatcacttgaacccgagaggtggagcttgcagtgagccgagatcacgccactgcactccagccttggcgacagaccgaggttccgtctcaaaaaaaaaattctacgatgaacatatgaggttttgttttttaaaaacaaacattgtacatgaattaaaagcattactgcttttaatttaaactcttattttgcttattgcaaaataaaaggcaatgtcactgttctttgagagcttatcatcttacaggtgggtggaagttgattgtttttctaattgctttgtgttaattttttgataattacaatttatcttcgtactgaggaagaggatagtgtggaaaaattgggccttaagttgaagtttctacaactggaatagagaattgaacttactacattaaagactgtgaggagtaaaatgaagaaaatgttgcaattaatgctgtgttagggaaagtaaggagataaatataaagattaatattccatattaggctaaggaagattggttggatagagatgcttgaatctccacacaagtcacttggtttaaattttaatcttcttcctcattctttatgatcattaacaacaacaaacaataacagataaattgaaggcattttgtagcatctaagcaccccatacagattatgctagattcttgtctagaatcatgacatcattgttttctaaatcactgatttaaaaaaacacatttctatgcagaccagtggaatttctgtttgtttgaatatactgtgatattacaacatactgacttatgaaacattctgtatcatcctcttttgttatttaagccttagtatagactttacacatcgtttatttttctttgtgtcattatgaaaactcggctcattttgtaggctttctataaaattattctaac

SEQ ID NO: 45813 - DNA, 1025 bp, Homo sapiens
gtgtggggaaattatctcagaattctttttctttttttttttttgaggcagagtcttgctctgtcgcccaggctggagtgcagtggcgcgatgtctgctcactgcaagctctgcctccctggttcacgccgttctcctgccttagcctcccgcgtagctgggactacagacgcctgccaccatgcccggctaattttttgtatttttactagagatggggtttcaccgtgttagccaggatggtctcgatcttctgacctcgtgatccgcccgcctcggcctccgaaagtgctgggattacaggcgtgagtcactgcgcccagctatctcagaattcgtaaccttttgtaggctcttaaagctaggaagacagccatgcagaatgatctaagttctaaagatccccaggatgctgagtgtgaatatatgtggttactaaagcctttatagggtaaaaatgcagaagaaactctgctgtacacatttaggcttttatttccttttaagtttctggtacatcctaatatctggggaaaaaagatagctaatattctatggaatggctttgtttaaaaattagttaaccattatcagaaaactggctcaattggtagctctgtgtttaacagtttaagaaacctccaggctgttttccaaagtggctggaccactttatatcctcaccaggagtgtatgaagaatcctgtttctccacagccttgtcaacacttggctttgtctgtcttttttattatagctatccctactgggtatgaagtgatacctcattgttgtttcaatttgcattctgacagccagtgacattgagtgtcatttcgtgtgcttactggccatttgtatatcttctttggagaagtgtctattcaaatcatttgccagttttaaactgggtcatttttattgttgaattgtaggagttcttgtatagtctgatattagacccttgtcagagttatcatttgcaaatattttctcccaattcttgggtgtgttttcactttctt

SEQ ID NO: 45814 - DNA, 1032 bp, Homo sapiens
ccacctgggcaacagagtgagaccctgtctttacaaaacattaaaaaattagctgggcaagtggcacacacttgtggtccttgctactcaggaggctgaggtgggaggatcactgaacccaagtggttgagggttcagtgagctataattgtaccactgcacttcaggctaggtgacagggcaagaccctgtctctgaaatgtgaataaaatttaattttaatgtgtcgctaatagatgtttctatatttttatgtaattaaattagtttccttaaagtgtgtatcaggatctcttttcataaaaatagtattagtcactaacatgttttgagtgcctgtgtgcgccaagcacagtgctaagccctcttttaaatgcataatctcatttaattcccacaactcctagtagggatactgtgataatcgccattctacagatgaggaatttgagggtctgaaagcttcagtaacgtgtccaaagttacacagtggggtaattggtggagacgggaaatgggccgggtgttctggccccacagtctgtgctcttaaccctggtcctttacgtgcatgcagaagtcttgacacactcctgtcttctttcatggacatatgtgaattcttcattaaaccacatatgtgtgaaggagaatgtggggaaggctggtttgtgctaagaactcttctaagtgctggaatgaagtgcacagaagagacccgttccttccattagggagcttaaattctaataaggggattaagaaaataaatacatttttggattcatgatgatgaatccaaaaataaaagagaaagagccaaacatggtggctcacgcctataatcccagcactttgggtggccaaggcagatggatcacttgaggtcagaagttcgagaccagcctggccaagatggtgaaaccccatctctactaaacatacaaaaattagctgggtttggtggccggtgcctgtggtctcagctacttgggaggctgaggcaggagaatctcttgaacctgggaggtg

SEQ ID NO: 45815 - DNA, 1050 bp, Homo sapiens
ccacagaaaagttaaataatttgtccaatgttaaacagctggaaagtggcagaggtgggattcagaccagccagtgatgctgttaaccaacacattattaatctcaatactattagtatggccatgagttttgtttgtttgatttattaatttatttatttatttatttatgagatggagtttcactcttgttgcccaggctggagtgcaattgacgcaatcgtggctcaccacaacctccccttccctggttcaagcaattctcctgcctcagcctcccgagtagctgggattacaggcatgaaccaccacacctggctaattttgcatttttaatagagatagggtttctccatgttggtcaggctggtctccaactcccgacctcaggtgatccacccgcctcggcctcccaaagtgctgggattacaggagtgagccaccgcgcctggcctgagttttatttttaataataaagtctaatttgtttttttgtttgtttgttttctgtttgtttgtttttttgagacattttcactctgtcgtccaggccggagtgcactgactccaccatagatcactgcagccttgaattcctggactcaagaaatcctcctgtctcagcgtcccatgtacctggtatcacagatgtgtgtcagcatgcccagctgatttttatatatttttgtagagatgggggggtctcactttgttgcccaggctggtcttgaactcctgggcttaagtgatcctcccacctaggcctcccacagtaccgagatgacaggcatgaaccaccacaccaggctaacgtttaatttttttaaaaattaaaattcttgttgcccagctgaatggtttagaaactgtggcacttttcttttcaggccttggtttaaagcttgatgttaactctgatgtgaatgattttatgtggctattgaaaattaatgctgcttcaggaaaaatagctaatgcatgccgggcttaatacctaggtgatggtttggtaggtgaagtcaaccaccatggcccatgtttacctatgta

SEQ ID NO: 45816 - DNA, 1045 bp, Homo sapiens
ttttctgcctgtaaagcctcagaaaagtctgtgatgtttcattggcagagagtccaaggaaaattctttagtttggaagaataaaaaagtcgttacactcagccctattactgctgcaaggctgaactgtctttgaataatcatagtccccagagaggcttcattgtacggtctggtgtttgtatttcctgtagtctggttgcagtttctgcattgctccatgaaaaagacagtctctgaggtgcaaccaaaggcattaaaaaattttgtttggacagataactcgaataagacatctcttgcttaagttgatagcagttggttttgatattctgaggaatataggtaagttagcttggtatggttgatttggggcatttaaattaaaaccactcaagtttcaaaagggatttttttttgaagctgctctttaaatcttagatgctttccacctgcttatattttgtttgtggtatttatcatactttattagattacccctacttcaggctaaattctagaacgtttgaaaatgctaagatgattatgcagaaaagtgagtatccccttatgtactttttgtaaaggataataatcaaatgcagggctctgctttgggttaaaatatcaagtacaaaaactctcattaagcaacatgtaaaaatgttgtatattattacaaatgactgtggttattttatggttacaccaacaattgtatggagtgcggcaggaaattattatgtattatatactttatatgtcatctgaagtgtctagaaccttgcttatttctcacttttgcattgtgattctgactgtagtgcttcccccccaaccccccccgtgtgtgtgtgtgtgtgtgtgtgtgtgtgtgtgtgtgtgtgtgtgtaagcaaagagtgtggcagtgggtcagagagagaagaaaactgaaactgcttgagtgcttatgatttaaaatgatctgagcattttaatttggctttcatgtcgtcttcacagcaagagatgaggattgagggaaacacaactttgttatttct

SEQ ID NO: 45817 - DNA, 1062 bp, Homo sapiens
ttatttacttgtacatttttgtcttcctggctgaactggaggctctttggaggctctttgaaggctgggaccatcttgttcagcattgtgtccccatcacctagcaaagaagctgcatgtgatagaggacctaggaatgtttgttgcatgaataaaagttcttgttataggtggggcgcagtggatcacacctgtaatcccagcactttgggaggccgaggcaggtggatcacttgaggccaggagttcaagaccagcctggccaacatggtgaaaccccgtttctacaaaaaatacaaaaattagccggacatggtggtgcacacttataatcccagctactcaggcagctgaggcccgagaatcacttgaagccgggaggcggaggttgcagtgagccaagattgcaccactgtactccagcctgggtgatagagcaagcctctgtgtcaaaaaaaaaaaaagttcttcttgttataaaaaggtcactctgtaacagggataaggaagctgacagagtggtgtgagaaatgcccccattctgtagccacggaacttctcggagactgttctgcatgctattgtatacattcctctctttgtagccagttggaactcaatcgtaaaaattacacagggatcatttcattcttgaaagtctcttaatatggtggctcatgcctgtaatcccaatactttgggaggccgaggcaggcagatcacctgagattaggagttcaaaaccagcctggccaatatggtgatacttcatctccactaaaaatacagaattagccgggcatggtggtgcgcacctgtaatcccagctacctgagaggctgaggctggagaatcacttcaatgtgggaggtggaggttgcagtgagccgagatggcgacattgcactctagcctgggcaacaagagtgaaattccatctcaaaaaaaaaaaaaaaaacagttgtaagaaaattagcagggtttagattgccaactaaaacatcttacactgatgtaacagcagggagtaggagtattctcaactgtaaatgtggattcagt

SEQ ID NO: 45818 - DNA, 1031 bp, Homo sapiens
caggctggagtgcaatggcttcatctcggctcatggcaacctctgcctcccgggttcaagcagttctcctacctcagcctcccgagtagctgggactacaggtgtgtgccatcatgtctggctaattttttgtatttttattagaggtggggcttcaccatgttagccaggatggtcttgatttcctgatcttgtgatccacctgcctcaacctcccaaagtgctgggattacaggtgtgagccaccgtgcccagttgaaactttttttaaaagtagaaatcttgaattctgtttccttattgtaagctactgagcggcaggtaattagtggaggaaatggaggtaatcccagatggaaactgaagtaggaggtgaggccagtgtcagaactgggaagagacgaatgccctcacaaaaccacagtttcagctgaatatcagtcatgatttttagccctaaaagtcatcagttctctatttccaaattgtcttctaaggaatatatagggttaggactgtataaataggccctggttggaggttggctatcgttgggctgctgctgtgagttaaatgtgtatatacagtcaccttctgttaaagaactcttgctagcagaaagcctaacataggtaatcattttcaagaaaagggtgcaggaagtcgatgtttaataaaggttgggaggtataaggtgaggtgccaacttgcgtaactacacacacataaagacattttccatttggtgttggcgtgattcaaatggaaaattatttccttttcaccaagtggactttggagagagaggacaactctgaagtttctaaacaaggaaatgttcatggtcatttaacactttggggtaaagattttatatttcagctgtaaactctgccctgcccacgcgatctacccccacgtccctcaaacagtctgagctaccttttaggtagtttttaaaaactaactgcatataatttaaaaactaaaagtggccgggggcagtggctgacacctgtaatcccagcact

SEQ ID NO: 45819 - DNA, 1058 bp, Homo sapiens
tactaaaaatacaaaagtagctggtgtggtggtgggtgcttatatccccgctacgtgggaggctgaggcaggagaatcacttgaacccgggaggcggaggttgcagtgagccgagatcgcatcactgccctctagcctgggtgacagagtaagactctgtctaaaaaggaataaaaggaatattcttgtatacacattagctacataaataaaagtaagaaaaacacacattttaccctcattctaacctagaagctttattgctaggacacagtgtgaactcatctaaagggaagaacagactaggaatggatcagtctttcaggtaagatgtattggaagaggtttttaaaccattaaatgaccttattcttttaaatgcataaatgtgtaccttataagtaaattgtgtcttaagcatgatgcagaagaaaagaaaattagtatttaaatttgaggactaatcaaatataattattctgatcttctactgttaactaaaacatttaaggacattttgtgtcctaaaatgacattgaaaagggaatcttgggaaagactcatacttatcaggagactaggaagaagaggcgtaacatacattcttgtgtaaataatgtttgtgacagtgttcattaagtcttgactgttgggtagttagcttatcttttatgctttttgtacattggaaacatggtaatatttaactcaggtgttatttacacatataccaatctggatgaaaagaatcaatatttcttcaccttatttcagataagcagttcataggaggtattcagcagtgttcagtgacaaataagaaatttattttccttaatgtttattttgtagatttttgcatgattgttagctatgaatgatacgaagttgaaactgcatgtcctcgtaaaacatagctcccttggctagctttacggaatgaaaatagaagccagcatagatatgagcagtttctgagatgacattgaaacatagacctacccccttcccctgacctctgtgtcaaggtggttgagtcatatttcccagaattctga

SEQ ID NO: 45820 - DNA, 1077 bp, Homo sapiens
taaggatgaaattggagttcaggatctgcgtgcttaggggcacttaaaaatggcctcagactttctctggaagaaggcaggccccggagggaggtgaccacttagcagcggatacagtggtgactgtggcctcctgagaaggaggatgagcgatcccacccacaggaaatgaaggactagatgggatggtatgaactcagctagcttgaaatctggccccgaaaagcctactttgaccagggagactttatacctggttttggatggtccagtataaccaggagttgaatttgacttgtaatttcttctaactttttattttattttattttattttattttttgagacgggatattgctgtgtcacccaggctggaatacagtagcatgatcatagcttactgcagccttcacgtcccaggctcaagctatcctcccgcctcagcctcctgagtatctgggactacagtcatgtgccgccatgcctggctaatttttgtattttttgtagagacaaggttttgccatgttgcccaggctggatttgaactgctgggctcaagcaaatcctcccacttcagcctcccagagtgctaggattagaggcatgagccaccgccctcagcctaaaaatttattttgagatggagtctcactctgtggcccaggttggagtgcagtggtgcgtgcgatctcagctcactgcaacccccacctctcaggttcaagtgattctcctgcctcagcctcctgagtagctgggattacaggtgtgcgccaccatgcctggctaatttttgtatttttagtggagacagggtttcaccatgttggccaacttggtctcgaattcctgacctcaagtgattgcctacgtcagcctcccaaatgctgggattacaagcgtgagccgctgtgtctggcctaaaagtccggcctaaaaatttatttctaaaccaagttttgtagatgattgccctgatgatggttatttatttattttcttagagaaaaatccctcagtaatctttgaatttactcttggatatggggcaattttccatgatgacattaatc

SEQ ID NO: 45821 - DNA, 1030 bp, Homo sapiens
gttaaaattaatatatcattatctttgctgttattgacagcgatataattttattacatatgattagagggatgagacagacattcacctgtatatttcttttaatgggcacaaaatgggcccttgcctctaaatagcactttttggggttcaagaagtaatcagtatgcaaagcaatcttttatacaataattgaagtgttccctttttcataattactctacttcccagtaaccctaaggaagttgctaacttaaaaaactgcatcccacgttctgttaatttagtaaataaacaagtcaaagacttgtggaaaataggaagtgaacccatattttaaattctcataagtagcattcatgtaataaacaggtttttagtttgttcttcagattgatagggagttttaaagaaattttagtagttactaaaattatgttactgtatttttcagaaatcaaactgcttatgaaaagtactaatagaacttgttaacctttctaaccttcacgattaactgtgaaatgtacgtcatttgtgcaagaccgtttgtccacttcattttgtataatcacagttgtgttcctgacactcaataaacagtcactggaaagagtgccagtcagcagtcatgcacgctgattgggtgtgtacatctgtgttggtttggaggaggggggttattatcaagaaatacaagctgaacatcgtatctgaattaaataacaagggttatgtaagtgggttattaaatatgactaaacggtcacaatcttactcttacatgactgataccacctcttaaccagatactatcaacccaatttgcaggtgtttaaaggcagtttttcccccagataggtggtgcttccacaaaactttagtgattccaagattactttagtgaaacgaggaattataagaggatttacattaaaataggatttaattaatgaaaaaaaaactttactcagattttctacctcttacataaatgaagtcaggtcaacttgatgtatttttttgttaa

SEQ ID NO: 45822 - DNA, 1072 bp, Homo sapiens
ggaaggaaatggtaagaacggtatatgccagtggctagagggtgaattcgtgcagagagataaggagtgcttgttatgatgtttttgtggtgtgggtcaggttaggtcatccaagtggaattactctcgttcctgccttctctggagaatgatggaaaaataaggcaggaaaaacaatctgagaatctggtctctgtataggggcccaatattcagtattacatagaatctttttataactacatgatgtaaaaatgctttaaaaaataattcctatcacttattatgatagcagtatctagaaaaaattatatgtccaagaactagatttcaaagcatgcttttattatatttgtttatattatattatatattttttattgttattatgttaaatgcttttattaatatatttgttttccagcctggcctacttggcaactttcctggcccttttgaagaggaaatgaagggtattgccgctgttactgatatacctttaggtaaagttcacttagaagctttaaaaaaaaaagtaattaaattcttttacaagtttccattgaggtgtgatatacatacagcacaggtgctgtatgtcttagatatacagcacaggtgcacaggtcttagatatacagctcagtgaagcttcagaaatgcatgcatgcatgtagccatgactcagatcaagatacggaagagcccagcactccacgatgctccatcatgcccctttgcagaaaatactgcctcctccagtaaacactattctgatgtcactatagattagttttgcctcttcgtgaactttgtataaatagaactgaacaatatgaactgtcctgtgtgatttcttgtatttcattatgggtggtgtgctattgtatcaacagggtatttgggtggttttcagatttgtgatattaacaataaaggaattataaatattgtagtacattttgggggtgtctgggtactcattttctggatatatacctaggaagtgaactgttgtgttatagagtaattgtgtgtttagccttatagattctgccaaacagttttccaa

SEQ ID NO: 45823 - DNA, 1033 bp, Homo sapiens
atacacgtgtatacatggacataacttgtatgtttctttccttgccttcattttttcgctagctttctttttatctcactagcctgctttcctacacaaaaagcctcggctttgctcttatccttctcttctctcaactctatcaatggatcttgagatttaggagataactgtggtatttatgtacctttgaatgacaaacagacgttctgttcctttgagatcatccttttcaattaagtgcgtagatttgggcagcatccatgggcagatatgagggaagaaaaagataacctgtttggccagcatgactagtcaaatcaatgctgaagataaaggaactgatagccagatcacccctgagtccatctgagtcccattcagcatttctttcccactgctcacgggatgcctagcacttgctctcttatttgtatatgtgtgtgttgtgtcacttggactagtttccatgccacctaggtagccatgtgggttcaggtgatgttgctgatattatgaatggcatggacattgcaaacactaagtctcaaaaatgatgaaatgatatttcttgtttgcagtgaagtaggaaaataaattgtgatgactactgttgattgaataccaatgctgctaagtgttttttttatttttgcatttttcatatagtgtcttccctgctgttataaggtggatactcttttattcttatggggaaatggaggcgcacaagttaaatactgaaatgttttagaaaactgtttaacgagaggtaaaatgtgcaattatggctaagctttagtcattaaaataatttggtttattagattaaccagttctctcaaattctaattagtgcaggtttgatggtagagaggtttgtggggtctcatcatccccacttcattgtaatcccttcattgtccgttgtgttgtgttcatcccctctcatcgcgtctctgagatccatgaacctacccaggactctaggctgaaaaagaatcaggaatttatggcgggtatagaggcatga

SEQ ID NO: 45824 - DNA, 1051 bp, Homo sapiens
cataattcatttctttataaagcaatcagactgcgtttgtctttgccaacagaatcggataagtaggaacctggcgcatctggcctgaggctagatggtgatggtcttgaatagtttaggtaggttattgaaagtggaagcaagatgtgcattgtcttcttttatacctgtaaggagaaattctttaaaatcatggtgggatatgatttagccattaaaattgatataatgttcagcagataaaagtagaatccagaatagtatatacagtttttcctgtaataggaaaatacacagaacatgtatgtggacacgattaaaggccttaaaataaaattgctccattgtgggtagggaattaatttgcttgacggtagttggttttatgggaattgggagagactttgatactttgatactgtcagggcccttcattgaaagaccaccaggaacacaccataagctgaacaaattgggtttagtgttctttgaggcaaaggagaccacacaccatgagcgacggacggtaggttatagaaaaaaacccattacagaatttgaacttcggttgcatgatttggggtaagactgaggaaccgggctttgctgtagatagaatgctgttagaaggtggggcaattctgactgagtaaagaaggaacagccattctgtttagcacgagaaggggatgtttggtgttttgtgcgttgcaggtgcccttgtttttgtctgttcttagagaaaatcttcaagtggcattgctttgtcttggtgtgtcatgtctcagaataatcttatccgacgtaggtatctgtgggattgttgatgtccaggaggaaaacagagcttacctggctgtgagtgtcagatcggcttgtaataatattgagagatagctgtgggactcagagcagtttcaggtgttggaggctgttttttcttctttctcaatagctttatttattctagcaaaagtattttgatagctattttcagaagaagaattaacaacctctcaatggatataatagttcttatctagaacagcga

SEQ ID NO: 45825 - DNA, 1034 bp, Homo sapiens
aactcaactcatttcgggccgcttttctcagagggcaaagatgggtcagggtgggatgttacattagtgttgagactctttggatccgtttcgtgggtaccgaggacgcctgggtacgcgggacaggctgcacccgcctgctagaggcgccccatcgaggcgccacgggtgaagctcccggccccacctacggggcggggctccggctcggtccgactattgcccgcggtgggggagggggatggatcacgccacgcgccaaaggcgatcgcgactctccttctgcaggtagcctggaaggctctctctctttctctacgccacccttttcgtggcactgaaaagccccgtcctctcctcccagtcccgcctcctccgagcgttccccctactgcctggaatggtgcggtcccaggtcgcgggtcacgcggcggagggggcgtggcctgcccccggcccagccggctcttctttgcctctgctggagtccggggagtggcgttggctgctagagcgatgccgggccggagttgcgtcgccttagtcctcctggctgccgccgtcagctgtgccgtcgcgcagcacgcgccgccggtgagtgagcttgagccgaggcgcagagaggggcgtgcaggtgcgggcgcggatggaggcgcaggtgtggcggcgcgagcgggtacaaggaacacctcgtgctgggcagcttctttacgggggtctgtggtttcgtgcacaggggtgtgggtgcagagcgggctggcgaaccccgtcctcggtagattcggtgctacctgcaactagaactcctttaaaggaaatcctagtctctgcaggatacctgggtgtgattcgcacattcttagatttgagtgagtgtacttgaataaccagttccaggcccttgcattttgaagtgtttaaataaaatgttccggtggacctgtgtgcattactcaatcaaggacagactgcctgatggtcaggtgctttctcccgaagaagttcaggagttcagcccaggatactgcagggcc

SEQ ID NO: 45826 - DNA, 1044 bp, Homo sapiens
gagggcccaacctgccctctcagtcagactgtgccctaaccatctgcaatgctgtgcccaccctaaattacttctttggttcatcagctcttccctcaccctcgatcccaccccttgctgctgccaattacaagcatgattgccctgcccactccccagcctcttatgtttgcaccctttacagtttcatctatatacaaaaagtgcccacatcataagtgtacagctccatacatttttatggactgaacatgtccacgtaaccagtatccaaaatgagaagcagaatattgccagcatcccttaactccccccctggtatttccttctattccctcacttccaaaggtaactactatcctgacttcaaatactatagattagttttgcccatttcaaacttcataatgggaaatcacacagtgaatacttttctgtgtctggtttcattttctttttttcttttttttgagacaggttctcactctgtcattcaggctggaaagctgtgatgcgatcttggctcgctgcaatcttgacttgctgagctaagcgatcctcccgcctcaccctccgaagtagctgggatcacaggggcatgccactgcacctggctaatttttaaaaatatttttgtagagtcggggtcttgctttgttgcccaggctggtctcaaactcctgggcttacgcgatccctcccaccttggtctcccaaagtgttgggattacaggcatgagccaccacacctgatcaggcttcctttgcttaatattatgttgttcagactcagccatgttgatgtatatagttgcagattgttcatcctttttacttcacgatatccctttgtttaaagatgcatgatgggtttacccactttcttgttgctgggcatttccagtttgggttttttgtaagtagtgctgctatgagcattcttatacatgttttttggtgaacctgtatatgcatttttgttgggtgcatgcctaggagtcaaatttctagggccatgtggcccaggcctgttcagttttaata

SEQ ID NO: 45827 - DNA, 1077 bp, Homo sapiens
atgtgaagaaggatgtgtttgcttccccttcggccatgactgtaagtttcctgaggcctcctcagacaggtggaactgtgaatcaagtaaacctctttcctttagaaattacccagtatcaggtatgtctttattagcaacatgagaacagactaatacacacagccaccactttgggatttactcatttctctgggtatctccgtgaacccaaaaagtatctgggacaggtctcaatcaatttagaaagtttattttgccaagattaaggacacccccatgacacagcctcaagaggtcctgatgacatgtgttcaaggtggtcggtgcagagcttgggtttatacattctagagagacatgagacatcaatcaatatgtataagatgtacactggtttggtccagaaagtcaagacaactcgaagcaggggcttctggtcataggtagataaaagacaaacagttgcattcttttgagtctttggtcatcctttctctgaatacacaatttacatgtgagaggagtatagaataatagtcacttatgccttagactgcctcagtgaatctgcatttttccatgaacaatagggtagaggaagcaatcagatatgcatttgtcttaggtgagtagagggatgattttgagttctgtcctttgtcctgcacctgtgaaaataagctatcaatttacattgccaaactgaaattcaaaagaactgttttaggggaattactttgtggacaaattgtgagggaggtatgtagcttatctttgtagctatcttatttcggaataaaatgggaggcaggtttgcctgatgcaattccaagcctgactttggcttagtgatttggtggtcccaagatttattttcctttcatattcccatgtttacctgaagtatgcatgctaattaatttgtttttctcctcttaatgtcttttttgttgtagggacccattccaactgagaactttaaaggtagagagaaaattatattttcctcctctacagtattaatgtcttattggaatgtgttgtgatcggagaagattgtttatattatatcta

SEQ ID NO: 45828 - DNA, 1022 bp, Homo sapiens
agttgtcagccagtggagcagttcaagtgtgcttgggcaacctcaggtggaaatactgagaactgagtgaggctttgggtaagtggttggattattatgatgatagacaatattattacaaatattttctgagcctggcactgtgctgaacacttagcatgaatttttggcataatctttttgcgtaagtctgatgcagctctattatttacaccattttacagagaggaaaagcctgcatcaggcccccttcttcagacatgctgcagcatttgaacacacctcaacatcttctgttttgaactacagaagtcagagctctgacccaccaactttgtcagcttcagattgaagaagcaatgattccactcacgggaataggatgtatgggtgtcatccaggaagaactggcaataaaaatagtcactttcactctgcattggaatcccatggatttaaaaatccaaatacttgggtctcacccaagaaattctgattaaattggcctgaactgtggctggggtgagctctgtcacccagagtggggtgcagtggtgacatcatagatcatagctcacacagccttgaactcctggactcaagaaatcctcccatctcagcctcccaagtagctgggaccacaggtgcatgccaccacacccagataattttcaaaattttttttagagatggcatctcactatgttgcccaggctggtcttgtactcctgaactcgagcgatccttccaccttgagctcccaaagcgctgggatgacgtgggagcctccacatcttgcttctctggaaatgttaaaagatccccaggtcattctaacatgcgcagccaggattgaaaaccacttccctagagtttggcaactcagcctgctcctgctgcatctctgggagcttgtgggaaaagaacaatcttacgccccttcccagacctagtgagtcagatagatgctgcgttttaacttgctctcccggtgatgtgtacgcacattcaattgtgagaag

SEQ ID NO: 45829 - DNA, 1041 bp, Homo sapiens
gtgcattttaattgacattaaaatgattccattcctgttggttctgatgatccatcatggttgacatttgggtagtaacttcatatccacttcgttacagagtgagtcatccgctagccaagtgctttgacaagcctttgctatcacaaagcttcagagtttctctctcagtttctgtcatgggctttgtgtctgtccctgccagtctctgcttctctcttgaaagtatttttgtaaggcttgtgatgttattcttgttccagttctggttgttacaaaactgaactgccctagagatgattgatggaatggttaagagcgacgggtgtaggtggctcgttagtgcatggcagtgaattacttagagttcacctcttgattattgtagtctgcagatcaggctctcaagaatctctatgtgattttatctttagggtctagaaagcagctgttcaaacctgaatttatttacctttaccctgtctttagaagtgaaaaatcagttcgttatctaaaacgtacatttactatcacagatcaggaactgtgtccttggtgcagaatcatctttattctctggcttactcggaagagagattttgttccacctgcctataaggggtttttgtttgtttgtgttttgttttgggggcttgtttttttgtttgttttttgacacagattctcactgtttcacccaggctggaacacagtggtgcgatcacagttcactgcagctttgacctcctaggctcaaccaataggttttgtaaaagtttaattggaattaaactttttggtttttacaaaaccagtaggttttgtaaaagtttactgggtcgcatcaggggagggcttggttcaggcacagaaggaagccactgaggattcaaggcctcccagactgtgatgacagcaatcagtctggagctgatgtgcccaagactgtggcacccggagcaggtccatctctggcctggtctcctgtcactcatcctgctttcttgtgagctcatggcgtttttatttccttttgtgaaa

SEQ ID NO: 45830 - DNA, 1033 bp, Homo sapiens
ctagcaaaggtgttcctgttaagtaaatgaaatctcacaagtaggtggtaaaacctaggcatgatgagagcgagaatagatggtgaatgtttctttcagacccttaaagatgtcagacactgagttaatctttcctagatccagacgagggaaggcctcggagaatgcctggccaccatcaatacagattctctccacagatgcaaatctcccccacaaaagatagctttgcagagctacttctgtttgcagggcctctgaaaggccatctcaaaaatatgtcaaagaaatgtattgtagggtcgggtattttggttttcctcagtgaagagcacttgaacgcactggacatctgataaatggaagaaacgtggtctgagttgggaaaagctaagaggccatcgtggagcagcatcacctcaggtgcagtctgtagcagaccgttttctggctcctgcgcgtgagtggtaagccagagccctcgccctgtaatgagggccaggaacacctatcagtaggcaaagcttgaagtcacttttggagctcctaggttggggaaaagcaagtgaggctgttatattccttggagaacagattctgtctggaggctgctcatcagccactttgagttatttttattgaccttcagctgtttttgcccggaggcattttaaagatgcccgtgggccttgggctgttttacaattacaatagcttatttgaattgctagttgtagaaatgcgtgcacagcagggtcttcgctctgtccttccctggcttctggggtgcttcagaggttgaggaaacctgatttgctgtcacttgacaagcccacttgtctgattcagcagttacctgcccttctcagatagactgcgatgatttaaccttacatttattttaacaccctgctcttaaaaggtatgtaaaaaggtctagaaactgctctagatattatgaaaaaaatcatagtatgcttgattttcttgatcaatgttcacacctttcacataaacgaacttatcaaatgtt

SEQ ID NO: 45831 - DNA, 1042 bp, Homo sapiens
gcctttgagaaggtggacaggtgagatgtaggagagcatagtataattagttttgggaaattgaaggagcctaattggatggcttctgatttttctgtgaagtgtgaggcatgattatcttgatcaatgatggtgtttggagtttgagaagaatagagcatgcttatatagttagaataatctttgcagagtgaaatagcaatttgatatacttgaacagagtaagataaggtgacatgtttgctcagaattatctttggggtgaagagatggatagtaccactgtttctatctgtagctggatcctttttcttaatgtgttagcatattctattagcttacatggagagaaacattgcagtggggtggctttgacatggacttagcaatgctgaacaaatttcttaatgttcccaagttctttaagagtgcatccaccatatcttctgtgcaccttatatactagattactagactacttaattttatcccacaacattgtatcagaactcactcatatagttgtgacagcaagtgaatccatcttagcaaaagggcacacctgaagatggattgtcaccaggacgtactctccatttctatctctgcatgattttttgtgtcagcattattctttggaatgaggtcctttatacatggttattagcagtgctatagatcacgtgtttaattttgacaccaaagaggattgttcttcttccctaacttctcatttagtctgttctaggacaggattctgacttgtatcactgagaggatggaatattgtgattgacagcccccacttgcttgcaatgacagtaagaatgagatactggtctcagagaatgggagttcttggcacacaaagcaatagatacccatttgtttctttccagtgtgcagacacacccttcttcatacattgaataatacttttgccaaacattgcagttttccttttacaaccacaaatataccatctctctgtaacatgcctgcccaactgcagcttctgtctccaaggctaagatttgttgat

SEQ ID NO: 45832 - DNA, 1014 bp, Homo sapiens
gttctcattgtcattgctctctgtttcactgtactcaaattcctaacatggcagatactgtgtcacgctggactcttggtaaaataataatgctaatgttagtactagcataacaaacttacaagacaatctatacgaagaataactaaggttaaatctatatatgtatagtggttatgtaaaggatattattggtttgattgttctatttatattcagcaaagacaccctgactgtaagaaaagaaacagaaatgccatagttatgaaaaattgaccattaacttgaaggaaatattgaactaaagagttgagaccacttaattttgttagctattgattattagagttttctacagtaaagtatttttaaattaaaaaattgttagctaaaaatgatattgaacatgaattaatcttctggattttggtatttaaaggaaaaagattttcagtggttagaattaaggaagactcttgctatggtgtcagcatgtccccagagttcatgtgctagaaacttaatccccaatgcagtgttaggaggtaacacctaattagagactgttaggtcataagggaaaagggctctgccctaattaatggattaatgttatcaagggagtgggttagttatcgtgagagtagttttgttttaaaagcaactgtgatccccaactcgctctcttgcgctttcttgaccttctgccttactaggagaagggcagcaaagcacaagagagcaggtgggggttagagaagaccccagcaaggaggccctcatcagatgcaggccccttacttgactttgaacttccagcctccaatactgtaagaaataaatctctgttcattttaaattatgcagtttgtggaattctttcacagcaacccaaaacagactacgacagaagattggtaccgagaattagggctgttgctataacaataagctgaaaatgtggaaggggccttggaattgggtaatccacagaagctgggacagttatgaagt

SEQ ID NO: 45833 - DNA, 1026 bp, Homo sapiens
cagctcactgcaacctcaacctcctgggctcaggtgatcctcccaccccagcctctcaagtagtcaggaccacaggtgctcatcatcatgcccggctaattttttgtattatttgtagagatgggtttttcactgttttgcccaggttggtcttgaactcttggactcatgtgatccgcccgccttggcctcccaaagtgctgggattacaggagtgagccactgcacccatcctgaattttctttaaaagaaagttgaatgacgtgagagccgatagagaagggaaacttgtatatttaaagtagttcctttatttgacagctggtcattgagctccggctcttcaccaggttctgttttggcctctgagatgcaggtaatttcaaacagctatgagtgccctgaagtcacagaagtaggggttttggtggcaaatgaatgactagggtggagctgggctgctgtttaaggaaggatggtcacagaaggtccttttggaaaaagatactgagctgactgctgaatgaggagaagccagcttagtagtgaatcaggatggggcaacagagttccagacaggatgacagcagatggagggtcattcgggaaagcttcagaaaggaggcaagcttgccttccatgcatgggctgagtggaagctaaagtgccacgcactcacctggaatgaagagtcaggcctgactgacaaagataagaagagtgagaagcggttgggattaagtttaggtcagtaggatgaggcctgagcatcaagggcccctggatgctgaggtctgtacagctttttcaggtacctcttgagacatactcagatatgtcgcagggatcatctgctgtgagactgctagcagcattgtaggagttctcttcactctgtccacgtagaaatacgtgttctgcaacagagagtaaaaggcaggagcagaagaaaactttctctccctgacttgcagaaaagctcatggcaggtttaaaaaggacagggcaatgcagacagctatagt

SEQ ID NO: 45834 - DNA, 1033 bp, Homo sapiens
tttgaattaactgagtgttacaaccgccattctgttctgaaaataggctgaggctgagttcctcttgacacctcatgcctctcttccctccccagtccttcttggtatcctgctaattgtacctctagacaattggtatttataattcatttccactttagcttttctccagagttcatacctcagtcttcacctccttctactaatggttctgtgagattttcttagcaaagagggaagtgtctgcctgggtgccgtttgatactctcctgttgatttcacttgggatctgaaagcctttcagttcattgatactctgaagatattcatcattataattatggcaacagaatttcttgttctctctacctcctacccccgactgaatgtgagctgctcaaagttaggggcctgatggtatcagcgttgtgtgtccccagcatctggtacctagtagacacagcaaagaagtgtattgagttcatttctctggtactcttttgagaggttgagtttttctgatgaccattaactaggtcccttgttagaagccttttagggtttatctaccaaacggtgtccttagagaaagcatcagaaggtgaagcaccagtttccagccttccgcttaattagtttgcttcattaaatgtctcctgctattttgatttgttatggaagtcaccttcactttctgctaaagcttttgtggaaagttattttgtacctttaaacagctgcttctctccaggaagcctgcttttattttatagcaagccggctcggctgtctctgtacaggctggctcatgtctataaatggtcaaggcctcagagccagatggggcaggacagggtcatccaacacgtctttgaagtgattatttcatattgaatctagttgtgaaccccatatgtacctaacaccatgattgtgggtgataagaaataatgtaggatgaagaaaataagacttgttcagaaaacaattggaaaactatgttgtttcaatgttaggatgtgatacattgcag

SEQ ID NO: 45835 - DNA, 1084 bp, Homo sapiens
acaggatggtggcattgcgtcaggttcactcaaatgttgtgaatcttagtcctgcatcctttctactctactgtttgcttacccctagacggaaggaaagaaagaaaaaaccaaaggaaagaaaaagactgaaaaaaaaggaagttgcagtattctacgtattggtcttcagtgtgatggtgtgaaacccattggtgtttgagttgagaggtctcgaggcttggcttctgttcctggttttcccccagtatgtctgctaagagaccatgttgtgcttatgcttattcttagctccggaagcacattgttgattttctcaaatattgttttcaggttattagaagtggagcagaaaggtttaagcatgggagatagcctctcacgagtgttcacactatttcagcagtatgttatatctttaagagcttgatccttaagaaacaaccgtactctagaaagtacatcatttttcctattactaataatgtatagataactcattaataggaatctgtaaaatattcttatttttggccaccgatatgataaattcttggactttatgtaccttttaaagtacatctaattaagtgattaggaggtctgtttttaaagggaaacagggaaagttgctgcattattgtctgggtttggtttttatattgtatattatctttaatgttaatacaacagtcccaaaagatggttgctaatttcaggttctgtttctctaattcttggcctaggaaaatgaaaataaggtttgactgaaataagattctgttcaaatgtccttgcaaatgaggaagcctcacattaccaattttttcccaggaattttattgttgattaactgctgatggggtagaatttatagttgagaataatttcaaaaagttaatcagttgccaatgggcttagtaaagaaaggaaaatataggagcggaatctgcagcttgatttttgtggtttttttttttgggtggggatctcattattgtttgtacaatgtgtgttactgcgaaaaaccctaatgaactttggcttaaatactggtaataactaaaactgctcattctcccag

SEQ ID NO: 45836 - DNA, 1033 bp, Homo sapiens
atcagatggttgtaaatgtgtagtcttatttctgagttctctttctgttccattggtctatgtgtctgttttttgtaccagtaccatactgttttggttactgtagacttgtagtatagtttgaattcaggtagtgggatttctccaggtttgttctttttgcttaggattgtcttggctgtacagactctttttcggttccatatgaattttaaaatgatgttttctaattctgtgaagaatgccaatggtagtttgattggaataacattgaatgtataaattattttgggcagtatggccgttttcatgatactgatccttactatccatgagcatagaacgttttttcatttgtttgcatcatctgatttccttgggcagaggtttgtcgttctccttgaagaggtcgttcacttcccttgtttgccatattcctaggtattttattctctttgtagcaattgtgaatgggagttcattcatgatttggctctctgcttgtctgttgttggtgtataggaatgcttatcatttttgcacattgattttgtatcctgagacattgctgaagtgacttatcaggtaaagaagcttttcagctgagataatggtgttttctagatataggtttatatcatctgcaaacaaagacaatttgacttctcttcctatttgaataccctttatttctttctcttgcctgatttccttggccagaatgtctaatactgtgttgaatacgagtggtgaaagagggcatccttgtcttgtgccggttttcaaggggtgtgcttcctgcttttgcccattcagtatgatactggctgtgggtttgtcatgaatggcttttattgttttgaggtacgttccttcaatacctagtttattcagaatttttaacatgaagggatattgaattttatcaaaggtctttttggtatctatcgagataatcccgtggtttttgtctggagttctgtgtatgtgatgaattacattaactgatttgcatatgttgaacccgccttgc

SEQ ID NO: 45837 - DNA, 1113 bp, Homo sapiens
ttttaattgatctggaaagagaacagtattttttcagatgctccccaggtgattccaatggacaactaaaccacaaaagcagatgactttgaagtccttttcacattttaatattctacaattctgagatttttttatgtcatctagtccaggctcacactcagcataatcatctctctatatttgaaaagcagcattttgtttttaatgttagcattcatttggaaagaatgctcattgccatcagaaagctttgatttaaaagatttttctgatcatcagccaaatttacctttggaaaaacaaataataagtctaattactgatttaattgatgacgattctgatatttgaagattacttctatgattcagcaaagttacctcttcttaggtgaaacctttccaatttttttcatctcttgtttttgtgcaccattatttccgtatctcaacatgctattctgctctggggtaatctgcccttatctctataaaatatttccctggagttgaactacagccccattgatgatcaaaggagggaacttggggattttgggtgattattcccttctcaaactcttactgaatgtaggattaataaatagactctagttttagtaaacagtttagtaaatggtgtttactaacacatactcgtctataaatatgtatactaataaacacagttgatgataaaattcccagcatttaaaaattttcatggtgtgccaggcattattctagtgtttaaatatattaacacatttgattctttcagtaacccttgagggtaggtaccattattttactttttagatataaagaagaaacagactaaggagcagagtagttaagtgtcttgccttcaatttcacagtaagtggcagagctagagtgttgattggataatatagggcatcttattccagagtttgtaagtatggaagttggaggttatagaaattacgtgagatatataaggtttatgcttatacttaaataggtaaactgtagcataggagatgtgctcaagtttgttggaattctacgttgttttaagaaagttgaaatttgtcagaagctactttccataaaaacaatttatagt

SEQ ID NO: 45838 - DNA, 1050 bp, Homo sapiens
gagtagttgggattacaggcatccgccaccacgccctcctaatttttgtatttttagtagagacagggtttcaccatattggtcaggctgatccggaactcctgacctcaggtaatccacccacctcggcttcccaaagtggtgggattacaggcgtgagccaccgcacctggcctaaattgaaattattttaaagaaacaattgttttctcagtttggccatgaattagaagaatggagttcaaggaagtgatgttcctcagatagaggggcagtagcaagaagtgatttgctaatgaggtaaagagaaaatgttgcaaccttaaagggcactaggtctccaaatggtacatctggagttgttttgaagagaggcagtcaaatctgtgtcgtcagtagcctctcagaatggctgcattacagcactgcaaagtaatggatgtacttagtgagtcatcaaaaatgttacattttgtttacttggtttgattaaggagacagggagtgtgaaatagattggaaagattgccagtaaaactatcttataaagattttttggcatttaaagaaattaccttcaatcagaaaatgcgctaatgtaggataattcatttctctatctaaaaccattcttgaactctgttccctgtcaatgttggatttttactgttatttaaaacattttatttgcttgttttaattgttttaacatttactcttcccttaaactttccatagatagcagcatagtttttgtgctaaattgttgtttttgcagaaacgccagaagccacattatccagatcttgcaaggaagtattttctggataatgcaggtacatgaactttcctcttcacaacataccatcttgtcagagggagttcacacattcttttcttttgtgtggatttttttttttttggagttggagtctcgctctgtcccctaggctggagtacagtggcatgatctcggctcactgcaacttccacctcctgggttcgagtgattctcctgccttaacctcctgagtagctgggactaaggcg

SEQ ID NO: 45839 - DNA, 1065 bp, Homo sapiens
tggcaaaaaagaaattggaacaacttcacagggtgatcttgtaaggatcgtttcagtctaagtgctgggcattttcttaacgtcattttgaatccaaatcgcatttctaaagtgttaactctcttagctctcaccttgtatttactggtttagacaaagaagtgtatacttaataatgaaaccagagaatgttcagatttaaatccaagaaaattgcttttgtcattgcagcattttcaaaagattattcccaaaggactacacaagaggaagaagcagacctcagtcagaaaaaggtctgaactttttataaaggaaaagcctgaactgaattctcaaaaatacttgatctgagttatattcggagtatgtagttgaaaataggaacttatgggtggtatttaagtgtagctaaaaaaagagcatcaactgttgcctagagtaggtgagttctttccaagagaaggtcatggaaacctggtagcaacagtatccatggaggaagagggcttggatgcctgtcctgtgtaagtcggagagccttttaagagaaaagctaggtttgcaagctttttaagagaaaagctttaaaggttctggcttaaaatatggaatattgctgcttttttcagtaaagtaaatcaagctgagttaggtgatgaaaggtgcgtggcgtgtttccgcttctgccctccccgtggaggtctggcagcctgctttcgctttcgatcacgtgctcatcatgggcagaataatgatgctgcttttggtgtggttcagaccatgaatgaaaaatggtgacgataatgagggtaatatttgaagtaactgaagatccacaaatcatgttcatgtgttttcttaaaaaaaaaaaaaaattaccaaaaagaagtctgttacaatgttttaacagaacagatgctgcttaagagtacaaacagatttttaacccccaaaaaaagaaaaaaggaaaaaagtttgagtggtggtggttgtaatcattaagggtactgtaatggaatattaatgattcccagtgggaatttatattgaaatttattttca

SEQ ID NO: 45840 - DNA, 1030 bp, Homo sapiens
agaaacaaaaagtttcttgaaacaaatcaaaatgggaacacaacatatcaaaatatgtgggatacagcaaaagccatgataaaaggatgtttaatagcaacaaatacttacatgaagaaagtagaaagattttaaagaacctattgatgcacctcaaggaactagaaaagcaagaacaaaccagatacaaaattaacagcaggaaataataaagtcagagcagaactaaattagaggtgaaaaaaaggctatacagaggatcagtgaaatgaagagttgggttttttttttgagagaataaacaacattcataaattgctggatagactaaccaagattaaaaaagaagacacaaataaaatcccaaccaaaaaaggagacagtaaaacttatatcccacaaaaatagaagattgttagagactatcgtgaacaactgtctgaacaaattggaacctacgggaaacagattcattcctggacatgaggaaactaccaatatttggccatgaagaaatagaacacctgaacagatcaataatgagtaatgaaactgattcagtaataaaatgtcttctaacagagaaaagcttgagcccaggagatttttactgctgaatgctacaaacttacaaagaagatctaacatcagttctcctcaaactattccgaaaaattggagaggagggattttttcctagcttgttccatgaggccagaattaccttgatgccagaaccagataaggatacaataagaaaacactataggccagtattcctgacgaacttagatgcaaaattcctcagcaaaataccagcacaccaaatctaacaaatcaataaaaagatcattcacgatgatcaagtgggttttattccagggatggtaggatggtttattatatgtaaatcaataaacatgatacgtcacaaaaaggtcaaaaattatatttttaatataattatatatttttgcatctcaaatgcaaaaaaagggtttcataaaattcaacatcccttcataataaa

SEQ ID NO: 45841 - DNA, 1050 bp, Homo sapiens
ctcttgtttccaatcctgttgcttactttaatgccagtcctgctacagcaatcaagttaaaaattgtttggttagtccttgtaatttgacagtgagttaggtgtgtttatcttttcaaattttaggggaagtgctttccatgaaatatcaatagaagtctgatatttcagtattctaaaactttttggtcccaggatagctttatactcttaaaatttttgagaagccccaaaatcttttgtttacatattaatatttatctggaactgaaactgataagatttttaaattgcattaaatcattaaaaacccattaagtgaataacacatttatgaataatagtcatactttcctaagtgagaaatatattaaagaatagcacttaaaattgttgctagtctttttatatttggcttagtaaaagatggctagattctcatatctgtttgtgtttatagtcggttgcagtgtatcagaagtcatgcatcttctagaaaactctactgtatatttgagagaatgaaaaaaatgtttttagtgttactataaaaatagggttgacctcatggacatctggaacagtatctctgaaacgctttgagaaccactgtgctgtggtactatttttagttcctttttttctttttaccactctgattcctttttcaaaggcaggatattataggacaggtgggagaagtcccagtgacatatcagatattcctaaatgttgagcttttagcacttaaatgagctctgtgattagggtttgtgagagagcacattgaatatccactgtagtcctggttttaaaatttacaaagggtcctcctttgccccccagtcatacatttaaaaaggaatggacacctgagggcagcatgacataatcaaacttatttgatagcaaagcatgcaaaataaaagcaaaacaggagctttcagcagagccacataactgaagtaattaccaaatcagtagtatgcctttccaccatttattgtaacatgttggaggaggtggaattgtcatatgggagagtatgcct

SEQ ID NO: 45842 - DNA, 1047 bp, Homo sapiens
tcttgacatgactaccgcaatctaatgttcatccagcttgttaaagggatggccagtcagtggattgtcatgaccacttttttcgtgttactggccaagcaagttttcactgctttgtctggctgtttggtgataacagttgctctttgcacccttcttttccttagcctttctggccaaaggagaaaattttgagtgcgtttggccacatataacattgaatcaagtcagtgatcaccagcgtgaagaattcccttcacactagatattttgaggttccatcaacataaaagagttgtacgtttagcatctgttaactgagaaaagtttaatggtgggaggaaaaaaattcagtaatattgcaatttctctttaaaggttgcagatctcttagagcttttgtcacatttttgatgatttgtttctactaaatcctagattgcatttttaaaaagctaatatagctttaataatacttttacataagcatgtatctgaatcataagaacttgaaatgtagcaaccaataaagatgttattttttattagatatctcagcatgcttgatgtctagatgagctgtggacacccaggtttcagtagctacaggtttagagctgcaaatctaggacatttgctcttctttagacttacaaggaattgtaaggagattagatgaagcatcctgcttcttcttggcaactgggatggaaaagagtttacataaattaacattttaatattaccttgagttaggccaatcatggataattaataattggcagtcgtggcaaaattactgatagaagagggagaaaattatcaataacagtgaatctctgtcatattcaggatcatgtgtttggtgataagtagttctctgttttaaaaatgtgtgcgatatacttgggattgtctatttaggttttatgtattagttttccataatgcatgctgttacaagtctgttgaatatatagtagctatcataagaactaaccatgtaaatatgtttcttctatctttctcctctggattcattttaaa

SEQ ID NO: 45843 - DNA, 1043 bp, Homo sapiens
tgtagtctaccaagcacctaaaatatgtggcacagtatagggaattaaatacgtattcattgaatcattgaagacagacataccagaagatgactggcaggagcaaaatggatagtagtaaagcttataaaagtagtaaagcattggagtctcactgaccatgtccagctccttgcctcagttttcccatctgtaaaatgggttatactattgcctgtttcataagactgacaattcaatccctaggaagaagcccagaggctggcacatagtaaatgcctaaccattgttaacctattaggtttatggtaccatggtgggtgctatggctcttctgaataacttctcatttacatttctttgggaattagatgatgtgctctctacaatgcctaggaaataaatgccatagataatgatggacaaaattattttcttttcccttttcagaggcaatttatgatttagggttttacttattttttgctgatggtgtacttacttctgacttgtatttcagccctggaagctgtgcgtttgtacccgccctcttgtctgttggttccagtcttctgtgtttctatgtcatcagcctgaagaatggcaaaggagtcatgttgttcccactggtctttttattccacttgcagctgaagtcatttcttctcactccttgagattcttctaatttgcctttgcctaagttatgtataaaattcaactcgactaggtggctgttattattttctatgtacaacccttggggtacactttataaatacagggtcatacagggagctttgacaccttaacctaacttctttttggtcctagttttattaccacaattacataaaaatttaaagaaattttaaatttaaattcaaagtatactattgcctgtatgaaacgggcaatagtatactgtttattaaagttctgggaaaaattgaaagtaaaacagtacactattgagtatattgttttatacaggcaatagtattctactgatgtcagtttttttccaggattagctacagtga

SEQ ID NO: 45844 - DNA, 1052 bp, Homo sapiens
ttcatttgatcaatgagataacttaaaacctttcataattatgttctttagtagagaaattagggagctgtgtctgtacacgacaggtatttacaacagtcctctatcatttcatcccagagtgactctccccttacctactagccatctgcctgatagacaactggcatcttcaagatcaaacaaatcatgggtctgattgagattagtgaacagccatccttgttcttaattcaagtggagaattacttgaacatctcagagatgactagtgcttttatttttttaaatatgtttaaattttaattaaatatatagggacggggtcttgtcatcttgcccaggctggtttggaactcctgggctcaagtgattctcctgtttcagcctcccaaagtgctgagattacagacggagccaccatgcctggcctagagtacttttagagtttagtctcatttcagttactatctacatttatcatcttttgccagtgagtattaaaacatcaagaactaaatggtttgacctaaaacctccacttaatcccagttacctatgaggaatacactattagaacagagagcagaagcatgattagtttcttttagagccccctctgatttttattgaacttgctcctactcctcttgagcttggcgtatgcataggaatgtttattttacctgttttaagtgacgtttacttggaagcatttgagtagtttataaatacatggtgtcatagtattggcttgtgtcaggaagacttgcttaccacaaagcagtgaagtctcagtggagagctggcccctggtctacagagtgacccagagctgggtcatggctggttcaagagcgtctcacattcgctgtctatcttatactgtctggatcttgagtttttgcatgtgataagccatccactttttgggaatatatatgctgtctctgtcactgctatctgggattcagtttctagtttctgaccatagctcctcactcctaccttgtaggctcctagctcagtccctttctctccttctggatatt

SEQ ID NO: 45845 - DNA, 1048 bp, Homo sapiens
gggtttcttcagctcactactgagatgacagccgttcctctcgccatcctcttcaaagtcatatctatgatcaataccctttaactcataaattacctataatttatgctgccagcttcttggagtaacagaatctcaaatcagaatggtagtaatgaaatattctttttactttcaaagcaatattctaatagacaagataccatatttttacctcatgtttttcctttagaatatacttatcctcaagttaaaattttatcccctttacataacaagattttagaaaatctaggccagtttgaactcccatgacgtgctttgagccatccatggctgtacattcccagattttagtgcaaagcctttcccaccaatttggaatgaactgatcattgtaaccagctttgtatgaaacacttgtttcggatcccagcgctgtagtgatgtcattttctttatacccaaagtaaatgctatgcagagtagcttattctggaatttggctgtacgattcttctcttggttaaaatcttccatagcagaggagccctgctaagtgaacagtctctcttacacattggtttttgtgcttctaactaacttttctaataatcttatttttccctgagaaagcaatccatcctatttaatgtggagtaggggttgtggttggaaatgaaaacaaatccagtatgttctagtctgatttttttttcttttttagcatcagtgtgttttcagtagaagtgattcaatcttaatgtggtttgggctcaagggtagagaacaataagagctataaatatagtagacaagagggggatcatgtttagtcaagataaagtctactttaagttgtttccatgtaagaccttgaactaaaaagaggaaaggtgttagatctcctaggactcattattagagttttaaagtttctgatggaaggtataagtgtctatcttaaattatttatatattaatgaaatacaacagggaaaagatcaatttgtaaaaaatttcaccatctttagaattctcaggggac

SEQ ID NO: 45846 - DNA, 1047 bp, Homo sapiens
ccagcactttgggaggccgaggcaggcagatcacccgaggtcaggagtttgagaccagcctggctaactccatctccaataaaaatacaaaattagccaggcgttgtgttacatgcctgtaatcccagctgcttgagagtctgaggcaggagagtcacttgaacctgggaggcggaggctgcagtgagccgagattgcaccaatgcaccccagcctaggtgatagagttagactgcatctcaaaaaaaaaaaaaaaaagcaggggagagtggggtgcagtgagtgtggagaggtagggaggagcatcatcttaggaacggtccagtttatgccaagtgcagtggaaagccattaagaacaagcatttggtcccatgggtgaccttcagtatttaaaaacaacaaaccaattgcaatgctgaatgtggattccagtaatacctgggaatgtggatgacttatgagatgcttaatagataattcctaattctatgttattcctatttgtaggaatctgaggctcagagaggttaagtaaagttgcttcaagtgatatagctagtaattgagacagccaaaattcagcttctggtttttctaactcttgacctcttgctcttagtagtgatctatctcccaagtttttaattttacttagttatcctaatgttcgtttttaatatttgtagaacatgctgcatattaattgttcacgtttgtgtgccaaagtgaatgccctaccctgtatgttgacttttgagctgtttctaatctctcaaagctttggttagccttgcttctgttgcctttttgttaggccgttaattggctatctaattttggacgtgaaatctctctgcagtgctgctctgttgtcagcagggggcagctcttggcttctgatgcagtcatctgcttgagagcatttggccttatttaaatcagaaagtattaatcaactgatgaaagtttggtgtatttttactgaaattttgccgtatcaagtttccatgatatatttatctgcttctgttataattaggaatgc

SEQ ID NO: 45847 - DNA, 1030 bp, Homo sapiens
acaatgactaaattgtattactgatgatacatcgtgtgttcattaaaaatgtttatggccaggtgcggtggctcacgcctgtaatcccagcactttgggaggctgaggcaggcagatcatgaggtcaggagatcgagaccatcctggctaacatggtgaaactccgtctttactaaaaatacaaaaaattagctgggtgtggtggcgggcgcctgtagtcccagctactcgggaggctgaggcaggagaatggcatgaacccaggaggcagagcttgcattgagccaagatagcaccactgcactccagcctgggcaacagagcgagactctgtctcaaaaaaaaaaaaaagtttatatggtttatattaatagaaaataaagtttgtgtgtgtgtgtgtgtgattgtaagtaagtgacagcaaacaatagggaaagaaagattaaaattctccaactgtgctagaaaaaaagtgcaaataatgtaaaagagtgactttgttctcttcggctcttctttatgttcacatgtgggctgccaactaaatgccccttttgtaaactttggtctgagggttgcttcttattcttttaactgtgtgttgggttaacttcctctatatgcttcaggttgcctaaactttctctatattcttcttttgtaaaaaggaatgaatactcaatatatcccaaagttagggtgaggatgtttttctcaaaaagataccagaagagagggagtggtcttacattaagttcttaaagtgttctgtattagggatcctcttttgattattttgattaacaaagaattctttggagaaaacatatgagcttgaaataactatagataatgtcagtttggaatgcttatggagatcactaaaacagggtaaaaagagggagaaaacaagttgaacacacatttagtaattctttctggggaagtgctctcggaggtgcaggtgttggatgttggataaaccagcttcttaaagatgacttttctaggtcatacatgcagtaagtga

SEQ ID NO: 45848 - DNA, 1048 bp, Homo sapiens
tcagttctgttaatagttagacaacactgccccctggtggactgaacctgcaacacttttcagtagcggttaacattgtgaagcgctgttcctgaaggatattcctgctagcagatttccttcagatttgtttcggagttaatactcttttgttctttctgcttaatttaatctggaggtttgtcaaaatcccagtggtgtacaaatattccctgttatatcttaatctcattatgacattatgaaataaggatctgggattttcatggcaaaaacttctcagatggacattttggtaggccccagaagacaagatgtgttaacaagaatatatgaaacctggtctagtgggttgatttttttcctcatgtataaatttttcaaaaccttctgaagaaatcattcttgttggagtcataataattgaaagactaatgtgaaaggtcccacttaacttggctgtttgtggacggatagtttttgagttgttgcatttgttttggtgtgtattaagttacggtgtaggctgacaaaatgtgtaagatatttttcttaatttggggtgttcaaacctgagttctctgcttcattgtgttcatgatgactagtgatgtgtgtggtggggggtagagtgtgtgtgtgtatctgtaggtgtatgtgtacatttatatatctatgtctatatatatatccctgagttatgaattataaaaaatgaaaatgctgtttggaaagcaaacataaagatttcattttctgttttatcacaccaaattgcagaagtgaacgctcttacatcattattatgcaacagacactctgctaggaactttttgtattattcttggaacctcagacagatcttctgatacagtttctcccctcacccccattttatagatgaggttcctgagactcactgaggcccagtaacttaactaagctcaggttacacagcaaggaagtcacgggtctgccatgcccagtcaagcatgacatcaaggctgtctctccaccatatcctgcagccttacaggaaattggagtg

SEQ ID NO: 45849 - DNA, 1053 bp, Homo sapiens
cctggtacctgggcctgtacgggcagtcctggatcctgagtccatgaaggccagcctggtgcttagaccctgggttcactgggggcaggcctagatccttagtccgctggcactggtcctgcctggagactgggtccctagggatgggcctgggtcctgggttcgtggcagcttgtgtggccccagggtctgctgaagcaggcctggatccttggttctgtagagcatgaggcccctgaggctggcctggctcctgggaggcctggagtctctatctgcaagggccagactggtttctgggtctgtgggtgcaggtctgaagcctttggccattggggcttagaagacattttggaagtgggtatgattgcccaggaatcatgtggaaaatgacaggaaatctgaagtttgcactctaaagaaaaaaaaaatgaacaggttgacaaagtagtatttaaaataaatttagaagaatcaacccgagatagagaagggaaactttaacagaaaaatatttggaaaacgagagagaggattttcaaaaggtggcagtagttgcagagacatgccatggatgagtccagtccaataaagactgaagcatctagcaattaggaggtaattgaatgcattgaaataggagaaggagagtgtgtgtgtgtgtgtgtgtgtgtgtgtgtgtgtgtgtttgtgtgtgtgtgtgtgtttataaagttgtttagattaaaccagattttttttttaatgatcacacaattattgaaattactcagggtagatggtggccgtttcttaagtagctctaggagtgtactctacatcccctgggtgccttgccactcagcagcccacttggggcttttgtcattgtgacagcatggtaactgtttctctcaagctaaaatttagggtgtatttcctgttgcatgaaaatgttttttgggaatagtgggtagatatttaatacagtggccatcatgaactagcttgaaatttgtgatgaagcaatagggtcccacctgtcactgttcactgctttctctgaacttcaac

SEQ ID NO: 45850 - DNA, 1067 bp, Homo sapiens
ggaatgcaaggggcagggttgggggtgggaaatcgcaagagcaaaggggcatgcactagctgtaataaaaggatatggtaagtctttaacatccttgataggttcttggaaactgcgacttcaagcgaaacatataggatgtgtaacaaaactaattatgttatcaatataacaaaacagtgttatttgaggacttgctgtaggtcgttttgcttaaagtcttggtttccaagaactaatctgcaatgttgagtgaggacttgcttttattttggagaaattgccacggaagacttctagttagagctcattgcccctgtgtcgtgccatgatcacttttagctgtaagagaaaggctgaaaatacagtatttattcagcggccgtgtgcctagctaaaaatggaggggttctatcagtaagggaagaggagaaatggatagtggggtaaaccatctccatctctgcctgaaagtagtgcaggaatgcgagggacacataatgaagacctgaactgaggcagtggagatacagaagacgagacatactgcagggattgctgatattggttactgatatgatacgggaagaaaagaaggtgaaggcattgagggtagtttctgctttgggcagctgggtggatgggagggaggatttgggggtaaggtggaagaatgctgacactttgggacatgttgcgtaggagatgcccatggcacattcagatgcagatattcagtgggctggtgggtatcaggtctgggctagagggaagagattttatattatttaaaaagaaatgttaaagacttctctcccttatttccttttttttcatttccttcagctttattaagatataattgacaaaaattatatagatttatggcatacagtattatatcttcatacatatattcgttgtgatatgattaaattaaattaattaacatattctttaccttacatacttatttttttgtggtgggaacatttaagatctactcctttagcaattttcaagtgtgtgatacattattgattataggcaccatgctgtctgacaga

SEQ ID NO: 45851 - DNA, 1296 bp, Homo sapiens
ctactcgggaggctgaggcacgagaatcgtttgagcccaggaggcagaagttgcagtgagccgagatcatgccactgcacttcagcctggatgactgagtgagactctgtctcaaaaaataaacaaaaaatttaaaaaataaaactccttggcatagacataactttgaatgtgacactgtgatttttttgctaattaagctttttttttttggctataataaaactgatttttccttaactatatagagataataccaaatgtctacatagttctctgccttatttggtgagtgagtttggttcttccttactcgtgggttttgagtagttttccctgtatcagcagctcagatatatcatagccgaggcaaaccaaaatgacaccttaaaccttttgtttcttatttgccttggtaaaaatggttggtagtagttgctcctggtgtgatgttatgctgtaggtgtgacaggatgcatgcgttgttgaacaaatacatttaatgagcacctttgtgcaggttacttgcgttgggcacattgaaggtgcaaagacgtggaagacatggttcttactcataagtttcttattctttagctaagaagaaacaatatgtctccaagtgactagcaaggaagaatgatcacatttagtttgtctggtgataacttcatggaggaggtggaagttgaacttggtcttgaaggatgactagaattctgaatattagagttttgtggggagagcatttcaaattgcagaaatggtatgagcaggaaatagaaattgtttgacgaactggggaagactagcctggttagtctgcagacatcatcactgagagataagttcagaaagattaccatttagaaaagggccatatcatgtagggcctcctaaggcaagttgaagagtttacagacttttaaaaataagtaggtgaggaaaatgagcttcagaggtattaaagaacatgactaaaggcacatagctgagatgatttagaatccgattaaaaatccagtctctctcatagcccatgagaagtctcagctttagtgcagtcctcttagtaggcacagcatgccagtaattggaagttatttgatgtaatgaggtaagataggtatcttcatgggttattcagttgcgtggagaattgtagaacttcataaattgtcctaaacttgctttttagagtttgtgtgtgtttttgaaactctctgactgtaattacttctcacagctgtctgtgggctggcataaagctgtatcttgttcctcccactttactga

SEQ ID NO: 45852 - DNA, 1032 bp, Homo sapiens
attccagaatgaaggagatgccgggggaatcttcttcagcctacccacacctggagcagagccacagttggccctcaagcagccacaacatctgagcaagaaataaaccttcactttaagccactaacatttgaaggtgatttgctactgccacaactaatctagtgaaagctgactagcacattgtgtactctgcttatttgactccctcgttgtctgcctgcaccttgatgttatctctttttttggcgtctgtccatcctaacgtgacgtcacttacaaagttgatgcagttcattgaacttgggatgagggtggaaagattaatgttgtaattcccttggattagagcagtgtttctcagtgtgtggtccttgaaccgtctgtatcagaatcctgtggggtttggcagggatacagaatcttgagcccccactgcaggcctgcgaaaacagaatatttggggtgaggtttcaaggaattctcagatatacccaagtttaggaaacactggacttgaagctagacaaatactacatcaggatgttactttgtgcatcccctccaccactgaaattggaatatgatagacagtgtcccttggtattcttctccgaccagaactcttttttgtgatggatggatggatggatggatggatggttgattgcttctagattagggaactaaacattggtcatctttatgagaaaattttagccagatttgattcaagaactacataacacttgacaagtaaaatgaatgagtacctcaactgatatactttttccatactactctttttttttcttataaaaattaaattttagttacataattaattcatgagtacattctcatagaaatttaaagcattactgatgaggtcaaattcagcattgaacccctccccaaatcttgggcccctcatatccactgtgccacaggtatcttggttttttattttttccagatttttttctatgcatgtttatgtgccgtgttaatatttatggctaatacagatgg

SEQ ID NO: 45853 - DNA, 1050 bp, Homo sapiens
gtgggggaggaaatgagatgggagaaatataattttaaactataaaaattccagtgaagtataatgcttaattgttagcatattctaagcaatgagttagccgcatttaaaaatagctttttaacatgaatgaacctttttatgagccgagattcagtgaagaataagttggtcatgcaaatggtgttttaatagtttatattaaatattttagggctgggatttaaacaaataacattttagagctgtaaaagcaaaaagtctgacctgaaggccacacaaataattatagttcctgaaatatagccctgtgaacaaatctatgccaccttgtttataatctacttcctttgagtttcaaaataagtaaaagggtggcttggatgtaaaaaggaggccactggctttgagcgagttgagagcagtggtagacgcaggatcttttgtgcctctctggggaaaattaggcagttcggaaccactcaggacattccagcagctttggagatcaaggaaggcctctccataaagaagtcaagagtagctggttgttcatgagaccacactttaaggagataatcattgcctctcttgtgaattggttctgaggcaacacaatctttgaagtaaaaaaaaaaaatgctccaggttttaaggagtaaagcattagttttgtgcaaaaaaaagtcattaaggttattagttttgtgtaacaagagttattaatggccaggcaatgtagctcacacctgtaatcccagcactttgggaggcctaggtgggaggatcactcgagcccatgagtttgagaccagtttgggcaacatagtgagactccacctctacaaaaaaaagttaaaacaattagccaggcatggtggcacatgtagtcccagctactgggatggctgaggtgggaggtcacatgagtctgggaactccaggctgcattgagccatgatcacaccattgtgctctagacttggttacagagcaacactctcaaaaacagaaacaaacaaacaaaaaaaacccgagttattcattaga

SEQ ID NO: 45854 - DNA, 1035 bp, Homo sapiens
tgaaagcaagtcattctgcttttaattacagtgtataaaaattaaaacatgggccgagggtctagttggatatacttcttggcaacagacattttggaagcctgcaatgaaaaatacaacaaagatggctatgtgctggccgccccccagtgtcttggtggtttcccgtttagtgactgtattcagttattgtgaaatcacagaattttaaagcaggaaaaagacctcagaagtctcttcttacccattcgtcctccagatgagaaaataagcccacagtggtaaagggattatagtgaggtcatatagcgaactccagaaggaacacaggcatctggactcctgtctggctttctttgagactgaactgcttcactgctgcctggaagctcttctgtggttgtggcttcttgctggccttagtgtagtgataagggggtgggaatgagggtagagggtaggagagaggaagggagagaggttgaaagagagaatgagtcattgtcattgagagggattgagagacagagaagatgatagagaaagacgtatgtctgctttgctgcttctcagaagtggtaccaataaagcagtgctctgaagcagtgtctgctgcatcagtgagctgcggagcctggcagtggttgaggtgtgggaacattctatacctgccactggctcctcctcattcctgcgctgtaaaccccatgttgaggttactgtgtctgtgtttattgcctctagtccagtccaaccatagatgtagccatctcaggttatggagagatgttaaggagaggaggggcaaattgaaaggtgcatgttttagaatttgttaattttcagattttttgaatcttagcaaaaggatttcctgagtataacctcacgtttccctttctacttccaaatctgaacaaaatcctgtgaccttccttgcttactcagagctggacatagtaagagaagtcatcatgcaaaatgattttctggaagtattttgaatgttttagttattctttcccagttcactca

SEQ ID NO: 45855 - DNA, 1046 bp, Homo sapiens
aaataaatgtcttttgggtatgaattgtgtctgctcatcttgttcaacctcagggagtccctagttctgttaatagttatgcaatatgcatggatctgaggtacactctgtccacatgttttcagtaactgatgacttctttagctctcatctgaggcacagattccccaccgtccattaagcatgtataagatcacattttccaagaatttattcagtcaactaaatgttcattgcatgcattaaacacaaaaggccccatgtttccaggtagcaaccacagggcaacagatgggtaataagagtaagaatttaaagaaaccggtgtccttggatcttgtgtggatgaccagttgtttcccagacattactgtggaaatcacctggggacattgttgaagtgaagattctgattctttagttctggagtggggcctgagatctgcatgtttaacaagctactaggtgatgctacggatgctggctgatatggtttggctgtgtccccacccaaatctggtcttgagttgtagctcccataatccccacgtgtcatgggagggacctggtgggaggtaattgaatcatgggggtgggtttttccctgctgtttctattgatggtgaataagtctcacgagatctgatggttttataaaaggcagttcccctgcacatgctctcttgcctgccactatgtaagatgtgcctttggccgtttgctttcctccatggttgtgaggccttcctagtcaagctgagctgtgcatcaattaaacctctttcctttagaaattactgagtcccgggcatgtctttaatagcagcctgagaacagactaatacactggtgcacctcattttgagtagaaagagatcttagggtaatacttcctggtttatttttcctccttagattttgcttctgctcttcctctacttctctattattgccacattgggccttttccagctggaactttcagactcagaacaacaatatattgttgtagcatttgttgatagcatttcagtatctccgctttc

SEQ ID NO: 45856 - DNA, 1033 bp, Homo sapiens
agcatttagcactgtgtttgcgcgtggcaggtgctcagagaatgtgtgcgcttagttccttcttactcattacatcactttgtataagagatttgagcacctttgaatccccaaatctatgaccaatccccacttatgccccactttaccgatggacgactatatgtggtgctttggcccagggtcctcattcaatatgtttctttagcgaatgagttaaaccccataggctgttacatagctaagtacaggaaccctattaagaatatacggcagagtaggtgctctgatatttagcttcgtctaacggcagaatagaatttcctgagtcagcaggatttctggcctgatcacttttttgctattggcttcacagtggcttcatctcctgttttggagacagggaattttccccattccctgggctgcttttagagcttcaggtgtgtgactttcattaatagctctcttgcaaatggcaatctaggacataaaagataagagtaatgtgttactatggatttcctcacccagctctttcccttctggcagagacttctgatagaagtagataaaggcttaggctgtgttcaccgggtgtgatgtagcagtctcagagatctgtttcattcattcttttgattgtatcaggttttttttctctctcttttttttttttcagacagagccttgctctgtcagcaaggccggaatgcaggggcatgattctagctcactgcagcctcgaactcctgggctcaagttatcctcccacctcagcctcccaagtagctgggaccacaggcacacactaacatgcctggctaatttttgtattttaactttttgtagggatggggtcccaccatcttgcccaggctggtctcaaaccactggcttgaagtgatcctctcaccttggcctcccaaagtgctgggattacaggtgtgagtcactgtgccaagtcatattttttcattttgggtgcaattcttcctaccttctcggtgtggcttgtatatcagttgttggc

SEQ ID NO: 45857 - DNA, 1079 bp, Homo sapiens
ttttgtaataccacatacatttaagacatggaaatttacaagggttgccttttgtttttattttattttagctgccttcctatttcaaggaaagacgccaaggtaattttgacccagaggagcaatgatgtagccacctcctaaccttcccttcttgaacccccaggtaagtgagcattttcactcaagaaacaaacctttgcatggtctgctttgtgttcaatattctggatgtgtttgaaatgtatgaaatttcattctactgtcaatagcttgattagtaacaagttattacttcaagagaatgatacttcttccaaaataatacaattacttggctccattgaatccttttcattcactttttaaaggctgtaacatctacatctacatctaactttcccaactttttaaggatttatctcttctcagagtggcaagtgacttaaaccaatcatagagctggaagagctacatctttttgaaacagttcgcttacatagggacatttgttctcccattggaaattgggacagaatactgagctttttaaaatagtcaccctgtcatcaaataggtactctaattttgactttgctagaaaataattatttaaataccatggttttggaaattgaagaatgagctttctttctgacatatggtgtcttagagggacactgtctagagctctttgagaatagtgcccttacggattggaagcttggttttagtccggggacaaatgaaaatctctggaatgttgttttagttctgctcttgtaaccagtaattttgagtttctatgcaataagatgttttattacatctgataagactaaacttaaaaaatacaaaataaaacaagtactgtaaaatatcattaatgttgacatgcgatggtatgaaacaggaagctgtatatatggttccaagcttcagcagagagtcttttttttttctagaagtaattcaataggcataaaaatgaaaataggtaagctgcactcagcatatacatatcttcagaaagcccccttcaccttcctccttcatttaacaaatgtctatagaggttt

SEQ ID NO: 45858 - DNA, 1047 bp, Homo sapiens
tcccaatccacaggatcataaagaattaggttaaataacatcatagaggagcaaagcacagtgccaggcatatttcaggaaattgccagctccctagtcccctgtaagctccaaatctatgtggcaaccaagaaaatctgattggattctttatgtattggttgacttggaacttctaggaatttgtctttattctctttatataaaagtcaaggccgggcacagtggctcatgtctgtgatcccaggactttgggaggccaaggcaggtggatcacttgaggtcaggagttcgagaccagcctggccaacatggtgagaccccgtctctactaaaaatataaaacttaggcgggcatggtagcacacacctgtaatcccagctacctgggaggctgagtcgggagaatcgcttgaacctgggaggcgaaggttgcagcgagccgagatagtgcaactgcactcctgcctctcccgcctgggtgatagagtgagactccatgtggggggaaaaaaaaaaaaaaaaaaaaaaaaaaaaaaaaaaaaaaagtcaggtagtggctacaaaataagtagataaaagaaaaattaacactatttaggacttaacaagcggcacttaaatgagccctagcaaggacaatgactcagaaataagttgatttttctgcagatgcttctgaagttctcaagtacttgggggtcaaactggcaaaatttatagaaagattcactaagtcctagaaagccttggagcatgtgagggaggaaggtaaagtagaaatatccgtgcttgcctcattctgggcaagcaaggcggggcactcagtggatattcagagggcctcctccctggagggagaagaagacttgtgcagaagatccaggcaggcccatttctttttctttttctttctttttttttttttttttttttttccctcaagacagggcagcaatctgttgcccaggatggagtgcagtgggttgatcttggctcactacaacctctgcctcccgggttcaagtgattctccgacctcaacct

SEQ ID NO: 45859 - DNA, 1047 bp, Homo sapiens
ctaccatgtgaaaactgcctgtgtgtgcttcaccaacggtttttctgtgacttgctttcaattgcctgccatgacgaaatgaacttctagaaatacctttatgcatttttcccctttgggtcatttctctggagatagtcttttaaaagtggaattattccatctaggaatttgaagttttatgtgctctgggaagatcacaccatttttttatggacagcaaaacaagatatactgttgtagctgggatctttagatgcctctcttgctacctgccccaaagttccctttatccccttctggggaccctggactcccactgcagcctccgctcttaatattctggttctgatcaatgatttctgccttctttctgtaacccagccccaccttatcattcatttttcctcacggattgctgttttccctcatatctgagccccgatcttgatcatctgcctggaccccagcagctctgacactgggttcttccctgaatctcaactcagtatgtgaggatgtgctctctgtccccgacctatgcaagaatattaacctcggcatcaacaccagcgctggtacccctgccgccaccactagcaactcaagtgccaactccaacatgaacgagagccgtctgcctgcctgggtctctggccccaggctcccttcaccccacgagcaccacttctcttccctggccccttggacccagactgcctgccgctggctctcccccatgactcagttcttgttccaactcagagagcccctgggatttgtccacactaaaagctgagctccggctcgtacaatccgtgcagggactaaggagtggcagggatgtttgtgtgctgtttctggaaagaggatgagaaggtgatgtcaaaggtaggggaagaagaaaaaaggcaaaagaagaaaaataaaaggaaaggaagaaggaggagaaccacagggtagaaatgtgggaattgtgttctattattttttgacttcttaagcttgtccaagtgaagccaagcaaagaacataaagcactgtcat

SEQ ID NO: 45860 - DNA, 1335 bp, Homo sapiens
cttggctcactatagccttgacctctcaggctcaagcgattctcccacctcagccatccaaatagctgggaccacaggtgtgcaccaccacgcccggctaattttttgtattttgtctagatataggggctctctatgttgctcagggtggtctcgaattcctggactcaagcagtctgcccacctcagactcccaaagcggtggaattagaggcgtgagcccccatgcttggccttacctttctacttttataattctgtatgttattattttatgaacatgaagaaactttagtaaatgtacttgtttacatagttatgtgaatagattagataaacataaaaggaggagacatacaatgggggaagaagaagaagtcccctgtaagatgtcactgtctgggttccagccctccctcagatgtactttggcttcaatgattggcaacttctacaggggccagtcttttgaactggacaaccttacaagtatatgagtattatttataggtagttgtttacatatgagtcgggaccaaagagaactggatccacgtgaagtcctgtgtgtggctggtccctacctgggcagtctcatttgcacccatagcccccatctatggacaggctgggacagaggcagatgggttagatcacacataacaatagggtctatgtcatatcccaagtgaacttgagccctgtttgggctcaggagatagaagacaaaatctgtctcccacgtctgccatggcatcaagggggaagagtagatggtgcttgagaatggtgtgaaatggttgccatctcaggagtagatggcccggctcacttctggttatctgtcaccctgagcccatgagctgccttttagggtacagattgcctacttgaggaccttggccgctctgtaagcatctgactcatctcagaaatgtcaattcttaaacactgtggcaacaggacctagaatggctgacgcattaaggttttcttcttgtgtcctgttctattattgttttaagacctcagtaaccatttcagcctctttccagcaaacccttctccatagtatttcagtcatggaaggatcatttatgcaggtagtcattccaggagtttttggtcttttctgtctcaaggcattgtgtgttttgttccgggactggtttgggtgggacaaagttagaattgcctgaagatcacacattcagactgttgtgtctgtggagttttaggagtggggggtgacctttctggtctttgcacttccatcctctcccacttccatctggcatcccacgcgttgtcccctgcacttctggaaggcacagg

SEQ ID NO: 45861 - DNA, 1022 bp, Homo sapiens
gcctgggagacggagtgagactctgtctcgaaaaaaaaaaaaatcatcaagacatattcacttttgagtattacaaattaaaccttggggttttaaaaatatacactcctaatctaaaatattgactgctgtatcggcctccttccgagagtcttgcccctttgtctcctgtcttgttgccagacctttcagaacaatgttctggaagtgacgtgctgcaggtctcagagctggctggtggtcggggtcagtactggactgtaggactcctggctctgaccaggacattccccactatgtgttacaggaaccggcagaagctgaaaggtctcagaggaggaggctgctggttccagcaaatgaaggtgatcccactgagagtaagtgttttgctcctggagatgcagcaggaatggagggaatagggacagggtcctaactgctgtccccagaggtcagagggctcttccagagtattccatgctggaagccgtgggtcctgtgctatagaccatctggaccctaaactgtcttctcccatctcttctccccactctacctcatcctctctgcaccctatcattgaccctaatgactctgtccgtcccctcatcctctctcctcctttgttcagggcctgatgtagcccccgcctgcccctgaggacctcctgaggggctggcctgtcctgcacagcaccactaaccccagtgggctaaggagctcttgacctgtgcctcagcccaatttgcagagctgttgtgtaaactacatacgaatgccaaagacttaatgcaaaaaagagtggaaaatatttcactcataatttttgtatattgattgtatattaaattatattttaaatatattcagtaccatacattaaaatgaatgtcacttgtttctgatgttctttaaaataaggctgttggaaaacatagcctcgtgttcctgaccctgtctatctctgaggacggcgaggtgcatcatgttgcacacacgtctcatttaatccctcatcg

SEQ ID NO: 45862 - DNA, 1027 bp, Homo sapiens
atatctcccagccaagtccaggagggcagggccagttcctcccatcttcaggcccagccaggcagggggcagtcggctcctcaactgggtgacaagggtgaggatgagaagtggtcgtgggattttttcagccttggtcagagcagaaccagagattttccaagtgtttgtttttactctagttccccttctcatcccccttcctcagggtgtctctgagttgtaaggccccattctgtccccagccccagggctccttgtccagtgtcccagcccccagcccagccctgcgccccactgtcctctgggaggggggtgcttcatgggcccctcccttcctgctaaggagactgcttcttttttaggtggtggtggggaccctgagcgtgtggacagagtgagttgatttctccaggagctgggggctcaggggttcaggaactgcttcctgggacagcagaacctgggtgggtgggtccccattgtcctcatggctgccctgactctctgaagtggcctgggtgctctgggctgactgtgggggacacatggccattttgagcaccacataggctggtgagccctgctgcagcccaggtgacatcctcaccccacagcctgcaccctagggatggggtgtctgcctgagcacagcactgggggcctggccccagcagcgggtcctggatgtgctgagtctgggctgcctgcggtgacctcactgagagggggtggggatgtcaggtgcagctgcatactgaggaccctgcagcgagccctaggtgtggactcctgagtcggctttttgccttcccaatgtctttttccagagctcacaacgacctggggctgaggacaatgtcctcaatgagatcgtgagtatcttgcagcccacccaggtccctgagcaggaaatggaagtccaggagccagcagagccaacaggtgtcaacatgttgtcccccggggagtcagagcatctgctggtgagtgggggacagatcattttgtttcctggcatgctgct

SEQ ID NO: 45863 - DNA, 1030 bp, Homo sapiens
ctaggcaggcagatcatgaggtcaggagatcgagactagcctggccaatacggtgaaaccctgtctctactaaaaaaatacaaaaattagccaggtgtggtagtgtgtgcctgtaatcccagctactcaggaggctgagccaggagaatctcttgaacccaggaggcggaggttgcagtgagccgagatcacgccactgcactccagcctgggtgacagagtgagactacgtctcaaaaataaaaaataaaataaataaatgtgtggcttatatttcttttggcagtgctggtttaaggtgtgtaaatgcagaattgatgaactgaccaagctaggtagaggagatttccctcttttggttccacacatccctgaaagaggagtcccccagccaccactgccagcttctgggaatcctgtggcatttcattcaccggcttttctctcccctcccaggacaccatatctcagaagacggtagagattgcatctcctgcaaatatggacaggactatagcactcactggaatgacctccttttctgcttgcgctgcaccaggtgtgattcaggtacagaacatatggaccccatgcctaaaggtggaatgcggggtgatgacataaaagttgtagctaaaatgggatcaggagacctagattctggtccaccttggtcttcatcataccatgttccatgattttgtctttgagctttttaataaataaaacaggcccggcacagtggctcatgcctgtaatctcaacactttgggaggcatcacttgagcccaggagtttgaaaccatcctgggcaacatgagaaaccccgtctctacaaaaatataaacattagccgggcatggtggcgcgtgcctgtatttccagctacttaggaagctgaggcagaaggatctcttgagcccaggaggccgaggttgcagggagccgagattgtgccactgcattccagcccaggcaacagagcaaaaccctgtctcaataattaattaaaataataataatacagaaa

SEQ ID NO: 45864 - DNA, 1127 bp, Homo sapiens
cacagaattgtctttacaattacccttccacagcttgcttaaactttcatttttattttatccaacttaaaacaatcctttaaccttttaatctagtaaaaaatatccacattctcatgcctccttataatctttttaccaaaagtatattttactttccttacacaacttgcatgtaaactgttttttcaatagtcttaaatacacattacattgttaattcttagcaaccttttcttttggtgaaaaccttggtaaatttgggattttaattatatactaggtatggagcctacgacctagacagaaatgcaggtaaggtctgacttattctagcatctagctccatgtgtcctaggccttacctagctgcaaagcaggcaagttgtacagctaagagtcatagtggcattttataaagcatttaggaggcctaatcacctttaaattgtacaacatttcttgcataaatttcctttcataaattctttcacaacttacacagacaatctctgacatgccttgactttctgacttgttctaaacatccctctctttaaacaaccagttaatttactttaggacaagaatttaccatacaggagcccttcttgtataaattctcttttctttaaaactttttgcatagctaggggacatggctaatttcacatgtccccaggccgtatctagaatttaacagtccaaaataaattgaacactttttaagtcaaagaagcattttatgacctaaagcatttagcaaacctagtatttgacctgcataatttagaccaactatttacatttttgaagatacttttaccaataatctttaaaattctccttatttttataactttctgtatatctctcttatttcctggtttcttttaccttgttttatatataacctttaaataagctttgaataagacaacaattagttacccttggccaggcgtggtggctcacgcgtgtaatcccagcactttgggaggctgaggcgggcggatcacaaggtcaggagatcaagaccatcctggctgacacggtgaaaccccgtctctactaaaaagtacaaaaaattagccaggcgtggtggtgggcacctgtagtcccaccta

SEQ ID NO: 45865 - DNA, 1215 bp, Homo sapiens
ctaaaaaaaaaatacaaaaaaattagcccggcgtggtggcaggcgcctgtagtcccagctacttgggaggatgaggcaggagaatggcgtgaacccaggaggcggagcttgcagtgagctgagatggcaccactgcactccagcctgggcgacagaacgagactctgtctcaaaaaacaaaaacaacacacacacacaataagcattagcaaatttgtagagaagttggaaccctcgtgccctgttaatgggaatgtaaaatggtgcagccactatggaaaacagtatgatagttcctcaaaagtaaaaacaggattagcagatgatccatcattcccacttctaggtatacgtccaaaagaattgaaagcatggtttcaaacagatatttgtacacccacgtttatagcagtattattcacaatagccaaaaagtggaagaaactcaagttggacagatcaatagataatgtggtatattcatacaatggagtattactcagccttgaaaaggaaggaaatactggcacatgctacacaatggatgaacattaaagacatgctcagtaaaatgccattcataaaaggacaaatgaaataggattccacttgaggtacctaatgtagtcaaattcataaaaaccaacagtagaatgttggatgccagcggttgtaaggagggaagaatgggaagatgaaataacttctgaggatggatagttgtgattattgcacaacaacattaataaatgtagtgtcactgaactatgtattttaaaagattaaaagataagtttcatgttatatataatttaccttagttttagatttaaaaaaacagcatttattttagtcactataacaattacacataaaatggaaatattgttgatttaaaaagccaatgcacaagctgggcacggcggctcacacctgtaatcccagcactttgggagggtgaagcgagcagatcacctgagattgggagttcaagatcaccctaaccaacacggagaaaccccatctctactaataatacaaaattagctgggcattgtgatgcatgcctgtagtcccagctactcgggaagctgaggcaggagaatcgcttgaacctgggaggcagaggttgtggtgagccgagattgtgccatggcactccagcctgggcaacaagagtgaaaatccatctgaaaaaaaaaaagccaatacaca

SEQ ID NO: 45866 - DNA, 1022 bp, Homo sapiens
atcctcccaccttgtcctcccaaagtattgggattacaggcctgagccaccgtgcgcaacctatgattttggtggtggtgttttttgtttttctgttttttaaatattcttgagtatatttgtaagctttagatgacctgttttaagttatttaatctatcaacaccattatatctgttattacggccactgtttctgttgattacattttttttcctgcccatagggactttttttttcatgcatagtaatttcttattgcttgacattgtgaattttgctttcttgggtaccgaacatcactgtgttctttcaaagtctattgggcattattctggtcacagaaaactgaggatcagtttgctcctctgatactagcttttatctacatataactatataccttgtgttcagttgccttattcaggggctcatttagttaactactaaagttatagtggttgacttctgatggtaactcgccagcaccctggcatgcgttctgtccactgtgggaaggggaacatgcagatctcccagccctgagtggtccacaatctagtctctccttccctgggtggcttcttctcaggcacctagagtcagtctcagcagacactggacatgtcttctgcaaggatccagagtcctccaggcagctgcttctcccagtctctgccctgcacttggcctctgggagttcctgcctgtggttctcaacagagactacagagctctacagggtcctctgcccctgctgtagctggaggctgtccttacgcagtgagctgaggccacagctagtctcactgcatgtgcttggcggcggggacaggagtgattcattcatcaggtagaggaggaaccctttactctgggaaaatctgtgcctgggttggggaaggacaaatgagccctgtgtgaatactgactactccctggagcccacagtctggtggagcaggtgacagcagggacctaaataactatcaggaagcatgaggtcccaccactgtcacctc

SEQ ID NO: 45867 - DNA, 1047 bp, Homo sapiens
acagtgagaattaagttagatccgagactgcgaagagcttctctttcaagcgccattacagttgaacgttagtgaatcttgagcctcatttgggctcagggcagagcaggtgtttatctgccccggcatctgccatggcatcaagagggaagagtggacggtgcttgggaatggtgtgaaatggttgccgactcaggcatggatgggcccctctcgcttctggtggtctgtgaactgagtccctgggatgccttttagggcagagattcctgagctgcgttttagggtacagattccctgtttgaggagcttggcccctctgtaagcatctgactcatctcagagatatcaattcttaaacactgtgacaacaggatctaaaatggctgacacatttgtccttgtgtcacgttccattattttatttaaaaacctcagtaatcgttttagcttctttccagcaaactcttctccacagtagcccagtcgtggtaggataaattacggatatagtcattctaggggtttcagtcttttccatctcaaggcattgtgtgttttgttccgggactggtttggctgggacaaagttagaactgcctgaagttcgcacattcagattgttgtgtccatggagttttaggaggggatggcctttccggtcttcgcacttccatcctctcccacttccatctggcgtcccacaccttgtcccctgcacttctggatgacacagggtgctgctgcctcctagtctttgcctttgctgggccttctgtgcaggagacttggtctcaaagctcagagagagccagtccggtcccagctcctttgtcccttcctcagaggccttccttgaagatgcatctagactaccagccttatcagtgtttaagcttattcctttaacataagcttcctgacaacatgaaattgttggggttttttggcgttggttgatttgtttaggttttgctttatacccgggccaaatagcacataacacctggttatatatgaaatactcatatgtttatgaccaaaata

SEQ ID NO: 45868 - DNA, 1049 bp, Homo sapiens
atgtttgggaatttgtttaagatgtgtcttggtgaagatctcttcatatttatctgttaggggttttttgggcttcatgaatgtggatgtccattcccatcctgttttgggacattttctttaattatttctttaattacactttctgttcctttcactttctctgatgctccttggaccaccataatgcatatattgttttgcttcacagtaaccgttggtactgttggctttcttccctctttttcattctttattttttttttcttcctgtgacttggtaatttcaaatgatctgttttcaagctcactgattctttcttccgattaatcaactctgctgttgacattctctgtggaattttcttagttcagatattgtgttgttgttaattttagaatttctgctttcttctttattatgttgtctgtgtatattaaactactcattttgttcatgtattgttttcctgacatgacttagttgtctatccatattctctagtagctgactgagcttctgtaagatgactgttttcaagtctttgtcaggctgttgtaaatgtctattcctttcgggttggttacttgtgcttcattttgtttctttggtgccgtcactgttccctgattgctcaggagcctgtggcaatatgttggaatgtgcactttgaagaagcagggacttaatccagtatttacagactggctttgtcagggaacgcccttcaccagtcagcctgttcacagattctgggcaggccatgtggtgtggttcaagggtggtcagagccagtatccagagaggtgacctgaggcctggctccatgagggctgaactggcactggaataggccttgtacttgggtctgcagatgtcagccaggtgctgtgatgggtctcatccttgggtccacagggaagggcctggagcctgagttcatggggactgacctggcactaggacagatctggaagctgaatctatggaggtgggtcaggatcctgggtctgtagtgctagcccgaaggcacaagctaagactgata

SEQ ID NO: 45869 - DNA, 1075 bp, Homo sapiens
actctgaggctctcaaggactcctgagattggaggctgggaacagctgggccctgctgtgcttcccctccagctctgtgacactggtgtggccccagctcctgcctgtaaagtgaagaggagataaaaatcttcagcagccctgtgtaaacctcagagggctgtgttagcaggtgtgggaggatgaaccacatcctcagggctggtgtcagtcactccggactggatccccagggcacatgtcctccacccagcagaggctgcacctgttcctacttgcacctccataccaggctccctggccttggggcagaagcttctgaagactggggtggagcaccatgtggaggggccatcgaggaacagaggagccagagttcaagtgaggacagcgatggcactgcagggccacagcctggtttacctgccaagtttccagttgtgcttctggtgggtgtccggcccgggttggagtttgaagatgagcaggaaaggtctccatccaggtggctgcagatggctgctcacccagcccctactgagaggccacggtcccagttctggttctctgtcctgtatccaggagtggcagggtagcgaggctctagcttccaggttggggatggagacagtggggacagtgccatgccccgagcctgtgctgttgggcagctggtatcctgctcccagccagagagtgtacatcttcgtgtagtggattttcctaacaaccaggggacatgagggcaggttgttttccctgttttacaggtggcaaaatgagattcaggagcaatgtctccagcatttttgtcctcaccttctgaataatagcagccatatttgggcctctgaagggctagagttctctgaggagctgcttctctgatctctgtcctgcacttggcctctgggagctcctatgggtcctcagcagagtccacagggctcttcggagtcccctccctgtgccacagcctggagcctgtccttaggtggtaagctgaggccgccactgcgctcacctcatgggcttggggggaaagtgagtcacccaggaaatagacaatgagctc

SEQ ID NO: 45870 - DNA, 1092 bp, Homo sapiens
gcgctgcaaatcccagacaaggacagaagaacagggtgaaatcctacagccagacctggctagagccaccacaagccatctgctcatcctcttaccttccctctgtttctttgttttcccttttttgcctggactcttaatctaatccagagcctgctgtctctgtatgtccagggatttttttgctcagacctgaactgggtgggtagagggaagagaagcaggcacacccttggaaaggaagggagacaggcctctaccactaaataaagcaggaagcccccgaggggctacaggcgtggcctagtcattgcccttctccacacttggatgggccatctatacaacctggcctttgcaccacatccctgcttctcaaagtgaggtccttggaccagaggtatctgccaccacctgagagcctgggacctgctcaatcccagggcccgtggcagaccgacacatcagcatctgcatttggcaggattctcaggtgaccgtgtgcacactgcagtgtgagaagccgttgtctagatgatgttgaggctccgctgcagctccggaatgtggtcatcactgttatgggcagaactaacatgtcctggccccttctaagtgtcaggcctagggaaccttcgttctcctagaaaaggacacagaggcttggagttgtctcttgcccaagataatgctaggagttgcagagagcaggaatcccggctcgggcctgtctgactccaaactacatgctctttcttttttgtctgctgactcttcatcagaaatctatctttggcttttttttttttttttttttcatatcgcagctgatgacctagtcacattcaaatcagttttgggatagttgttccactagtctcacaagaaaggactatggtagaattcaggggtgctgattttccattcaaacaattgaatattctgaacgtcctaattagcccaagaaggtgtggtctttatagagaagcaggctagtcttcttcaggttgtaagtcagtagagttaaagtcatgacggttttggtgcttggctcccttcggggaacgtgtgggtggaagccctgggcggcgg

SEQ ID NO: 45871 - DNA, 1032 bp, Homo sapiens
aggcaggtcaatcacttgaggtcaggagttagagaccagcctgaccaacatggtgaaaccccatgtctactaaaaatacacacacacacacacacacacacacacacacacacacacacacacacaaattagctgagcgtggtgacgcacgcctgtaatcccagctactcaggaagctgaggcaggagaatggcttgaagccaggaggtggaggtttcagtgagccgagattgcatcactgcactccagcctgggcaacaagagtgaaactctgtcttaaaaaatatatgtaataacaataataataataaagtaagcaaaagaaaaggaaagggatgaagttagcacactgtggttgacagaataattttacatcctagaaaatagattaaatgaaattacacttttcaatgtaaaaacgttgtgtttcctgggaaaaaggcagatgcgtcctaaccactcctgattgcatacatatgcaatttacaattgtactttctgagcagatttggaactctcctggggcttagctgacttggtctgggtctggtctcagcacccctgctaaagcctcctagggaaggtgctcgggttgacagctctctgggcctctggttccatgtctgtaaacaagatgcttggagcacaatttctcaagttacctggcggctctttagatcttaaccctttaaatctctagaattttagggtttcaaccccattggtatagcttggccctgaagagagcaagcgcacattgccgtgtgagagacagaccactaaggggcgctgcttcctcggaggaggcgggagttctcctcctcctccgcattctctcctctgatgaaaccacactcatcaaaagtggttgtgacagaatgctcagatttggaatgatgagaaacacggaagccacatcataggacctgatagatatctggccaacacaggaacactggaatatgtgatctatgtgaccatccccttcccaaggccagatcgaacacccaccccttgacatataccaacgtt

SEQ ID NO: 45872 - DNA, 1052 bp, Homo sapiens
tttctgcttaatcgtgcctcagtttcttccagcttccaattggtgtttcccccaccccccttaattaaaagtcatctcagcttttaatcgtactgggagaccccatgcacagcctgccgagtcctcttcctaaccgcattgactgaggctgttgctggcagcaccactgtaaatccagaagggaagagtctgcatccaatacaggaaataaattcacattttgaaggaaaaaattcgacaatttaagccaaaatctaaaaaggacaattggattggcatatgtgagattggtgttttttcacctatttatttagttgagaagtttggggaattctcgtacagtttttttaggtggagtttgttttgtgcgagtgtctgtgtgtgctgttccctaactccagaacagttaaattcctgtagttggtagcagattagtacccagaagtggggttgttgctataacagataactgaggatattataaaagtggctttggaactaggtactgggcagaggctgggagagtttggagaaacaggagagaaaaggcctgtattgccatgaactgagcattaggggcagttctgctgagggatcagaagagaagaccaagggaattctgtcccagttgtggctcaaactgcctcaggtgcagcttaacctgcgtctctggaaggtaaaatgcatctgatccttgaggcaagagctgtgggggcatggctccctcacctggatttcaaagcgtgttaccagcagcctggggacccaggctctgcctctggatttacctgcatcgtatttgcgcttcgtggtcaaagttgttaagaaaggggtgagcttctggctacctaataagttggtcttggccacctgcctgcgacacttcctggaggagccatggattattggtggaggctgcagggagctggcgatggagccactggtgtcagcagcagagagggaagaaaggaaaggaaggggccacaaatggttgaagtgggcaggtgggcacccagggagttaggggaccccgccttccagctctgggcata

SEQ ID NO: 45873 - DNA, 1050 bp, Homo sapiens
caatcagacttcatccctttctctgagtctcaagaattcatcctacctcgccaatgcatttatcatgttctgctttttctgttgctttttaaaaatcccctttcattgtaagtcacttaagtgcagacactgtatcttactaattattgtatcttattacttgcttagcacagtgcttggcaaaaaataaacctctaataaatatttagagtcatagaatatcagagctgaagagaaccttcctaccatctcattttataataaactgaggtacaaagaggttggaacctgttcagtattcattcaaggagtacatggtgaaatgccagctggaaaagaaacctatctcagggatatatgacattatgccgagaccgggttcatgcactgattgatttgacaggtgaactgctccatgttgtgggaccagggatgtgaagcaagtacatcaaccttgaaacgcgcgcagttggtttgggagagccggcctgaggaagcccctgccccaaggctgcccacagagggaaggattgtgtgtgtgtgtgtgtgtgtgccatcttgacagagtgagtcagtctgacttgcctttgtgcttgccgtttgtaggtatcagtgcttcaaatcggcctggatgtttgaggtgtttcataggggcttttcgtttcctgtcaactataaaagcttaaagactgccttgcaagtttacgacaaggaggttcagtggacccttggagccatcctctacaggacccgctttctaccattaaggtagggctgtgaatttgggaacgagaatcaaaaagatgcttttctgcagttacagcacctcatggcagctgtggtctgtggctgtttggggcattgctgttagagccggccacggcagaattgtagggacagtgacgtttgcttttggtcttgccccctccccacaagtgcttcctcccttctcaccctaccatcccgtaatacacagcactcctgtcctactgccctgtgtttggttattctcaactgtctgttccccagccccggcaaaagggtcagttc

SEQ ID NO: 45874 - DNA, 1094 bp, Homo sapiens
agcagacgatgaggtcagagccttaacaggtgttagatcctgtagggctttgtagattggagtctttggaggatttctgagtacagaagtaatctgatcggggtcctgagcaaggggtgggagtgtggagctatcaatttccaagaaagtatcattgcccgagggtgataaaggcgaggtcactggttgagactgccggtagaagactagttaggctgctctttagagcaggcaagagataagagcctgatctcaggcaaagatgataaggaaagggattttagataagctgaggttaaagaaattaaaggaatctgtaagaaattacatttggggccaggcacagtggctcacgcctgtaatcccagcactttgggaggctgaggccggcagatcaccgggtcaggggctcgagaccagcctggccaacgtggcgaaaccccgtctctactaaaagtacaaaaattcactgggagtggtgacgggcgcctgtagtcccagctactcgggaggctgaggcaggagaatcgctttaacctgggaggaggttgcagtgagctgagattgtgccattgcactccaccagcctgggcgacaagagcaagactctgtctcaaaaaaaaaaaaaaaagaaaagaaaaaaagaaattacatttggaagatgaaggaagagggatcacacgtgaatctggtttccgatttgtgtagcttggtgggatcaagattgggactgcgggggcagagcagattaggagaaaaaggggagaagattgcagttgttaggggtgcagttttagaattttctcatggttctgtgcaacattcagatagagatggctcataggctgttgaaaaagtgtagaagagaagcctggggtggagaaagaaaaatttgagttacctgatcattgaagcctcagtaatgattgtagttagaagagaatgaggctagacagagagcctggaaacataagagtagtcggggttggcagagaacaacgcttaaaggatcctgagcagcagttattccagagctcagaagcagaccagacgagacagctgtcttgagaggtcaagcagctttgtgagaccga

SEQ ID NO: 45875 - DNA, 1027 bp, Homo sapiens
gagtcactcctggttccaagctgatcttgactggggagatggggtgttgggtgcaaggtgtttttccttcttctctaggtggccatcctgggtttctgtgctctgcaggatttgtgttgcttctttgctattgtccacatctttcctttagttgttttggttgaaatggcattttaaaaaattatgtatttatttctgtgggagcttctagttgactgtcttcctctgaagctacaaaatatttcttttaacctaattgcagttttgtagtttatacttataactgggatattttctcctctgtttagttttgtatctccaaacctgtattcctttcctgttcttgtggagttgtggtcacaatgatcttagtgccattctgtgtaggtgatagagagctgagatgcagaaagaagggaagaaaggaagtccttgtaggaaggatttgaaaggtttgatgagacactaggaggaatgtgagttcagaaaagggactgctctgggattgtcttagcataatggtgactgcattgtaaattgaagacatggtattgcttatgattcaatagttatgaccttggaaaacacagtgatgttggaagaaggttgtctggtgcaacaagaggaggctgttgaaagatagagcaacacctcagagacagactctggtcgaggggtccagctgtaacaagattggtttaaggaacatttaaatgctccccagtgataaaatccctagttcttcagaaatatcacagtgaccttcaatagttcattttcattttaaaagaggaaaggatctccacttacaatcttacatagcaatgtattggagaataacattggtcaaatactggatcaaacaggctggggtttgaacctatgttttcatcattaaagtaaaataagacccccatagactggttaaatttatattttgattacagctgaagtcagtactcactgtaaatattatacataataaataagttattatttgataataacatgaactattatttgatgc

SEQ ID NO: 45876 - DNA, 1052 bp, Homo sapiens
tcctgagctcatgatttagtgtgttgttaagcgtaattctgttgcctcaagtaaataccacttaatgctacacatttttaaacctttaaaagctacagacacaagtaatgaaattatgagtcacttaaggggggaggtaatatgcttgtatgttacattgacattgctctgcatgtctctactgggagatatttggatttcaatgatagcttgactggttggacattgcatcaaatacacgccccatgtatcctttctgtcgtaaagttaagaacgctcttgcatttgatgtggaataaatatagatgatattactatctgctattctgcctttgttctgaaacaattgctttgtcagctaatttcattcaatatttgttttttagacgatctctataagttattaatttaacctgaaaccaaagtggtctccatttaaagttacttaatccctttgtaccacctatttctagttaaatatatgttgctatgcaaataggtaaagtgcttccttgccatgatggtaatggattggaactatgaaggctctcagtgtattggcttctgtaaagatgaggcgtctcctcagaaacaaaacttttcacatttctgcttactagacctgggttgatgtacatggtaagtctcaaacagatgcaagctatgtgcaaaaagtaactttagccaaatggaaatagctggatgctttgagaattacttggttgaagtaagaaaactgtaccatcctctatcctgtgtgccataataaaatagtaaaaaacctaaattgagcttaaagtcttttttaacatttccccaaatttggtactgtggtcagtgccccttttaacctgcagttctctttcagtattccctctcctaatgaatgatcccctctctataatcatctgattccattaaatggactccttaaatgacatcctacctcccattacctctcctctgcccctctacactaacctatcacagagttatagtgagaacacctccatgtcttagatccttccacatctttcaatgtcttaaatcct

SEQ ID NO: 45877 - DNA, 1046 bp, Homo sapiens
aggacctcaatgaccgcttcgccagcttcatcgagcgcgtgcacgagctggagcagcagaacaaggtcctggaagccgagctgctggtgctgcgccagaagcactccgagccatcccgcttccgggcgctgtacgagcaggagatccgcgacctgcgcctggcggcggaagatgccaccaacgagaagcaggcgctccagggcgagcgcgaagggctggaggagaccctgcgcaacctgcaggcgcgctatgaagaggaggtgctgagccgcgaggacgccgagggccggctgatggaagcgcgcaaaggcgccgacgaggcggcgctcgctcgcgccgagctcgagaagcgcatcgacagcttgatggacgaaatctcttttctgaagaaagtgcacgaagaggagatcgccgaactgcaggcgcagatccagtacgcgcagatctccgtggagatggacgtgaccaagcccgacctttccgccgcgctcaaggacatccgcgcgcagtacgagaagctggccgccaagaacatgcagaacgctgaggaatggttcaagagccgcttcaccgtgctgaccgagagcgccgccaagaacaccgacgccgtgcgcgccgccaaggacgaggtgtccgagagccgtcgtctgctcaaggccaagaccctggaaatcgaagcatgccggggcatgaatgaagcgctggagaagcagctgcaggagctggaggacaagcagaacgccgacatcagcgctatgcaggtgcggcacggccagaaacacaggggggcgggggactcgagcaagggggggagttggtgcgcccagaaagtggagaccaggggtggtgcggctgcacgcagctcttagggatagggcttggctccttggccactgtgtgggaggggtggggcacttgaagggcgtgagtgcgggcgccactgtagtctgggagtgtgctccgtgctgctgcaccggcgttccgcattaaagctgcccagcccttgttgggtgggggaggggaagacgtgggaattgggcgttgcc

SEQ ID NO: 45878 - DNA, 1056 bp, Homo sapiens
atttaatcccaactgttagaaataacctacaagaaatccagtgaggcctacctacccagagataagtgattcacctgacaatatgcatcacaagtcttaactctcatttcattagtcctatccagagaccacattttctacttaagcaatacttagaggcacatctctcagcaaacacaaaccaattggacaatttaaactagcactattcaaccataatgaactctggttgaaaaacagtctgtccctacttgcatattgtagtgagatgagattccactcttcatgtcagaatggcacttacatgagtcaaagtgtctaaatgaaataatttaaatggaacaaagtcaaatacttacattttatttttaaattctcctctatttgcagttatactttaaagtgtactcccttctctatcctatcatgaggactggacagcctccacagagatggctggacaaagcaagggaatttacttaggtaagacaccatttctctttactctgaaatccctgcaaatgtagttattccagaggagactgtgcaatgactgatgggtttagcatcctacatgaggggaaattgccattcccagctgtaaaatgaacaaatatccagttattttttttagccatcttacagcttagctaatataacaggatttacagccaattatacatgaaagtttaattctgtgtcagataaagcatatctttgatgcagaaatagaggcagcattaggccttacctggttaaaagctttttgctttctattcattcattcgttcattcattcattcaaacctatacttactgaatgctcactaaatgccgggggtttattaagagagatttaaataagatgggatctttgactattacaggtttcagcctaggggtaaattaggggaagacaaccatgtattcaaataaatgtaattaagagtaatggttgtgtgtgtattttacatgcttgtcctgtgtaaataacacgtccacggttgcacctctggggtggaacatctataaaatttagataatgatacccacttt

SEQ ID NO: 45879 - DNA, 1047 bp, Homo sapiens
aataaagatagaagaacatcttaatttagggtggtgtatcatcagttttccggaaattaactgagttttattgtataagaacattttcctaatctgccccagaaatcattttgagcagaaatagataaggcctgaaatttccacatgaattacatgaatattgttttcatcttgcagaattgtgatctgtctgggtgtgatcttcaagaagccaacctgagagggtccaacgtgaagggagctatatttgaagagatgctgacaccactacacatgtcacaaagtgtcagatgagaattttaggggctggaggaagatgtaaaagatgaaaatgttttccttatcacttttctttctccacccactcagttgtctagaagaaataacactgtaaggaaatttaaaaaaaaaacatttagaggattatgcttgttttgagtggtgcataagggaaaaaactgactttttttccatattctgatttttaacagaaaagcactcatttaatagatgtagggaaactagatattgctgccttttgaatggggtaggggggtttacctggttttatgaccaggcatagtatctattatatttgcttttaaataggcatgatgtggaaataccatcttggtttgagatgcatttgaggattttaatttatggaaagcacaacatatgcaattatatttattgaattcctagatgcagtatggatatttaaattgttaaaactttatgaaaacttggaaaaggttgttcaggtttataaatagctttagtgatgcctcccctctttaaatacctgtcacaccgtatgaatatggtgagatcagactccctaagactcttttcaggttcatttttataatgtttactttttaggacagaacagtagctaaattaaagtaatatccagttcttactgattgagacagagtggaaagaaagacatcattgtacatcactgtcattccaaaggtacagtgtaactctggatggaggaataacttacctatcactacaacacttacaaatgagaatttc

SEQ ID NO: 45880 - DNA, 1044 bp, Homo sapiens
gatttttttccccacatttcaaaagtactttcatgtgcaagatcttatttttgaatttaaattcaaagacagttaagttcaaggggttaaacaaagcattggaaacttagcttctttgcagtctagattgatagcaaaacctattgtctatataattgtaaggaatagttcctataagcaacagataattaatgtgatttttagattttgatggtagctttttaaattttgatttccccagggatgatgatgttttgtttgtttgtgaaggagagccatttattggtaagtgactttaaaagccaattttatctgccaaaaaaaaaaaaaaaagatggaatgacaattattttaaatggggctattaagcttaaacattaaaaatgatcttatggctgtattcaaatcttcacactttttgattctgcattgggtatgttaaagtaaattttttactatatgatcgtagtttattatagatgcatgttttacatgccgttaaaatgctctggaggtatacatattcattaactgtaacatagtaaggtagttttgatcttagaaacaattgttttgtttgaaaattttttctttgatggtgaatgtcaaaatttttctacgtgttgtattacatatttgtgagtaaatattgcttgcgtaagtagtgtttgacagtatttcacagtgatcagatcagccaaaaaatgacttggtatcaaccacacacacaggtgtgcacacacactaccctttgatttggaagaaagcttatagttgtatatctcaaaagaaaaggccgaaaggaagataaagtatttgatttatttagatccatacagtccacactctgaatatttaagtattttttaaagcatcatactaattgcatttggtgagtggaagtagttctcacgattgttgcacaggcaattgtcaacttagaagtaagtgcatactcttgtctgtctgtctctaccttaaaactgtaagcaagaacttctcatcttcttttatccattggcctaacagtgactggcaggcaat

SEQ ID NO: 45881 - DNA, 1095 bp, Homo sapiens
aactcataggcagctttcacttgtcatgggatctgaaatttaaaaataattgactctgaaaagtagtataatacagacatcatgaactttaatagacatgcttctcaataaatgtaaaatgcttctattcttagggcctaagttgttaaggtagataatcccagtgacatggaaacatcaggccacatggtggagataacacatacaaagtaaatgacctttgtaagcactatcattttatgatttatttggctcagtatgaggacaaaaacaatcttagtatatactaactggagcttatgtccatgatatacaagatttttattgctcctctttctcaaaagagttatataaagaagaatgcatgtgccagtctgtttgcaactttctccgtaacttaatcatcttttccatatgtatgacaaatttatgttgatatatatattttaaaacctggtttctaattagtttaaaatacagagtttttgcatatttgaatattagtattgcaacataactcctttttatttgtatggtattgttagtatgtgcgaatgattagttggaaaacaaacgtcaagaatagccctccaagtgaaaacaagtatattggcccaacttaagggaaattttcaaatttctagaactataagattcttcgtattaattttaattctgttttctctaattgaccaccctttggttatttcacttaaaggaaattgttaactgcctgattgcaaactgctaaaataattttatttatagaactagtatctggagctatggagaccttaaaataaattaaaacttccccccttattacaaaagtaatataggttcattgtaacaaatttggaaaacaaacaaaataaagcaaaaaacttagcagggtgtggtggctcatgcctgtaatcccagcacttgggaggctgaggcggttggatcacgaggtcaagagattgacaccctcctggccaacatggtgaaaccccgtctctactaaaaatacaaaaattagctgggcgtggtggcacggttttaccatgttggccaggctggtcttgaactcctgacctcaggtgatccacccac

SEQ ID NO: 45882 - DNA, 1022 bp, Homo sapiens
gtagaggggctgggaggtgggcgtgcgcgggctgggggcgctcggggacagcacagggtccccgcggcctcctcccgaccctcaggacccccgtgcccgagcctgcccttcagtgcctcagctgcctgggggccggcgcggttcggcccgggggctccgggtctcccggatgcttggtgcggggggcgcggggacgggggcgcggggagggccgcggtcacctgggcgcccgggcggtcgcgcctcttcccgcctctccccgagaccccgctcccgcctgcgggaggaggcgcgccggctccggtgctgagtaatgatctgctcggaaagtggcggcgagcaccagagcctgtggagatgggtcagggagacagaagtaaactgcccgtggataaacaaaatctcccatccgaggtcgcagacaggatttttaaaatgggggcattttcttgttgatttttgccctcctctctgagatgcctcaagcccccacgccccgccgccgccaaacttctctgtactctttttattattttgccttattttgattccctagaggacgggtacagcagacccaaaagggatcgatttgacagtcgcctttgctgtgttaggcctttgcggagagtgtggtgctcagtgttcttccagcgctggagcaagccaaaacgaattctcttccttcccagccttttgccccacccatgaaagttgttctgctcctttgggaaattttcactgttcgaggcagacatttattgcgttgctaaatgatacctagaagtaactcagcctttacgagtctaaggtaaaggtaaatgggtctcgctgtgttggttgccaaaatactctgctgcctgcacattcggggaacactgtaaatttttaaatagtgaaattgtccagtggcattaaaaatggctttccgattattcagtgtagagtaaacatgctccgaaaattcgaaccagagtgtggtttgttggctataattttatgttcttttggtcttagagatttaa

SEQ ID NO: 45883 - DNA, 1072 bp, Homo sapiens
taatttttgtgttttttgtagagacagggttttgctatgttgcccaggctggtctcgaacccctgggctcaagtgattcactcgccttggcttcgcaaattgttgggattacaggtgtgagccaccacacctggccagacagacacatttctaatgaaagaaaaatcattccaggagtcaggctggggaagccttcagtgctgagttggttccaggttgcatgcaagcccaggatgggcctgctggaagggcatcttgatggggatttgaagggttcgagggaaggggttggagctttttgaaaacacacctggcgcatctgccaggcctgtgagaaagcaagaagaagcgcccggtgtgggagagaagggaaccaagggcagaaagatctgccggatgggaatggagaaaggaagtgaggccccgttgggactgactggcgtccacagggtggttggatcatgtgagaggcctcgtgcctgttgctgcaacatgctggatgcgacaactgcagaagaacgatggggcaaatgaatggctctgacaaagacacctcgtacacacagctgggcacgagccattagtcgggtttactaaacgacgtgagagcaaagggcacggctactcatgtcttggaaaagagccaagctccatccagcaaccccttatgatttttaaacccccagctcttatataaaactttttaatggcaccaccatctattttccttaaataaaaaatgttgaatgtttctctcacacccgttggagagggaaacgagagtttaaattaactccaaatggtaaaaatttaatacagctccagctgcctgcaggtttcttcagttcacatctttcagtgtgagagctgctccagctgctctgtgatctcatctaccatttgaaatccggagtgctactgagcagcagttttaaagcacataatggaaatcacttgacttatggcctctctgatcagcaggtgagtccattatctgatgataaaacaaaccagatagtcctagttaagaaatcataattatctatttggagtcagaaaaaaaaaaaaaaac

SEQ ID NO: 45884 - DNA, 1050 bp, Homo sapiens
gcaaacaaataacactcctgatagggccgggtgacatgtgtcaacccttgtcattgagaaacaagaaaggcaatgtgcccagacaaagggtagggtggaatccctacacactggcagaacctgacccacgcgcaagggctttgtgtagcagatgccgtttctcattgttctgtgcctccctccccagtacccctgacaacagccactgccgctggcattccaccctgacatctgttcagctttattgatgcggccctggaggaattcccagtgtaaacagggaattctctaagggaaccccatgttgtaaagggatgagctgcataatgcaaagatttaaccactatttaaaggtgtgacacttgattgaaagtgacttgcttttccccccctttccaatcccacctccctctccatccttaactgtatttggcaccaactggctgcagcaacacccccacttccccctccatcgctttgttttcctgatgcataactgttaggaagaatgaaggatggggggccttgggtaccaccatccaaaaaagccacttaaaaaaaatttctgggttacagtcaattgagtctagttgtcgcgttgggatcctgcccgctgcccacccacactcctggcgagaaacagcttgcaagtcgcttggtcctgtggctgaagctaatggggtgggcttggtgctccttgctagaagcaactgcggcagttcgcagtccctgagcaaagcctggtggtactagttctggcagtgctagaacgtaggggatttgcctttgggattttgtgtttttggcaatggcgccgtaggatattaataaggattttttcaaaaagcagacctgatgggatacgggatgcatacgtcattgccccggcaaacgtacgtgtgctctaaggcacctctgaagtgtcacactctcactcaacttcctggccgatgttcaagtacagggagtgtcgtgcgagctccagccatgcacattgtgtcactttggttgagcatgcagagaccggtgaatagggccctatgcagcagg

SEQ ID NO: 45885 - DNA, 1030 bp, Homo sapiens
ccgcctcccgcagccagggccgtagtaacccattcatggggcccgcgcgcggctgcagccgggctccgtggcgctcgcagccaccgcctcctctcggctccaggtcttccccttctttttacaactgatcctgttggggattttttttttttctaaattggaacggtggggaggagcagggaggggggacctggaggaaggggagagattaggcagccatcaatttcctccagtttctcccagaacaggtgatgcttctaaattgtgatcactttcaggaggcagcactgcagctggaaggatgcgagcgacctagggtggagtggctgaggcggcagatctgaacttgcggaggataagaacccaaactttgactacatcagtccgcacctcgccagtgaagcaaaggacgggttatcttttttttttttctaagactcaaacttgggcacttgatcccttttcttggattgctttggaggagacgatttgctggcaacgttgggaacagtcaggactgtgttgtaactcttacttttaaagcgacagtagaggatcagactttttaaatgtttggaattcaagatactttaggaagaggaccaactctgaaagagaaatcgctgggcgcggagatggattcggtcaggtcctgggtccggaatgtcggagtggtggacgctaatgtcgccgcgcagaggtaacgacacggccgcgcaattattatgctgtctctcgctcttacggtctgtctctccgtgtgcaccccccccgcgcaccccgtgcctttctctctccctgtccccccatctgtcgcccaggccctgcgcgctggggctcgccctcgggcaagcagatcgctgcagtcaggcgaacgctcacccggcagccggcactcgagttcctgaactgcctgggtcgtaggcgtttctctccctctcctttaccacagtccactctttgcaaggaaaaataaagtagcccccaacatctcccagctcagcccctagtcctgcaagccgagccggcc

SEQ ID NO: 45886 - DNA, 1469 bp, Homo sapiens
ctttaatgtatgggactgaaatcaaaccatgaaagccaattattgaccttccttccttccttccttccctcccttcctccttctctccttctctcctcctctctcctctcctctcctctctttccttccttccttccttttttctttttctctttcttctttatttcttgggtctcactctcatcacccaggctagagtgcagtggcacaaaaatctcggctcactgcagccttgacttcccaggctcaggctcaggtgatcctcacaccttagcctcccaagtacctgggactacaggcacgcaccaccatgcctagctattcttttgtatttttggtagagacagggttttgctgtgttgctcaggctggtctggaacccctaggctcaaatgatgtgcccaactcggcctcccaaagtgctgggattacaggcatgaaccgccatgcctggcccttgatttttctttttaagaaaaaaatatctaggagtttcttagaccctatgtagattattaatgaacaaaagattaaactccaaatattaaatagtaagcctgaaggaatctgaaacacttgtacttccaattttctttaaataatcccaaatagaccagaattggcccataccatagaagaaagaattggcagtcaaaaaaaaaaataccttttgtaatgtttgaaaaataaagctgtttgacttgtcaggtgttttcctttctcaaatcagcaaattctctctgagtgcctggctttgtgagacactgtacaaggagttacaagactacagctataacctgcagttgagcagttataaacctacaaaatgggccctgccctcagagaggttccagtctagatgaggagctgatctagacaggtaaaaggctaactaaccctttgtgtaaataagttcatcaccccagtaaaagtgtcatcacccagtgaataggaccacctctgcctgcagatttttgttgttgttgttgtcattgttgttgttgttttaacctgggaagtgttcttcctgcctttctgctaggtgtcagatagatggtcccagagctaggtgctgtgtcaggccctgaagacacagatgactcaacctaagctttactttccagaggtccacagcctgagaggtgtccccaaagaaagggggacatgaggggactgcatgcttgagagcagggttgtttagggcaggtttggatttagtgagcaggctggtttgcttagagaaggcttttagtggcaacaaaggatgaagaggagagaaaaggaactcacatttattgagggcctactgtgtgcaaagtgtttcatgtatatctcattgaatgtatacagccaccctgttgtggtataattttgctctttataaagagaaagaccgaagctcagatgagttaagtggtctcctcaacaccaaaatgccaagaagtgatggagcctagacagaagcccag

SEQ ID NO: 45887 - DNA, 1048 bp, Homo sapiens
aaaggaaaagggtaaaatgagatataaagagattttttttcctggaaaaaaaaaaagccatcaaatacataaggcaagttctttgacatacactgaaagtttggtggtataatgattacctaaaaactcaaaagaatcaactgataaataataaaagacttggtgaagtgaattcaaatgacattaatttataaataggaacactcttgatatcagtaatatccaggaagaaaatatactggaaataagactccattcataatagcaactgaaatataaaactaccttgagttaaaatttaaaacagaactatgaaactttactgaaatctaaaaaactaattagaataagcagacagttataactcaaaatacctagaggtctggttttgaaattagacaaagtgatttttatttaatttggaataacaagaaaaatgttaagcaaggtatttttaggaaaacaaaatgataatttcactaagatttatcttaaggaaatattcagatattaggacaagaaaatatgtacaaaagatccatcgttcatcatggaattatttaaaatagaaaatagttgaacataatctaaatatacaacaataggggaagagttcagtacattattccatatgctggaatgctacgaagccgcttaaaaaacagacacatgcacacatatgtttattgcagcactattcacaatagcaaagacttggaaccaacccaaatgtccaacaatgatagactggattaagaaaatgtggcacatatacaccatggaatactatgcagccataaaaaatgatgagttcatgtcctttgtagagacatggatgaaattggaaatcatcattctcagtaaactatcacaaggacaaaaaaccaaacaccgcatgttctcactcatagatgggagttgaacaatgagaacacatggacacaggaaggggaacatcacactctggggactgttgtggggtggggggatgggggagggatggcattaggagatatacctaatgctaaatgacgagttaatgggtgca

SEQ ID NO: 45888 - DNA, 1025 bp, Homo sapiens
agcacgttgctgcactgaatactgtaggcaactggagcccactgttaagtatttgtatatctaaacatagaaaaagtacagtaaaaaacagtgatataatctcatgggaccataccatagtcatatatgtggttccttgttgactgaaacatcgttacgttgcacatggctatattatattttattgattgatttatcaattggtggttgctgtggtttaaatatgttccccaaaatttatgtgttacaaacttaatccccaatgcaacagtgttgggtggtggagcctaataagaagtgattgggtcatgagagccctcatgaatgggttaatgttgttactggcagagtgggttagttattgagagagtgggcttgttataaaagtgagtttgggcccctcttgctctcttgctcttggtcttatgtgtagtctcttgcccttcttccttctgccatgggatgacacagcatgagggctctcatcagatgctggtgccatgctcttggactttccagcttcagaaccacgagtgaaataaactattgtttataaattacccagtctgtggtattttgttacagcaacacaaaatgaactaagacagtggtcatttgggttgtttctattttggctattatgaataatatgactataaacattcaggtagcaatttttatgtggacatgttttcatttttcttggaaatatgtctgggagtagatttgctggatcaaatggtaactctaggtttaactattggaagaactgctaggccattattcagagcaactgtatcattttatattcccatcaggagtgtatgtggattccagtttctccatatttttgccaaaatttgttttttaaaaattataaccatccttgtaggtgtgaagtggtatctccttgtgtattgcatgtcatcacatccctgatggctaatgacttggaacatcttttcatgggctttttgatcattagtagatcttccttggacaaatgtctattcacatcctttgcc

SEQ ID NO: 45889 - DNA, 1031 bp, Homo sapiens
cgaacataattttgtttaggaacatgatggaacatatattaggaacataagatcacctaatttacttacaacattgaataaggaagactagctaacccttctgaacattttccatctgccaaacactgcattgcaaagtgctttactgcattctgtcatttaattccaacaatagccatagtagatttttatctgcatcttatagaagaggaaactgagcctgagaagcaatcaagaaacttgttataagctcatttggctagttagtctcagtctgattctcaaacctacacatattacttactatactcttcttccctttgttcaatttattccattttaaagtaatttttattcaatataaatcaatcaagtaatttatagatgtcataattcaaattaagctgcatgctactaaaattaaggacattagtatgatttttatgagtttcaaaaattacaagcatttaaacaaaatttgtccaccaaaacacagtttcgtatcttctgggcttttttccatagtgtcatcaacatataaaatactcctattaactgaagggaaaactcaatcttattgaataagatttttccttcaaaagtttaatcagtcccactttctaagttgtcactggtcatttgtattttttaataatctccatggatctcagaaaaccaaaaacaattgctatgtttatttccgttaaccgtgtgccacacagacaactttctgtcacatgctgcagaagacagaagaacgtggcacagggctgcagtgccgggaatggaacgcggtgacattgcaagtctttgcttggcacatccagagctgccgtttgctgtgttctgcagcatctgtgaaattccagcaataggctctaagcttctgacttgttttgtaatgtgtttttatacattttgcagtgctagcattcactttaatttctgtctttgaatcttccacccaagatatagaaatctgtgtctattacctgttttaattttgcattcttttatttggctttttgtgt

SEQ ID NO: 45890 - DNA, 1050 bp, Homo sapiens
tgagggaaagatattttccaaggcaactcaatggacaaaggaaaatcttttcaacaaacacctagatatccacgtgcaaaaaataagccttgacccttaactcctattatataaaaaatagctacaattaaatttctagaaaataacatgagaaaatattctgttgtccatttctagtgacagatttttcatattgaccttgtatcctgcaaccgtcctaaactcacttattctattagctttttaatagattgcttgggatgttgtatatggttggtcatttgtggatgaagaaagacagttttactttgttccccagtctgtatggctttgtttcttttactttttttaattgcactggctccagtatgtttttgaatagaaatgttagtggatatacttgccttgttcccaatgtattatgttagatgtaggtttttcacaaataccctttattagtttgaggaatttttcttctatttctagttattatcgtgagtgggtattgaactttgtagagagctttttctgaatctattaaattttcttttaaaatctctcaatgtggtaaattatgttaattttcaagtgttaaactgaacttccttgtgtaaagccagtttggtcatgatatattttatatattgcttgatttgctgatattgtctatattcatgagggatattggactgcagttgtctttttgggatatctgtctagttttaatattaggttattctgtattcataaagatgagaaatgtttctctttttttaatagaaatatctttttctttaactttgtgtagaattggtattattcctccttaaattggtggaattcactagtaaagctatctgggcctggagttttcttagtaggaagagtttaactgtgatttcacagttaatagatatagggctattcaagtgatctcttattttctttgtgaattttgttagtgttttttaaggaatttgtccatcacttctaaattttcaaatgtactggtgtgaagttattcttgatacacccttattaaccttctag

SEQ ID NO: 45891 - DNA, 1054 bp, Homo sapiens
gggactggggtgaactctcattcagcctgtttctccatctctctttcgtctcgaaactcattctcatgcccacagttattggggcataaagattccttaaatggcttcctccagagaaaaatacgtttaaggcacttccttagtggtttgagccctgggcgagcccctcctccactccgtttattttccactatgtatttaaatcttccccgatggtgcctgtcttctcgtcactaaggctgactttctgtttttggggtgaaacctgtgtctccttcaacctccagtcactcagtggattttttttttttagattcataacatattttattttgacttatctaactgatgtcaaaaatggaaaatgttcacatggatattcatctaactcatgggctccattctaaaaaccccctttttaaaaatcaggcttcagtgtcagattgctgaatgtttttttcattttcctgagagatgcaaatgttcattcattcatctcattatacaacacagtacataaatgtagcttcagagcgtattaagtgcttttatacacaagtgctggctgtgtggaccaggtggtagctcatttaggccccaaattcattaagggcagggtctgactcttaggcttcttaatatttggtttggtgcatggtcaagagctggacccacatgttgcatagcagcagggctgatatgtttaaagacgctgggctttttctgctctggggccctttcccgggggttccggtgagtccctccccaggtgggtctgcccccacccgtgtgggcgggattagctcccagaggctggccaggccccacctgggggaggcttgagggcagggccccaaggctgagattcaggcttgggggaacagagcaggaaagagacccggtaccgaaagtgagcggggcaggcacctagtcacatgggtaatgggcaggggtcggtcactggctttggctccagggccagagcagtctgacttagtgttgagctccaagcatggaacactggagttggttcattttgaccagcaagcctcta

SEQ ID NO: 45892 - DNA, 1050 bp, Homo sapiens
gggagttgtgggcagggatcagtcaccaggactggaggctgacgctgttgagataggctgtgaggtgggaatgaacatggctttccagagagacaaggagatgtccttagccataccagggaatgtatcctgaacagtaggagatagaggtggagaggaacaatggttgagattgtgaaagtcttagcccttttggtgattgcatgccaccctgtgtgtcctaaggagacattcagggtttttgagtgagggaatggtgtaatgaacaactgtaatggaagggttttggaaagttgtgttagggggacacatcagtgagcaggctgttggagttgcagggtggccagagtttgcactgggatcactggaagtgaaaaaggtgggtttgagaaacattactgttgaaataatctgtttacagggcagggtgaagggatgagatgaatggaaattaattcttggtggaaattgattcaacgccagggccttggagctgctgtagttggtaacttgagaaatcggaaatgtgtattttggagagaaggaattggctactcaggctatagagaagtttcttgtggctgctaagatatccagatgttagtgtcctgcaagcagctatggctctgagatgggggagcccaggggggacagtgttgcagaggctacagatgccgggagagggaaggggctcagagaagtggggaggctgctggtaataggggggcagcggaggatgcctttgagtggtactcaaggcctgaaccgaggggcttctgtttccctctgctgcactgccattcacatgacattgctcggttctgaacctgaagttggaaaagcaactgtgggcaattgggccctgaggagtatgggctgttgattcttctaatctcgagggtggattggaggttagaacggtgtagaatgggatttgctaaagacagtaaattgctgggctttgaaacattttgaacttttctggggtggagggttggagggtaggagagagagagtgaggcaggaagacattagccctagggatattgt

SEQ ID NO: 45893 - DNA, 1031 bp, Homo sapiens
cagatcatttgaggtcaggagttcaagaccagcctggccaacatagtgaaacactgtctctactaaaaatacagaaaatcagcagagcgtggtggtgtgtgcctataataccagctactcaggaggctgaggcaggagaattgcctgaacctgggaggcagaggttgcagtgagctgagatcatgccactgcgctccagcttgggtgacagagtgagactctgtctcaaaaaacaaacaaaacacaatatgacgttcttcaagaaactaaacagaatttccatgtgatccatcatcatacatctggggaaatacacaaaaggactgaaaacgggctcaaacagatgtttgtacacccatgttcacaacagcattcttcacaatagcccagaggtggaagcagcccaagggaccattgagagatgaatggagaagcaaaatgtggtccattcataccgtggaatattattcagccttaaaaaggaaggacattctgacccatgctacaacatggatgaaccttgaggacattacactgagtgaaataagccagatacaaaaaggaagctgaatcttttttttttttttttttttgagacagagtctgtctctgttgcccaggctggagtgcagtggcaccatcttggctcactgcaacacctccctcccaggttcaggtgattctcctgcctcagcctcctgagtagctgagactataggtgtgtgccaccatacccggctaatttttgtatgtttagtagagatggggtttcaccatgttgaccaggctggtcttgaactcctgacctcaagtgatccgcctgcctcggcctcccaaagcactgggatgacaggcgtgagccaccgcacccggctacaggaaggtgaatcttgacctaggcctggaagcaagaagggtgatgcttggatagacacagagtaggaggtaacagtagtagcaagaggacaaagggaggaaaaagtttgctaccagagcctttgtgggttcctgcgtacagaagtgatatgata

SEQ ID NO: 45894 - DNA, 1028 bp, Homo sapiens
cagagagaggaaggagaggaataaaataagcagagaccccaggccaaacctgggtgaccaagcatcctggtttgccagggctgtcctggcgttagcaccacaaggtccacatccaggaaaccccttgtcactgtgagtggtccttggaaaatgtccagtgcagctggaccctagagaactggggctgggttgcagcagggttggaaaagagagatagcggaaaaggtagccaggagcccaaacaggaagccaagccgagcagttaagactttatctccaagatagctgagcaatcaggacaggattttaaagacgagagtgacttgctaagactggcatttgaaagagctctggcttctggataatgcaggagaggggcaacactgaagaccagtttggggccatcacagttttccagggaaaagatgctggtgacttgaactgaaagtagtggaggagggtaaagagaaaacaaggaggttgtagaatgtcttcaggagaaatagcagaacttagaattttcttagccgggtgaggtggctcaggcctgtaatcccagcactttgggaggctgaggtgggcagatcacaaagtcaggagattgagaccatcctggccaagctggtgaaaccccatctctactaaaaatacaaaaattagctgggtgtggtggcacgcacttacaatcccaactacttgggaggctgaggcagaagaatcgcttgaaccagggaggcagaggttgcagtgagccgagactgcgccactgtacttcagcctggcaacagagagagactccgtaaagaaaaaaaaagaaaaaagaaaaaaaaactttcttagagttaggaggagagaggaggagaaattaaggactcttagttttctggcttgggaaactggagttttgggaggtaattaggatggtttggaaatatcttccccacaccaccctaccccagaatgccaacaaagcaatgatgcttctgcttcccatgcagctcttgttgccataaaagtcatctcagtta

SEQ ID NO: 45895 - DNA, 1045 bp, Homo sapiens
gaaattaggaaagagattgtggatgtgacaaaaaaaaaaagtgggaggtgaaacgtttcaagatatggagcttggagaaattcaggagcctattaacacaccagaggagttaacagaagatgacccgaccaagatgagtgcttctgaacctgtgccagatgatgaagaaggagacatagaagaagcagtgctggaaaacaaattgacattagacagtctggcagaagggttctgattattcaggactgcttttgatttctttcacaacttggatccttctgtgatgtgggcacagaaactaaaatggtggaagaaggattgataccatatagaaacatttttagagaaatgaaaacgtgaaaacatccaacaaattacaacatatatctgtaagcactctgagtgtgcctgcttctcctgccttgccttctacctcctacacttcttcccctctgccacccaagacaacaagaccaacccctcgtcttcctcctcctcagtctgtttaatgtgaagatgacaaaaataaagacctctatgatgattcacttccacttaatggataggaaatgtattttactatcactaaagtacatttacttttccttatgattttttttgagatggggtctcactttattgcccagcgtgaagtgtgatggcataaccataattcactccagcctcgacctcctgggctgaagtgatcctcctgtctcagcctccgagtagctgggactacatgtgtgcaacaccatgcctggctaattgttgaaacattttttgtagagacatggtctcactatgttgaccaggctggtctcaaactcctggcctcaagcagtcctcccacctcagccccctaaagtgctaggattacaggcatgagccaccacatctggctccttatcattttcttaataacgttttcttttctctagcttattttattgtaagaataccatatatagtatatatgcaaagtatgtgttaaatatgttattcaggaaggcttctagtcaacaggctattagtagttaagttt

SEQ ID NO: 45896 - DNA, 1036 bp, Homo sapiens
ggctcaagcaattctcagctcccaagtagttcggactataggtgtgcaccaccacgcccagctaatttaatctttgtagagatggagtttttccatgttttccaggctggtctcgaactcctaggctcaagtgatcttcctgcctcagcctcccaaagtggtgggattgcaggtgcgagagccactgcacaatgtgtctgatttgtatccattgtatgttacttttatcagaacatttttggaggttagcaggtgtttccttatatgccttagctctgcttccttttgtttctcaggtttttcacgcttcagcagcaggaaaatgaaagattggctactaactatttgtaacaaaaataaatcttacatatcttgtatattccactaaaaagtaattttctatacttggatttaaatcattggttagtgtttaaaacaagacttagaggattgtattagtttaagcaccattaaaaaatgacatttaagaatttctgaaattcagggtaaggggtgattgttagccatgaaagatttattttcaaacaataaaaaatatgcatcagaaaattcaatgttagggaagttctgaagtgattatttttttgtttcaactgggacctcttttcccctttacctccccgatgcccacatttcagagtctgttctttcccacattcctatgtaactgtacaatttagtcttctttatgtcacttgctaagtaatgtatgcatttgttcattcaacaaacactgagctactgttttatgtaaggaaatacagggatgaatgagctgtagtctgtctccttccaagagcctgaagtttagagaagcctgtttagagccacaaaagcagatgaagagacagtgcagggtgatgtagataccgtcatgtgtgagtgtctgcggatgacacagcgaagccggtgggcgctgctccctgcagttgcaggagaattcgatcatgcatgagcagagacttagaaatgaatcggtattcactagatggaacacgattccacgggggcggag

SEQ ID NO: 45897 - DNA, 1028 bp, Homo sapiens
tcctgtttatcggttttatccagcaaagagaccttttagaagatttttgttgcaggtgcttaaagctctacccccaagccattagaaataaaactggttctggatacctgagaatgccctttctgttctagaaaataatgctttaaattctgaaaatagctgttttgaaagatgggcgcagtcaactggtggtagcaataaagaaattattgtatactaccttacctttccaaggcatagtagagcaaggtaagatagagcatcagtttcagatagattatcttgacattacattgaatatgattttccttgcttgcttccaggatcgagatttagagagacttcgtagaaaatggctaaatgcattaacaaaacgtcaggagtacttggatcaacaattgcaaaagcttgtcagtaaacgtggtaggaaaaacaaatagaatatttttctcccctgcaaatcaatgcataattaattattctccctttgtagccacatcagttaagaaccagatgaacacatcagtaatggggatggcaggagcagatgagtgttactctttgtttatgtcatatcctttatccagctgtcgtatcttggtggaggtcttcctcccaccccctacaaagaaagagcaaatacagtgcacaaagcatacatggtttgtcaaagataacataaaggaaggtggtaacttttcttatccaaagggctcgagtcctctgactctggaccagtcactcctgtgcggtccctctgtaggcctcccaggaactgaagatggcctctctgcaggagcccatctgacctctctagctgtgggttagtttttatcactggggagcacttgtgagctaataattgaaatataggcaaatccagtctttactcaggacaaaaagataaatggcaagtgaagttttgtcattgaatcctcattctcgatgttctagataaaacagaggatgatgctgaccgtgaagcgcagcttctggagatgcggttgaccctaactgaggagaggaac

SEQ ID NO: 45898 - DNA, 1050 bp, Homo sapiens
gggtataagttgcagtgacaatttaacccatttatagaggtgtcacctcactaaatcctttaatactcttttttttctatttttaaaatggagaaataattttatgtgccctgtttaattttgtgatgttttattttcttattgatcaagaatttgttgaacacctggcatgcgttgcattaggggttgaaaatactaagatgagttcaacacgggccgccccagtagcttagtagaggacatagttactgatttagtccatagcatgtttagaaaaaggcctttgtgaaatgaagtaggggtttcttctggtttcctcctcctctcaagagttaactagtattcaactttttaattcaaaactctgcacactatttgaatatcttttgttaaaataaaacattctttacgtaaatgtcagtgtgttctctcttaaatgtaatgctaaaattcagtaaattttccacagtagaatatcaggtccattacttcctttggccaaaatgcaggactgttagaaatttaaacaaaagtgtaaacaaatcatgataattaaaaccgcttgtaaaggttcgtcaaacaacctcacaaacatcagatagtaagagataattattaggaacaaaattaaaacaccttggcccaccataaagacaattctaaccttgtcttttaaaatagaacattattattcagatattgttacttgaatcctgacgtcagcttacataactaaatacctcaagtgcttttaccctaaaaaaaaaaatttacttttctttcctgtctcaaacagcataagaacttctgcttctgtaagactaacaaaaatgttttgtagttttttttctgtaattagaaaaacaagcaaactgcaaaattcaagactttggaggatgaatataattattctttttcataaaagccattaaaatcatagagtaaataggtttctttaaaaaattagtgaacaaacttgcagttatataggatattaagtctagagatcaaatgggcagtctaaggactatagttaataacagtgtattg

SEQ ID NO: 45899 - DNA, 1023 bp, Homo sapiens
gcagaaatatgaaacggtttttatttcatgttaactctgatataccagaacattcaggaaaaaatacttgataaagatatttttttctgacagtttaggaacaggaaggtatttaaaaattatagccacaagaaaaaaatgcctaacctacttttatccctttaaagagcggcaacacccttctcagactcgtggtactacccgtcctatcctccctcctaccctggcacgtggaatagggcttactcaccccttcatggaggctcgggcagctattcggtatgttcaaactcagacacgaaaaccagaactgcatcaggtaagagcaaaaaatacaagttccttttacctaggagtaaagtacagaaatagtttgggaactttagaagatgattatctgtttagcaaccatggttttatttggtgtacctaccaaaaatattaatagcacagttaactgagatcccacttttaaacattctttaaaaatcaaacagggatttgatttaggcttagctctaccatagaccaaggttttaacttgaaccttactgggtgctagcttccccatatatttaattctgtgatctctagagatcctttaagttctaaactagacttttctaagtagaagcttaaacttaaaattcaataacattcaaaaaagatattgaggtatactttaattttcaaaaatatgattgtaatgtttattggaatgctcagaggatattttgtaaaaagcaaagatacaaaaaaaacaaaggaataactggattaagcatcaagcctaattgggagctgctgggtaaggaggccatgagagattgctctggagtagctttgtctttcaggaaaaggaagttatagaacaatgattaattcttgaaattgatagaaaaatatatttaaatatgttttaaaatgtgagtagaattctcataatgctggtttggatatatattgatacattcaattaaaaaaactggtactacctcctaaaattgaacctatgcatacttc

SEQ ID NO: 45900 - DNA, 1020 bp, Homo sapiens
cctcattttccttcccttagacatgaatacttaccattgtgaattttgcggatcattcccttgcttcattttgcaattttatgacggatatatagcccaagtaacatttttttttttcttgagacggagtcttgctctgttgctcaggctagagtgcaatcacgatctcagctcactgcaacctccacctcccaggttcaagtgattctcctgcctcagcctccttagtagctgggattataggcgcctgccactgcgcctggctaatttttgtatttttaataaagatggggtttcaccatcttggccaggcgggtcttgaactcctgaccgcgtgatccacccgccttggcctccgaaagtgctgagattacaggtgtgagccactgcgcccggcccccaagtaacatatattaaatgaaaaaaatgtttgtttctaatagtctgtttctatttttcttcacagtgggaatgtaagacggacttagatattgcatacaaatttggaaaaactgtggtgagctgtgaaggctatgagtcctctgaagaccagtatgtactaagaggttcttgtggcttggagtataatttagattatacagaacttggcctgcagaaactgaaggagtctggaaagcagcacggctttgcctctttctctgattattattataagtggtcctcggcggattcctgtaacatgagtggattgattaccattgtggtactccttgggatcgcgtttgtagtctataagctgttcctgagtgacgggcagtattctcctccaccgtactctgagtatcctccattttcccaccgttaccagagattcaccaactcagcaggacctcctcccccaggctttaagtctgagttcacaggtatgtttccctcgcagtggccataaatagagcgggtgtgaggttagtgcatcctgtgcttggttctgaaatagaaaatcgttgcattgggaaaccaaaggaggtttgtcttctcattttgttttttactttcaac

SEQ ID NO: 45901 - DNA, 1141 bp, Homo sapiens
tcaaatgtgcacactcacagtcttgcacacaattccaggggcttctcaagaccctgtgagaaactttaacacaatatacttaaccaaactgaccctgacatttagtctgcgtcagagaccgcgctaagcacttcacacagcctgtgacatctaaggcaacgtggacgaccctgggaatcttctccactagaacttaacaatagtggtaagttattaccatgttacagttcactacccagggccacactgtttgggattctaccatccctcttcttcaggaatgctctgaaaatgcagtgcccctgcatggctaacactgtaagtctccagcactcagcatggtgacagattggacaacaggagagcaccaagatacccagaaaaagaagcaactcagagtaaaaatcaaatggaatgctagagaaagcggtacccacccataaaaataatttccatcctcttccatttatagatgaaaaatgaaggcccagaggattaaatacagacagaatttatgttcctaatactgatgccaaggacaggaagaccttgactagtctcgggaggacgccctgcctgaagtaccaacccttctgcagtggtgagtgactggcacagggtaaaactctacagtaatgatttgcattgcgctatcccctttctaggggctgaatcccactatcatacttgcccttagaaagagtcacgaaaagtgcttagcaggtgactggctcaattaatagtcactactgaaagcaaatactctctggttggactgttttcttctctggggaatgaaggggtaagcctagaccagtggttctcaggttcctggaccaacggcatcacctgggaacttgtcagaaatgccaaaactctgggagaggcatccaataaacgacactgtaaccagccccccaggtgatcaccaggcacatggtcaagtctgagagatgctgcttttaattaaggtttcgaaaagtatggctggaagaacactggtctagaaatgctctaatgtcaaggacattagagagaaatgcacaatttggtcccttcagcagtttcttgatatgtgtgggcacagtaatggctccaagaagttccaaaataaagaaacctgtttgacttgatctagacc

SEQ ID NO: 45902 - DNA, 1026 bp, Homo sapiens
tgatgctaatatttcaagtatatagaaaagaatagagaatattacagaccttcatgtgctcctcctttctcaggattttgccatattttcttcagatctttttaaaatcggtaatggtggatacgtttttaaacctgatgacagagacagagctgaagggcttcatcgtcccttttgtttgacttagtgcctagaaccattttggcaggtttttgtgcctgctccttcattcccgatggcatctgcatctcaggggaacaaaggcccggggtctggtcagggcgtgtgctgtgccccatgtgtgctgctgggtggcagagcaggagaagggtccgaacctggcatcctcagccactggcatctgggcatgctcagaacatcctggccacaccacccctcagagcagctgttgtttctaattgtttttaccttttcctttaggcccctattcagagaaggaaaaagcctgcttcacagaaaaagcgacgctttaagactcataacgaacacttggctggagtgctgaaggattactctgacattacttccagcaaatagggaacagttttgccctggaacagagttacagatacacaatcaagagtgttcttgctgatgctcggggtctgaagactgtcttcctatctgcttcttgcggctgaggagaggagcagttcagtttacaaaacaagtgcaaattaccaaactcaaagcttatttgagtagaatgggctcatgggcaatgtgatgttccctgttaaccttctgttactccctgggagaaaggcgctgagcgtggcatgcaggtgtctttgctgtgtttttctccacttctaaatggttcctggttcctttcttcctcgtttgttactttagagcaagtttgcccatagtcttgaatgcaatatttgtttattccaaaagaacatatttataataaaatcactgtagaaggatttttaagatgttagtgaattctgtttcttttcattctcggaaatggcaggaagcagctccagtctctga

SEQ ID NO: 45903 - DNA, 1029 bp, Homo sapiens
atattaatatcagacagagtagatttcagagccaggaaaattaccaaggattaaagaaggacatgggccgggcatggtggctaacacctgtgatcccagcactttgggaagctgaggcaggaggatcgcttgaggccagcctgggcaacgtggcgaaacctcgtctctacaaaaaataaaaactcagcctggtgtggtggtgtgcacctgtagtctcgtagtgctactcaggaagctgaggtgggaggatcacctgaacccaggagttggaggttgcaataagccatgactgtgccactgcactccagtttgggtgacggagccacagcctgtctcaaaaagaaaaaggacgttacataatggtaaaagtatcaattctccaagagtacataatagtcctaaatacctatatatctaacaacaggccttccaaatacatgaattaaaaatggatgaaactaaaaggagaaatacatacatccacagttagactacagcattcctctttcagtagttgattgaacagatagatggaaaattatgatatagaagtccggaagagcaccatcaactaatttgacctaattgggatttatagaacagactgtcctgcagcagcagaatactgtgcatgtattttcctttttttctcttttgagacaggtttcactcttgttgccctggttggagtgcaatggtgtgatctcagctcactgcaacctcctcccgggttcaagtgattctcctgcctcagcctcctgagtagctgggactacaggcacgtgccaccacacctggctaatttttgtatttttagtagagacggggtttcaggtcaggctggtctcaaactcctggcttcaagtgacccgcctgcctcagcctcccaaagtgctgggattacatgcgtgagccactgtgcctggccctgtgtgtatgttttcaagttcatctggaatattcaccaagatggatggtattctggcccacaaaacaagctttaattgtatttgaaagaattgaaagtat

SEQ ID NO: 45904 - DNA, 1033 bp, Homo sapiens
tttgtttcaccagattcagtgaacacctttttttttttttttttgagacggagtttcgctcttgttgcccaggctggagtgcaatggtgcagtcttggctcacaacaacctctgcctcccgggttcaagcaattctcctgcctcagcctcccgagtagctgggattataggcatgccaccacgcctggctaattttgtatttttagtagagaccaggtttctccatgttggtcagtctggtctcagactcccgacctcaggtgatctgtttgccttggcctcccaaagtcagtgaacactcttataacaaatgatttgtaacgtcatctttgcttttgtgaaattaagttcatagataatataacctactgatacacatactttcttaaaaagtcagtgtaataccctaagtgtaatgtaaagaatgaaaatatatttttattctttaaaatatattttttatggtttaaaaatttacttcagccaggtgctgtgacccatgactgtaatcccagcactttgggaggcctgccttaggcgatcacttgaggtcaggatttcaagaccagcctggtcaacatggtgaaatcccatttctcctaaaagtacaaaaattagccggacatgctggtgcgtgtctgtaatcccagctacctgggaggctgaaacacaagaatcgcatgaacctgggaggtggaggttgtagtgagcctagattgtgccactgcactccaacctggacaacagagcaaggctctgtctcaaaaaaaaaaaaaaagattaaaaaatgtataagtgctcaggcagttaccctagaatgtaaatggaatggaattgaaacagttgtatatctttctattgtagagtcaccatgaagatgatagccaccaatgggccaatatagttacgatgtattggcaacttagatgtcataactggtctcttccttaagtggtaaaggattcttggtaaagttctgaaaatacaaagtacatttcttctgtgatttatcaaggttaataatgctatattc

SEQ ID NO: 45905 - DNA, 1023 bp, Homo sapiens
atactaaaaggcagatgtgcctttcccttctctagctgcagtccctttcttttgtggcagctgcttaactagttttattttggattcttcagttttttcccaattgctaataatatgcttatgctattgtttcttgattttttttcaactttaaacattgtgtgacttactgtcatttctctttcctatacctatctctctcctcccaatatagttgtatctctagttaagttttagtttctccgtcatttactttgatgccttcaacaaacatatttaaatgttctcagtgggaattttagtgttaagtctgctctgcagatggcagcatagtgtagcatgtctgttgtgtaagcagatgtttaacttgaggcgggtggttgataggaaagagattgcagtagctctgtaagagtgtacatgaagctctagaatttcttaatagcatttctttggggttattttaggagtacactgtgtgtttagcagtgggaagcccagatgttcttgtaatctgcacgctaagctgtcactttctggcccttgtgtgctctttctgtggatactattgttttaactttgctttttcctgtttgtgtatcttttatctatacttccttaatattacccgttttcatttgtcattttatatggcctttgttggcctaaactcttttctatttccttattgcatagcttataggggtaaaatgagaattttcactttcccccctagaaaacattaacaatctagaaatacatagagtaaaatagtaatattaaactctagcatatgtgatgcagaaattaaacatgcatcatggatatgtgttccgtgtcttgtgataacatatgcttggtagttaaatcttacataatcaggaacaagttctgtaaataatttgatgtttattcttttagtttgctttctcagcattacaaatattccataacgatgtatggctggttagtattccactgtgtgtacctgattaatgagttttaaaatagttaacaatgctg

SEQ ID NO: 45906 - DNA, 1033 bp, Homo sapiens
tgtttctttgctgaattttgttttcttttttttccattcgtgacaagtatcttttgttacacccttaagtatgatttcttatagctgctttaaaattcttcttattctaacagccgagtcatctcagagctggtctgcattgactgtctcttttatgggtcatattttcctgtttcttcatatatctaatacatttctgttgggtcttagaccttgtggattatattaatatgtgtaaagactcaggattctgttacattcctcccaagagtgtttctatttgttttgttttgtggttaagtgggcagttactccaaaccttgtctgccctacagcaggtagcatatgatatgtctcttctgttcttctagccttagcccgtttgcttggaatcttggaatctttttccaagactggcttatttcacttagcataatattctcaaggttcatccatgttgtacttgcaacaggattttcttcctttttaaagctgaataatattccattgtgtttttgttgttgaattgtgggagttttaaaaaatatattctggatattaattccttaacagatacatgatttgcaaatattttctcccattctgtaggttgccattttactctgttgattgtgctctttaatttgccagtttctgagtttgctgcactcttgtctatttttgattttgttgcctgtgcctttagtatcatgtttaaatcactgccaaatctaatgtcatgaagcttttgtcctatgttttcttctaggagttttatagttttgggtcttaggtatttagagttaatttttgtatatggtgtaagagtccaactttattccttttcatgtggatatccagttttctcagtgtcttgatgaagagaccgtcctttgcccattgaatagtcttagtcttggtactcatgtggaagatcatttgaccatatatgtgaaggtttatttctgggccctctattctgcctgtatgtctttcttcatgccagcactacaatgttttgattaatgtagcc

SEQ ID NO: 45907 - DNA, 1822 bp, Homo sapiens
tgtaaaattcctaacatacaattcatttatttttttaccaagcaaaatacaggtcttgacttttataatgtaacatgaccattaatcagtataattgtagttcattgtattagtgatacacaaacaatggtaatccacatttaaatttgctggtttagctaaccttgagaattcatagactaccaacatttagttaacaatgactttgatcattttactattctattctcccttttttcttctttctgtgtttcttctctttctcctttcagggtcaggctggcagctgcagaagaaaatatatagggttgctctttttgaagagctttccttctgatactaactgtacaacagaactgactagaaacataattatattcagtaattcctgcattcctactcagtttcattctcaagctgacattataggtaaagttcttgtatgcactagtctggtccttttcagttccttccacagctgccattgccagttgatagcagatggggaagaccattgactagtaagggttatgttccttactttataatgccagtatgtgataagctgtactttgcagatggagtgggcactactcagttcactttgtctattaatatttgtaggtgttttattgattcctacacattttgactactagaagaatatgggttcagcttttttcaaagtagttgtgataaaatggtttatttctcttcaaagaatttatgtaaataaaacacagtttcttttataaaaagtgagcaccgtgctgatctactgttctggaattctggatgtccaggattttaggcctgccagtttgtattcataaggtacttttaatttgccactgtattggctagtgttgtattttaaaataattagtagaattaagaatgtgtatatgggctgggcacagtggctcacgcctataatcccagtactttgggaggctgaggtgggtggatcacctgaggtcagaagttcaagaccagcctggccaatgtggtgaaaccccgtctctactaaaaatacaaaaattcgctgggtgtggtggtgcgcacctgcagtcccaggtgctgagagggagggaggcaggagagggaggctgaggcaggagaatcgcttgaacccaggaggcggaggttgcagtgagctgagatcacgccactgcactccagcctgggcgacagagcaagattacgtttcaaaaatatatatatatatttatgttccatttgttaatatattccaattgtatcactgttacaggctttagtcaacaatcccaaaattgaagtaatagatgggaagtatgctttcaagcccaagtacaacgtgagagataagaaggccctacttaggctcttagatcagcatgaccagcgaggattaggaggaattcttttagaagacatagaagaagcactgcccaattcccagaaagctgtcaaggtaatctctcttttctttctatgtcttaatataatttgaatgaataatgacttcttggttttaaaaatatcaaacattttacaattgtttttaaagcttctattatatacacatgggttacagtgagccacttgaaggtttgaaatttgtcttgtgccacctagcaggaaagggagcagccatctctgtgtaactttgacgggttcttgttgctgttactatatgattgtttgattgttcaggctatttctggaaaattttcctcaaaggcaatagagtttctcttgtaagctctgtttgtaaataagagtgtcttctataatactagtagatgttccttacctgaggaactagaggcattaaaac

SEQ ID NO: 45908 - DNA, 1050 bp, Homo sapiens
ccaggttcaagcgattctcctgcctcagcctcccaagtagctgggattacaagcatgcaccaccatgcacggctgatttttatatttttagtagacatggggtttcaccatgttggccaggctggtctcgaacacctgacctgaagtgatcccacctgccttagtcccccagagtgctgggattacagccatgagccactgtgcctggtctattttgttagttttttgaagctcttgaaatgttaggaagaatatagctcttggtgatacgagttgcatatatttttttgtcagtttgtcttttgattttatagagcaatgagtttcaaccccattctgatttcatggtctatggctcttcgtcactataattatgctacctggaataatacatgtttttcattcctgaaggtttgtttacatgtaactatgatttaatgcatctagcattttgaaactgtcttctaataacaatttcttcacttgatagacacggcatcagcgaggagatacgcatcctctaaccttagatgaaattttggatgaaacacaacatttagatattggactcaagcagaaacaatggctaatgactgaggtaagaatttagttgattatcaagagagatttcctgtaactagaattttcttttttttttaagacagagtcttgctctgttgcacaggctagagtgcagtggcatgatctcagcccactgctgactcagcctcccgagtagttgggactacaggcatgtgccacgataccaggctaatttttgtgtttttagtagagacggggtttcaccatgttggccaggctggtgttgaactcctgacctcaagtgatccgcccacctcggcctcccagagtgctggggttataggcatgagccactgcgccttgcctagaatgttttaatatggtgaaatctgataatgctttttactttttcttaaaagaaatggtgtagggtctttgttttttgaatgtacacatttataagattgatttgttggttttcatataattttatgttatctgtttcaa

SEQ ID NO: 45909 - DNA, 1075 bp, Homo sapiens
ttgtcatgttagattaaaaattaaatcagttaaaatatgaagcaagggatatgataaaagttgtgttattcctttatttatttatttgtttttgagacagggtcttaactctgtcacctaggctagagtgcattggcaccatcctggctcactgcagcctcgatctcctagcctcaagtgatcctcccacctcaacctcccaagtaactgggactacaggcacgtgccaccatgcctggctaatttttgtattttttttgtagagacagggtctctcagtgttgcccagcttggtcttgaactcctgggctcaggggatccctcaagtgatccgcctgcctcagcctcctgaagtgctgggattacaggcgtgagccactagacctggcctgttactcctttttaaatgtgtgttcctgcatcttctgatctctgatctcagctattaggtataaataaaagggaatgaatcagaagtaaccttacatttttatttgggtaattaatgaaagagatacctactgcttcaaactactcagtatgacagctagcatatcttattttttgtcagtagaaggtagaaatattaaactgttgaaaaactataatgagaattgactaattagaataaaactttaatgatacgatttgacaaaatagattttaactaccatattgagtaatgcacactcaatctaaagtaatttctatacagcttttatatagcacaatttgaatgacttggcagtcctagaaagtatttcttttatatttaaaggaatcagcctccctaattgatattgttccagctctctaaatatgctttttcttcaagctaataaatattcagggaatgagttttgagaattacttatatttaaattctcggcccagcacagtggctcacacctgtattctcagcgctttgggaggctgaggcaggtggatcacttgagtttgagaccagcctggccaacatggtgaaaccccgtctctactaaaaatacaaaaagaaattaaccaggtgtgttggcacatgcctgtaaccgcagctactttagaggctgagaatcac

SEQ ID NO: 45910 - DNA, 1066 bp, Homo sapiens
ttggttacttttattacagatgtgctgaacaccttgggagaatgaactacgtaggtaatatttcataattgaaacagtgaatggaaaagcacctataaggcattctttttttttttttttttaattttgagacggagtctcactctgttgccaggctggagtgcagtggcactatctcggctcactgcaacctccaactctctcgttcaagtgattctcccaagtagctgagactacaggcacgtgccattatgcccagctaatttttgtatttttggtagagacggggtttcaccatgttggccaggatggtctcgatttcctgacctcatgatctgcccacctgggcttcccaactgtaaggcattcttaatgttattgttacttttggaaacatggtagacttcagtgtgccaattaattaagattgtaacaaagttagttttaaaggaaaattgcatatgaagtttcattttagtctcaaaaaaggatactcaataaagacttcactaatctcaaaggagtatggtattgccatctagaagctgttcttttggatctctgacagttgttacatttgacttgtggttgttctaatgcaatcttttgtttaaattattattaccaacctggtgccagagattggttctcctctccccttttacttaacctctctctttgtggatcagccacatgggaactttataatatctgatctcatgccttgctaatagaatgtgtacttctaaaatgtttttctagtatttatgatggattttttactgttcctggttatgactaatggaatgcatttgtgatgcagtggtgacattagggtttctgcttgtaagaatgcaacaaaatgatagatattttgaaacaaatgatcttttgtacagggttttccacaccagatagagaaggagaggggggtgtttctcaaagtgggtgggtagtgctgtgatgctttttaaagtaagcatccatgttcatgcagtggcagtgcctgtggctttttattcctaatttatctgtaaagtttactttaaaataattgtgatatctt

SEQ ID NO: 45911 - DNA, 1050 bp, Homo sapiens
tgggagtttgagaccagcctgaccaacatggagaaactccatctctaccaaaaatacaaaattagctgggcgtggtggcgcatgcctgtaattccagctactcggggcaggagcatcacttgaactcaggaggtggaggttgtggtgagctgagattgtgccattgcattccagcctgggcaacaagagcgagagtccatctcaaaaaaaaaaaaaaaaaaaaaaaaagctgtattttacattcagccttgaagtcaagggtaaaatattagaaatctggcagttgaatttagatgaactttgattttttttttttctttttgagacagtgtctcactttgtcacccaggctggagtgcattggtgcaatctcagctcactgcagcctcaacctcctgggctcaagcaatccttccacctctgcccccaccaagtagctgggactacaggcacatgccaccacgcctggctaatttttttgtattttttgtaaagatagggttgagccatgttggccaggctggtcttgaactcctgagctgagactatctgcccaccttggcctcccaaagtgtaaggattacaggtgtgacccaccacacccggcccctgattttttaaatttggattttaaaactttgatttttgtgctcaggtgtcttattacacatccttaatatttttagatttatatttattttttaggaaatattatggaatctaatttttatcttttttttttttgagatagaatttctctctgttgctcaggctggagtgcagtggtgccatctcggctcactgcaacctctgcctcctagattcaagggattctcctgcctcagcctcctgagtagctgggattacagtcacgcaccaccatgcctggctaatttttgtattttcagtagagacggggtttcaccattttggccaggctggtctccaactcctgacctcaagtgatccgctcacctcagcctcccagggtgctgggattacaggagtgagctactgtgcccagcctatctttcttgggttttttggttt

SEQ ID NO: 45912 - DNA, 1097 bp, Homo sapiens
gcttcataagatccattatcaaggtgaattttttttttttttttttttttttttgtgagacagattcttgctctgccacccaggctggagtgcagtggcgcaatctccactcactggaacctctgcctcccgggtttaagcaattctcctgcctcagcctccttagtagctggtactacaggcacataccaccatgtccagctaattttttttgtatttttagtggaggtggggttttgccacgttgtccaggccagtctcaaactcctgacctcagttgatctgcccaccttggcctcccaaagtgctgggattacaggtgtgagccactgcacccggccaaaatgcaacatatatatttttttgtttgtttgtttgttcagagacagagttttgcttttgtcacccaggctggagtgcaatgggaggatcttggctcactgcaacctctgcctcctgtgttcaagcaattctcctgccccagcctcctgagtagcagggattacaggcatgcgccaccacactcagctaatttttgtatttttagtagagacggggtttcaccatgttggccaggctagtctcgaacatttgacctcaggcgatctgcctgtcttagtctcccaaagtgctgggattataggtgtgagccactgcacctggcctaatatatttaataactgatgagaaatgagggtaggggggctacagagagaaggaatcagcagttgacaactgaaggctttgtctgcattattgggagcaggtggtaactgaagtggtaaacttgagagagatatgggttggaagataaaattaaggttcagttctaaatagactaagtttgaagccaatgtaaaattgtgtggcgagatagttagaaacatggaactgcaacctggggagaaggtcaaacctggaagaatgcatctggaagtcctgcaagataggacctgctatcctatatccaaaggtttcaatctccttttcactacatgtatatttcactatataggttgtacctcttgtaattcaatgtgtacaccatataggttgaaacctttgaaagaataagcagagaggaaagggccacgtcg

SEQ ID NO: 45913 - DNA, 1050 bp, Homo sapiens
accatgcccaggccagacacaccattctgtaatgtgattacattgcacataaggaactttcgccctcaattcttgggggcaaagatgtcatctttcttacgggggtgccttgcatatacttttttgtctctgggttttggcccaagttagcacttttatttcttcttctttttcctccttcttccttctttcttctttccttccttcttctaacttctttctttcttcctcctcctcctccctcttctcctcctcctccttcttccttcccctgctccccttccctccttccttcttcttctttctcctcctcctccccctcactttgtcatccaggctggagtgcagtggtgccatctcagctcactgcagcctcaacctcccagattcaagcaatcctcctgcctcagcccctcaaagagctgggactacaggtgtgcagcaccatgcatggctaatttttgtatttttagtagagactgggttttgacatgtttcccaggctggtctcgaactcctgagctcaagctatccacccacctctgcctcccaaagtgctaggattacaggtgtaagccacctgtgcccagcctatttcatcttactgtatacttccggcaactaatggcaacccctttcctaagtataggttgccagttagaagttctacagaaacttgaaaaacggagaattgtgttggcatcagcaaaccaagaatcaaaatgttcagtagagaaatgaaagttctgataagttgcagtaggtgtctttgtttttattctaagaacaggctaatgtcatggttccttctttagtcccatatagaaatcatccgtggccatgcagccttcacgagtgatcccaagcccacaatagaggtcagtgggaaaaagtacaccgccccacacatcctgatcgccacaggtggtatgccctccacccctcatgagagccagatccccggtgagtcatacaacaggtactcattaacagcagtcaggagtttactgttgctttcaacctgaaaagccatgccaggggatctgccta

SEQ ID NO: 45914 - DNA, 1416 bp, Homo sapiens
ggactgacatccagaagagttgtctcacaaaactctttcttcttctccccggatgcccgtaacaattatttttattttttaaatttttttgttttttgaggcagggtctcactctgtcgcccaggctggagtgcagtggcacgatcatggctcactgcagcctcaatatcctgggttcagatgatcctcctgcctcagcttcccaactggctgagactacaggctgttatttgtggtgatggggtctcgctgtgttgtccaggctcctctcaaactcctgggctcaaaggatcctccagtcttgacccgtcaaaagtgctaggattacacacctgtgtgtgagccacggcacccagtcacactttttaaaaatctggtgatttcctgagactggaaggttcaggttaatgttctgcttagctaagaattgaacaaaaacagcctttgttaatatctcttgcaaatgtatccattgattttcttgctttagattctgctttacacagactgcttttttttttctctttttctcaagtttgatgcctccctgaactaaccttcatctgaaatgaaaaaaaagactttgaaggtggagacatggatattgaatagtgaatatgtgccagggacagggccatgtccagacagcattatatttagtcatggttggtgtaaagctgatgaaatgcaacagagacagggatctttatctgtttaagtcatcagtatagtccaagcccctagaacagtgttttgcacatagcaagtactcagtatatagttgctgaaataattgagttgataaatcgatagtgttttgccttggaaattatgactcgtctattttctgagtagttctcattctggtcttgaattagattttaggcagcaaagaaggacgacagagggaggaaactgtaggcaattctgtggtgggaggttgtggggaaccagaggaaggaagttaacaatttttttttgagacagggtcttgctctgtcacccaggctggagtgcagtggtgcaatatagctcatggcagcctcaaactcctgggctcaaacgatcctcccacctcagcctcccatgtagctgggactacaggcgtgcaacaccacacccggctaatttttaaattttttatttgtggagacgaggccttactatgtttctcaggccggtctctaactcgtgggctcaagcagtcctcccacctcacctcccaaagttttgggattacagcgtgagccaccacacccagccgcaagttcactattgaacacagttgatgttcttggcaggcgcaattgcagattaaccaagttcttgttttactgccaacatgggcaatgtgaagtttctacctggctaggcaggattgaaggtaacgaggcaggccctaggaaaaatggtgaa

SEQ ID NO: 45915 - DNA, 1383 bp, Homo sapiens
aggctagatttatcagaattgtggagtgtgtgcaatgtgagggatttttccagttgagttggcatattctttttttgttttaagtttgtattttgtcaactgggcacagtggcttatgcctgtaatctcagcactttaggaggccgaggcgggcggatcacgaggtcaggggtttgagaccagtctggccaacgtggtgaaaccccatctctactaaaaatacagaaattagctgggtgtggtggcacgcgcctgtaatcccagctacttgggaggctaaggcaggagaatcacttgaatccaggaggcggaggttgcagtgagctgagatggagatcgcgccactgcactccagcctggacgacagagcaggactccgtctcaaaaaaaaaaaaaaattgtattttgtcttttcttggttgtataaattctccaaaagttagccatttaaaaatgtttaaggtcttattttctactttgtgatatgtgtgtataatttttactgtgcaagttttagcatttttgtatagtctgattgtccatcttttccataaactttaagcgcacatgagaatcacttgggaaagaaataggaaattcatgttccttgactccattccagagactgattgacatgtcttgggcaggtccaggaagctgctttttttttttttaaaggcaggatcttactgtcgcctaggctggagtacagtaacatgatcatagttcactgcagccttgtactcctggactcaagccatcttcacgcctcagtctcctgagtagctgagactacaggaatacacaaccacacctggctttttttactcatttttttgtagagacagggtctcctcatgttgtccaaggtgatcttgaactcctggactcaagtgatccttctgcctcggcctccaaaagtgctgggattacaggtgtgagccactgcccccggcctcctttgtgctttcagtgtcatgaaatacctgtatttgtcaagaagattaagaccatgtcttaaaaaaaaacaaaagctagtgagatacaagagataatcttaaatatacctataaagtcctaggaactgttcgtctgatttatttaggagccgaagtaaaagtgatctttcctgacaaatacagaaagagatttttgctagcatcacttcttccaaaacaattttcctcatttatgcaataagtttggattttcacttctttatgtcactaagtttctgcgtgttgctaagttcctggctgcatatttggagtctctccaacagcagcattgtcagcattcccacagtcggttcttccgtgtacttttgatttgaatttcatttccagggttatgtcttgtgtgtttggcttctctcttttagca

SEQ ID NO: 45916 - DNA, 1053 bp, Homo sapiens
tgctaatggcgggaaagtggactttgttacatttctctactttatatatgacgtgtcaaatatatatgactaggtaaatatatttaatacttaatactgccctttaacaataatatacccttgccataagatatttacctaagtagataaagtgaagatatttgcaatgtaaaatttcttttcattgcctgcttttattgccgtgtgtgccttttattcttatttgaagatcttgcagaaattttttcttcacagtcttttctcttcagtacgaatgttataaaagacttggtgaatgaagcccttccttggtaaaaggaaatgaaaatgccagaaattgaagatggaattaatgcttaattaattttcctagattgttttctgaatgtagttttttctaagaagaatgatattaaagttacagaagtaatctgtataagaaatctgagtctgtgttaaatagaaattttttattgttttgaactgatttccttcaagtaaatgtaatgaaatgtaaacctaatccagattgtttaaagaaacttgtatgaagacatcttttcttccttaatgaccaaatgtgatctaatagttcctgtacgttacttttcaactctaaatttcattaataatcatattaacggccgggcatggtggttcgcgcctgtaatcccagcactttgggaggccaaggcaggcggatcatgaggtcaggagatccagaccatcctggctaacatggtgaaaccccgtctccactaaaaatacaaaaaaaaaaaaatcagccaggcgtggtggcaggcgcctgtaggcccagctactcgggaggctgaggcaagaggatggcgtgaacccaggaggcagagcttgcagtgagccgagatcgcgccactgcattccagcctgggtgacagagggagactccatctcaaaaaaaaaaaaaaaaaaatcatattaaccctgggaaggagttctgtgtattacagattccgtttcctttccagagaatgggagagctcaagcactcaagcttagaactggtttgctgttgtg

SEQ ID NO: 45917 - DNA, 1027 bp, Homo sapiens
gaggcagaagttgcagtgagccgagatcgccactgcattccagcctgggcgacagagtgagactctgtctccaaaaaaagaaagctgaaggagtccactgaaatcaagaccagagtagtactagtaaaggcctattttgaggtagttgcaaaaataaaatctatcctagtgccagtgggtgaatgactacaaaaaataaagagtatgaatggtatggtgtgtctggcttccaaggttaatttctgcctagtgaaaaattgtttgcataaaatagcaaggcatgtcttctgagaagactagctcttaacactagcttaaattagcaatccagcttttgaagctaattgtgaatttgactcctcttgtgtgtgcagagaaattgcttctgtgattcattcctgcatcagcagtatgcagttattttagaagattgtgtgccaagagagccaggctggcactgctcaggacactctgtgactagaactatatttaactgttgtctcagaaagagtaaaaattttaagctctttgacctgttaaattttataactgaagaaccttggtgatgattctttaggtggggagggaaattcagccaatgtgtgtgctggcagatctttattctgatgattataaagtacgtattgagaaaaatgtcgaggcttgtgtagaagtataaatatgtaaattttatattgaactgatggaaatgtttctaagtcctggcgttagccttgaaataagcagaaataactttaggatatgacttcattcctaatgtgaaatagtatgcttgttcctgaatacccaaaaccatcttaatgaagattagattctggtaaaaatgagtgatttttgtgaattgagaaaatttttttagattactttctgtgattgattacagcttaaaaaataaaaatagtggtcttgacaggcaaaatgcctaactggtacttccatttttaatttccctcgaacaaaaattagtgccagctttggtggtccattgataaaatctaaaatgcag

SEQ ID NO: 45918 - DNA, 1041 bp, Homo sapiens
attatacagtttcttaaattcagcctaaggagtttgaacttcattctgtaagtattaaaggctaaagtcatgtgaaatttgctttttcagtgatgtaaaggttaagaatattctgagtatagttagaagtaagtcagccaaggcttagaaaagggtgattgtttcacagaataagaaagaaaaatttatatctttacaagatacgatacaatacataaagaattgatggggcttagtaagtggtttaccaaaaaaagacttctaaaatcaaaaagggacttttaaaaataggacaagtgataagattacttttttttttaacttgtgcattttgaagaatggcaaatttcaaaactggcattttaatgagaacctacatagtcatcaattcccatacgatactttgagctctcagaaagtataattttgattttatcgcatttctggtgatgtttcagtgaggctgaattcagtgaaatatttggcttttagtttgttgagtgggatatgtgaattccaggccaaagaagaatttctcttgactacagagaaatagtactacttttcccttctcaacataatatttcctcatacaatttaagaatttcataaagcaccaaaaaatctaattactggctgggtgtggtggctcatgcctgtaatccctgcactttgggaggccaaggcgggcggatcacctgaggtcaggagttggagatcagcctgaccaacatggtgaaacactatctctactaaaaatatggaaactagccgggcatagtggcgggtgcctgtagtcccagctacttgggaggctgaggcaggagaatcatttgaacttgggaggcggaggttgcagtgagctgagatggtgctgctgcactccagcctgggcaacagagtgagactctgtgtcaaaaaaaaattcatatatatatatatatatatatatatatatatatatatatatatatatgtttttatatatacacacatacacatacatatgtgtgtatgtgtgtgtgtatatatgtgtgtgtg

SEQ ID NO: 45919 - DNA, 2030 bp, Homo sapiens
agaaaaagaaaatcaaattgatacagcatttttatctagcactagtaaatatgaaaagcttgaaaaacattcagcaaatcataatgttaaagatgcaactaaagaaaacagttgtgacgctaatgaagtaataaatgaaagtaattctgtatctttaagttgcataaaagaaaacataaattctagtacaggcaacgattgtgatgcaacttgcataggtcacacaaaggcgaaaactgacgtacttatatcagtcttagattcaaatgtgaagcactttttaaatgatctctaccaacaaggtaaccttattttatctgattgtaaaagaaacctggaagtaaagtggacagatcctattgagagacccaaacaaaacattattacaggaaacttccttatgggcccattaaacctaactttgatagcaagtaaaaagtacagtattcctcagttatcagccgctgcagtgacagatagtgagggagaatcttcaaaatcttacttggataagcagagaattcttactgtagattcttttgcagcatccagtactgtaccacactgtgagcagagctgtagagaaaaagagcttctaaagacagaacagtgctcttcaggtaattgcctccatacagatgggaatgaaacaaatgtcactgagaattatgagttggatgtagcatcaggaactgaagaagataaaagttatggggaaaatatagtggaattatcttccagtgatagttctctgcttttaaaagataatgtaaaaggctcctcttcagaaacatgtattgtgaagaaagacactgaggacagaataacgtggaaagttaaacaagcggaaaaagcaaaagattctgtttacaaaagaagcatgactgaaggatcaactgttaatactgagtacaaaaatcaaaagaatcagatctcagaagaatcctgcttaaatgagaaaattattacaactaacttgattgattcccatctgagcactaaaaatactaccactgagtcagtccctttgaagaacacagtttctaatccgcttaacaaaagagagaagaagggggaaattaaagttagtaaagactcgcagtctgacttgacattacattcagaaatagcctatatttccaaaccaggaattctaggagttaatcatacgcctattttacctgcccactctgaaacctgtaaagtccctactcttctgaagaaacctgcgtcatacgtgagtgattttaaagaaaaacattgctcagctaatcatacggcccttatagctaatctatctcaaattttgcagagggcagatgaagcatcatctttgcagattctacaggaagaaactaaggtttgtctaaatattctccctttatttgtggaagcttttgaaagaaagcaagaatgttcagttgaacaaatcctgatttcaagagaactgttggtagaccaaaacctgtggaataattgcaaacacacattaaaaccatgtgctgttgacactttggtagaacttcaaatgatgatggaaacaattcaattcattgaaaacaaaaaaaggcacttagaaggtgaaccaacattgcgaagcttgctttggtatgatgaaacactgtatgctgagcttcttggaaaaccacgtggatttcaacagcagtctaatttctatcctggtttccaaggaagattaaaatataatgcattctgtgagttacagacttaccatgatcaattagttgaattgcttgaagaaacaaaaagggaaaagaattcatactatgtattcttaaagtacaaacgacaggttaatgaatgtgaagccataatggagcattgttccgattgctttgatttttctctttctgttccatttacctgtggagttaactttggagatagtttagaagacctggaaatcttaagaaaaagtactttaaagttgatcaatgtatgtggggactctcctaaagttcattcgtatccaggaaaacaggaccatctgtggattatcatagaaatga

SEQ ID NO: 45920 - DNA, 1111 bp, Homo sapiens
aatatagaaattttgagttctgaagaattttctactaaatttaacttgatttgcagagaagataatgcagtgtcagcagcaactgcattattagagagtgaagaagataccattagtgccgtgaaacaaaaagatactgaaaatactggaagaagtgtagagcatttggcttccacgacatttcccaaaactgcaagttcttcagtgtgtgtagcctcaaatgctgcaatacagatagctagtgctactatgcctgcattaagcctaaataatgacgatcaccagatataccagtttaaagaaacttgttcttctgaaagtccagattttggtttgttagtaaaacatagggtttctgattgtgaaattgatacggataaaaataaatcacaagaatcatttcatcaatcaataaatgagaacttagttcttcagagcattgaattggaaagtgaaattgaaatagaattagaagattgtgatgatgcttttatatttcaacaagatacacatagccatgaaaacatgctttgtgaagaatttgtgacctcatataaggctctgaagtctcgtatcagttgggaaggtctgttagcacttgataacggggagatggaagttttggaaagcaccacaggaagggagaatagtgatcagcattattctaaggaaagtaactatttttattcctctacacaaaacaatgaaacagaacttaccagcccaattttacttccagatctacaaattaaaattactaatatatttaggccaggattcagcccgacagctgactcccttgcattgaaagatagtttttgcacacatgtaactgaagccacaaaaccggaaataaataaggaagatggagaaattctaggatttgacatttattcccagccttttggtgaaaatgcagattatccatgtgaagataaagttgataatataaggcaagaatcagggccagtgagtaactctgaaatctccctttcttttgacttgagtcgtaatacagatgtgaatcatacgtctgaaaatcagaacagtgaatctttgtttactgaaccttctaatgtcacaacaatagatgatggaagcagatgtttct

SEQ ID NO: 45921 - DNA, 1034 bp, Homo sapiens
atggattatatataatcatattatgattaaatgaagataaatcttcccaatgaaagtatatccatgcacccacatgtaaaacagattacctattgttattttcctaattttttctaccaaataaaatagagtagttgaaacttcatgcaaaacatttagcttttaatgaaaaaatattttttatttaaaaacgaattgtgcctttttctgcagacattagtagcctatcaaaaaaaaattgtgggggagaaaaaggaattctgtacatcttcaaaaacattagggttaaacaaggcagctggagaagtttatatggaagtatataaataatatgcaattatattgattttttaaaaatatgagcttattcaactctgattgccaaaattaatcagcatgaacctgttttcatctttcaggtgtacttctatgaatacagtgtcctttcaaagcctgtagataaacctaggcaatgtcttccatatgctgtagtaacagtaaaatttcttggttcaaaagtagataatggacgccttatgacatctttgagattcctctcaacaggatttcctaagagagctggtaagatacacatatgattgtacttgattaatatttgtgctggtcttaaaatttctcagtattatttactggctggacacaatggttcacacctgtaatcctagcactttgggaggcggaagtgggcggattacttgaggccaacctggccaacatagcaaaaccccgtctctagtaaaaatacaaaagttagccaggtgtggtgttgtgtgcctgtaatcccagctacacaggtggctgaggaaggagaatcacttgaacccaggaggtggaggttgcagtgagtcaggatcacaccactgcgcccagcctaggtgacagagggagaccttgtcacaaacaaaaaaaaaaaaagaaaaagataaaaaaagtagtgaatctccaagtaaaatagttgtgttttacctgttttacattttatagatctagaatcatactgcaggtattttgct

SEQ ID NO: 45922 - DNA, 1143 bp, Homo sapiens
gattagctgggattacaggcacacaccaccacacccggctaattgtttgtatttttagtagagacggagtttcactatattggccaaactggtctcaaactcctgacctggtgatccacccacctcggcctcccaaactgaatatgtaacttaactgtagttaaagacagtattgaggattgtgctttgaggattgtcccagcacttggctgttcaagtaaagtatattcaactgattattctttacctttatgtgctgttgttacagatcatgattaatcgaagatgtttttatagcataagacattctaaactattttccattcttccccttactaaactgcgaggtgaacatggcagccttgacaagtatctctagagctggtgcatcttaggagtattcttgttagaaagcagtaccccactattgtctgtcattgtggctgaatggaagaagggctggctttcttctctttttttctagaggtctttttcattccctgatccatgtttgattgggtgattgcaagatcacctttcataaagaacaggaggggattaagagggacatccttgtgaaccttcttagaaccttatcctttgtgatctttctgtagaattttagcatcttttaatttggattgtgatctaatgttggaactaagcagttgataggtgtcaggagggccatcaaccatgttacgaaatggtacgaaaaatacctgcttatatatatttccctgtgtgtatactccatagctttcttttgaaatccagcttgagttctacttaaagaggttaagaatcaatatttggcaggggatggaggttgcaggggagtttggggagagagagaaaggagagggaaaaaggaaggggaggaatatttttgatacttctggtatagcaatatttgatgttgtcttaagcatttatagaatgataccatggaacagtagtcaataagcgattggctgttgttggccatcagctgtaggaatagtcagcaatagttagtttacaactttttgaagtttcttctaaagccagagatcttgatttaaagagagtatcgttttagtcacagaaatgtatagggaaaaaaatgctttttaaaaatggagtatttgggctgggcatggt

SEQ ID NO: 45923 - DNA, 1025 bp, Homo sapiens
aagcaaaagtggaccagcacagctttttgtgggggttagtggtaggagagtgttatagtgaagttctttgttctgttttctcagtctcatttctcattcattcattaaatcaatagatatttattttgcctgtggtatgagctaaccatttctctgggtctggataatatagcagacaacaagatccagtctttggccccaaagagcatacagtacgggtactcacaacatggacaatgctagataactgcccagagagcagagaagctacatgagatcattataaacctgtgcacctgaaccactgcacaagcaatgcattaactttgccttgctcattgggatatggtgagaaataactgttataattagttgtgaagcactttggaaatgaaaagagctacaaagcaactgaatgaaagaaaacaatattaaattatagggtagaaatgattctcataggtatgttcagtatttatgtcaacgatataggactattaccagggaaaagctattttaggtaaatacaattgcctagcttttacaaagtcaagaaaatacgtgtgtgtattaacaagataaattgtggaatgttgtattattttgggtattatgtgagctaaatatagttggaatatcacacatactatgaagtttctataaatctgcagcttctattaagaatttctgtatttcaatgtttatcggaagtatttctccaatatttaaatgctgaaactatccaagactattattcacaaacaacggattatattttaatactcagaaactgtaggaaggtttgttaaataagatgaatatcctgtgattaacttgccagtatgttgggttcagtgatttattatgcctggtcttttctgattttagttaatgtttttaaagtttgttaattctctcagaagatgaggatgccaatttatatcccattatacaccctcaaaagatgaatttatagaatgggccatgtctttaacatgcttctatatagtcattcttatacctaa

SEQ ID NO: 45924 - DNA, 1049 bp, Homo sapiens
atatgtatgtatttctttagccacacaaaataaaattttgtttctagtccttattaagaccaagttgttgtatactaactacgtaactatcctaaactttaattttttaaaaggaatatttttaaatattgattatttcccatctccttattatatcaaatatctcattatttggaaggagcattgcttttttctgcatattctgtaatcattttttatattctgcatggcaaaggaattttacagattaatatcacttcctgaaatgccatttttcctaaaataaccatagatcacattgccaaataatactgcagctgtcatggtagtggtccctactgtcttcgattcctttttgttgatcctgtccaatatcctatgctagaaataatgatgtctgacaaagaccatcagaaaggatactgacctgtgaactgtatggttctgttttagaggacttgtaactactagggtatgcaaagattaaacatctaatggtttgggggttttttttagccttaagaaacgtcaaaggatggtgattggaaaagagaagaagcagcacacaagggttttgtcttagaagcatttattttatttatttatttattattacttttttttttttttgagatgcagtctcactctatcgcccaggctggaatgcagagaagcatgtatttaagcaccccagtcctcagctatgcagtgccccgccactgccagtgaagaggcttaaaaaagagtgacatgtttctccctagacctctcttttagtgcctatttgtttatcagagactccatttaagggtaactgaagtgtattttcaagtgcatatgcatgtgtattttgctaatttcaaaagtttctgtgcacataaattccattacggaaacattccatatgataactaatctttgccctggtggtggttcaaaatagcaatttggttggtctgttttcaacaaattctatagaatgaattggctgttgttagaaaatgttttctctcttttctcctccctcttctcaaaatagcagatacatt

SEQ ID NO: 45925 - DNA, 1053 bp, Homo sapiens
gctacccttaaaaccatgtcaacacttccaatataatcctgaattttacaggtgttttaattctggagggggtggggattttttttttctaaaaataatttagaatacaaatttccagtctgagaaaaatattatttgaagattggttataaatatatttgaaaggaaaattcaggcattttccaaggtgctctttctgactttacacaagactcacccatttacctgtattaaaaattactttccaggaagtgccacagcaatttttcaacacctaagcaattttttaaacaagtggatatagtgttatatgtgtaccaacccatcctgtattaattgactgaaattacatctattcagctatattttcttctgaatgaaattattgtcttttatcttggctttattcacctcccacacaataagtccatctaatcatatttaagagccagaacactgatttcaacccccaaatatcactctcattgatgagagctggctgcatggattcaaatcagaatgtagctcttcttttatatgctaaaagtaatttaaaattatatcagcgatttttttcttccagagttttgtcccccaatacctttacgtgaggtcactaagaaaacttgatggtatgaattaaaaaaattaatttcattggtttatgttacttaagaacaagcaatcagtaaccccgacatatatactagtgttggtttgcagattgtatttcacatttcctctagtagcgtgaaggaatctcattagttcattataattgtggaccatctggatcactatggaacaactgaaggttaggagataatgttagtactagagctaatagcacatggtgggtgttgagactctaaaagtagcaaggatttttaaacagtcctaactgtaaaataactatgtaggcttgctaaaaaagtagtttttggtctatgaaggaatgatgtgcacttgaattactgtactactgattgttattgctgcccatcatagtgcctattaataataatcaacctgtcagattttggcaaactggag

SEQ ID NO: 45926 - DNA, 1064 bp, Homo sapiens
aaaatttgtattttattaatcccattactatatttatttgaaaaatgacagcacatatatttgtgagacatactatttattcagtctatatgcaatgtttagtatatatatgggtttatgaaaaatgaattttgcagctcctaaggagctaatagtcctcatgtttggaatgaatgagatgggccacagaaagaacacatcttagatgattacacaaagagttgagtgacagccaatatcttaacttcctgacagcgtttgcattttaagacataacacttactaatctgattacatctttggtctcttttcaggggtggtgtgaagggaatgagagaaaagaggctcttccgtgatattgtaaatcacaattcctgttaaagtctgtctctgatgtccacccagagtgcaaaattgtattgattacatttattcttctaattctcaagctgcatgttaaagcaaattcagaaaaaccttaaatattttatactaaaatattttatcgtaaaaggaaaaatggagaaaaatgtaacaaatattcatatacctgacccagagaacaaacatgctaaagtttcatcctgtttgtatcacattctttaaaagacataaaatgtaacaaaatctattgaagtcatcactgaatcccttctcagtctctatttctatagcttagatggcattctaataaattctagctgtagtttatctccccatagtacataggctccatcacacttgctcacaggggcctgagtaacaacacaaagctattatacttcaaagcaagggtggatgattatgttgcatttttcttaattcctcctacagagaagaaagcagccctccctgcttaaatcaaagaacaatgttacgcattttctccgctcactttgtagtgcatcacaaagcaaataaattctgtggtatgtaggtattgcagagcttccattagcattacacatctgggccttttggtttttatactcttggtaaataagggaaagaataaatcaaataccttactcagaccaaatctacattacatcaacacagccagt

SEQ ID NO: 45927 - DNA, 1029 bp, Homo sapiens
aagcttttatttctctgttttgtggacgcctcatatgatagaatttacctcgtgaatctctgtcactctatttgaaacatgaaatgtgatacaagtggattgtatttatagagtatattaaatgggctatattattaatgagatgtgttaaaagtactaaaagttcacatttgaagtgagctggcaagtccagaataagtccttttaatttttataccagtgtttattcctgttccccgggagaggaggcatttttttctgtcaacactgggcgatttaagaactgacttgggggatgaaaataactatggtgagtccacaggggcaaacagttctgctccagccaatccacatctgttcaccttaagtagagaggctggggtgagtcaatatttactcagcctcagtgcctcagaaaaggtgatgaattttatcttatgagctgctttcagtcatcatgtatatagttcacacaccattaataagaagactcattcaccatggaaataatctgctagtctgagagaatgttggtccctaagacaagcatcttgaagtatcaaagtttcatcacagatgtttactacttcctgtttctgtggtctaaaattcacctcaaatgtgtagttaacctgtaagtgatgaaccacttccatcacttccgcaataaaattaaaacgtgtctgctggggcaccccctccccatttgtttgcttgtgtgtttatttttgcagtgactctagggctgccattgaagacacatttttgtagcctttattcagaaagaccatgcagctctctgtgccttttagcaggatacgttttctggaaagaataaaacagtaggtagagggaccttataatttatcatccaagttggggcactctgagagtggaagaggcgctattggttaagccagaataataggcataaactgggatgtgtggtcacttgagctatagggggtgtaggggaggaaaaggtgtttcagtaccactatgttcagaaacattctctggtgatgggat

SEQ ID NO: 45928 - DNA, 1050 bp, Homo sapiens
gcagacagtggtgacagcgatagtggcaatgacaataacctgggagtgctggctagagagttcttgcccggttaactcacccccaagagcggagcctcagagacccacggacccacactctggacaatgctcttcccaaaacctctcctcttcccaacacctaattctcactttttcttattattgaaagaaactgaattttgtttcgtgcttggatattgaagttgtcagaagtactttaatttgctttaagcttattctggggagttctaatagggaagtagcactattcatagttatctcaaacactagaagttgtttgagttttgtgaaacaaacgatttaatccaaagcagaaaatgagaaaaaactcaggtcactgcaagtttagttacagctgaggtgattaacaatagttgtaatttatgaactattgctattcctacaatagtcatattttgccaattgtttcatgagctttaacatttttttggccttagttttcccttcagatgggtaaaaggctctgtagtaaaatcttttagcaaaaagaaagtctttatctctgtttaattaagtgtcaagaacacagtggagaggatttgtcatttgtgataaaattagaatgtagtcaaacaacgtaactggagaccttcaccccaacctgattattctttgtggttacctgggtctcagtattctgtatattttaattcttagctcagagaaggaatttacagcacagtacctgaatggggagtgtgtttttggtttcaagtattttgatggtttctttcttaaaaggagtctcatcttctgattttcaatttttccttcttaaataaaaggcttgcatttttcttttacattatcaccagatggatgaagagaagggaaaatagaagcctaggatggtgataacaaggggttagaaccaagaaacatagtatttttagaaaaatcaaggagcaagacagcaagagaaaacttgcaacagaacttggaataatcagttgatcggatggaagttccaagcttttgaaatggacc

SEQ ID NO: 45929 - DNA, 1047 bp, Homo sapiens
tgagcctgggaggtcaaggctgcagtgagccgtgatcttgccactgcactccagcctgggtggagtgagaccctgtctcaaaaaataaaaaagaagtatactagtaaatggtatacttcatggtaaatgaaaatcagtctttaccatgtcaagccctatgccagtcagattaagggctatccttccagaatttttatgtacaattgaattcagcctgtaattttatgtatttttttaactgaatcataccatagatatatatttgtttttccatttaagtggattttgaagattttttttttcatgttagaatatatctattgacttcattatttttaaagctatgttgattctatagtatggctataactaaaattatttaaccattctgctgtcaatagttttttaaggctacttctgttttttgttgtgttactatgaacatatttatctgtctctcctcatatgtgcgattatttctctatctaatatctagaaatttgagttgctgtgttaatgggtgaattaaattaaaaatttactacgtactactaacttggtctctgaaaaagctataccagttttccctccaagtttgaacttttttaatgggaaaaattggaaacaaagtaaacatagttaattaaattttgtaagctcaaatcacaaactgggactttgctctgcttttaacaaaattttatttattatttacttatacatttgattggtataaaacttctcagaaaagcttaggacacttggcttgttgatttatttggcagttataatttaatagacttcacacgagctctgagttagaatgaatctgagtgtttccccatgactgactgataagatgtttctatataataaacactaattaaaatgtgatcagcttggaataatcaagaaattacctgcaactaaaagatctctttcataccaaaggtcaggttaaaagttgagttctttagtatttccttaatatttcattcccatttttacaactcactaatttcttgaatcatcgactatttttttttt

SEQ ID NO: 45930 - DNA, 1107 bp, Homo sapiens
aatcagtgttcgtatgttaattctgtcaagtggtttgcattgcttgtgtgatgtgcatgaggaaactctcagtgtgcaacctgtgaatgaaaactcaggaactgtcaaatgcctgttctgagctgtgaatggtgaacccctgggcaagtacagtgaagagactttgagtgtcagagttctctggcgctgcccagtgaaattcccaggtacttgatttggagctggtcctaagaccgtgttgtagatgaatccctctaggtttggcagattatcattattatttttatttttatttttttttgagatggagtttcactctttttgcccaggccggggtgcaatggcaccatctcggctcactgcaacctccacctcccgggttcaagtgattctcgtgcctcagccaccaagtagctgggattacaggcatgtgtcacccacacctggctaatttttgtatttttagtaaagatggggtttcaccacgttggccaggctggtctcgaactcctgacctcaggcgattgcccacctcggcctcccaaagtgctgggattacaggcatgagccatggcgcccggcccatattgtcattttaaatccaaatgaagattttaaaaaaaattcagaatctattttcttaggaactaatggtgccatgtatttttccttttgagatagaggcattcaataaagttgaaaccagcacatccttttcagcaggtctgctagggagcagattaatggaaaataaaactaagactccctggttcattttgggctcgttccagctgtgctgtggattaaaacgacttcagcgttgccctgtctcacccctccatcctgattttgtgttatttgatcttaatattcatatgtaccttggatcagtgaatttgctatttttctcataacgtcattcaccaattctaatcctctaattcctttcatgcaaactcaacaatatctctgtggtgccattatttttcctgatcactagctccaagttactgggggaggatttattttcaaggtttggcatctgaatggcccagaccataacacccagtggctttctccagctcattattagacagaggggacttg

SEQ ID NO: 45931 - DNA, 1062 bp, Homo sapiens
tggctcactgcaacctccgcctcctgggttcaagcaagtctcctgcctcagtctcctgagtagctgggattacaggcatgtaccaccatgcccagctaatttttgtatttttagtagagatagggtttcaccatgttggccaggctggtctcaaactcctaacctgaaatgatccacccgctttggcctccaatagtgctaggattacaggcgtgagccaccgcccccgcccagtaatggctctttttttttttttttttttttttttttacttggtgtgcctaaagagaaatagacccttctcagttatggaccatattggtagattcaaaatctatactagaaactgttatccctatttttagatttgttggcctgtgagaaatttattaatgtaaatataaaatgttgcattttaggctaacagcatataatctctgattgtcaacaataactcagaatttgaaatgtccaagttctatatggcatgcctgtgagggtcaaaaactgcaagaattggtctggaaatggtggctcacacctgtaatcccagcactttgggagatggaggaaggaggatcacttaagcccaggagttcaagactagcctgggcaacatagtgagaccctatttctacaataaatttgaaatattagctgggcatagtggcatgaacctgtagtcctatctactcaggaggctgaggaaggaggatcacttgagcccaggaggtcaaggctgcagtgagctatgactgtgccactgtaccatggcttgggtgacagagtgagaccctttatcaaaaaaaaaaaaattgtaagaattgtcatcttgatttaatatcaaggatacaaacttatggggagggtttttggtcaaagtgttaatcaagtgaataccagtgtagggaataggatctctgctcctggatcataagctaaaatgagaagcgccataaagtgagttaaagaatttctgaatcgtgggtcacacttgtaatcccggcactttgggaggccaaggtaggtggactacttgagtccaggagttcaagaccagcc

SEQ ID NO: 45932 - DNA, 1033 bp, Homo sapiens
tgcccggccagaaccatttatttatatatattttattttacaaattttacagtcatagtttgatataccttatctagattgttctagggcacagattcgagtcccctggcctttaagaaatgtgagtgccagagagtcacttgcccactgttgagaaccagtgtctatttctcaaccagctttgtgttatatactttttgcatatgttggaactcccttgaaatattaaaaattttgcttactagtgaaaaaaatgacccctcagaaggaagtcaactacatgtactgatcatggaaatgaagacaaaagtcaagtgttttaaaatagcagtttattaggcagcagatagcaatgtaaatagattaaattgtagaacattggactaacttgatggtttgcatctgtgtgaagtggttcacgtgactccatttttttgaagaaatcatatgctgtaatagttatgatttgggataatttgagggtgtctcaggaggtatcccttgctactgtcagagtctgtgctttattcatttatacaactggcatctaaaaacctattatgggttaggtgcgggggggttatagtggcaaagaaaacaagctctgccttcatggagctcatgagatatgtacacagcatgccaccagacagggatgagcattttgactttaattaattaattaattagtttcttgagagagggtcttgctcagttgcccagactggagtgctgtgacatgatcatagctcactgcaggctggaactcccaggctcaagaaatcttcccaccccagcctcctgagtagctaggactataggcgcatgccaccatgcctggctaatttttaatttttcacagagacatggtctcaatatgttacccaggctggttttgaactcctgagctcaagtgatcctcctgcctcagcctcccaaagtgctgggattacaggtatgagccatcaggttctgtcgcattttgactttagacagagtgatcagggaggcctctctgaggacctaacatttg

SEQ ID NO: 45933 - DNA, 1042 bp, Homo sapiens
cctcctgttgttccagggctttgtcgaaggcatgaatggggaagttgtagatgtcgccatactgaagaacataaacacagattggctttaactacatttggatattacacttgaagttccactttctgtggagaatattactttttcctcagtgattaaatcagaatacttaatttgatgagtaatatttttaagtgtagagccagcagtgtcttaaaaaagcatgttcttttgaacatttaaatcatctgcagttagtatcaaataggtaacttctatggagttacattttaaaataatttaaaatgtaatagtctacaaaacccatgcattgggacaaatgtcattttgctgacaaggggaaataataaggaaaaagcatactttagtcatgttgtctgtataaacaacactaatttttaaaaagagaataaaaacttatttcaaagagccttaaaagactagggtaatatgcaggagaagcaaaaccccatggcttttatacagaaatctggaattgttgtcttggggaatggagctgagaataatggcaaaaagggaaaggtctcttatagtgaatggagtatcaagggtaaccaaagcattttatgtgcttgcattaattaaagcaaggaagccaggccgatatggatttattttattccagggataaaattcgagtggagatcttcatatcatgttaaaaaacatttcccagccaggcacagtggctcacgaggtcaggagttcaagaccagcctggccaagatggtgaaaccctgtctctactaaaaatacaaaaattagctgggtgcagtggtggtgcctgtaatcccaactactcaggaggctgaggcaggagaattgcttgaacttgggaggcagaggttgcagtgagccgagattgcaccactgcactctaacctgggcaacaaagcaagactccatctcaaaaaaaaaaaaaaaaaaaaaaaaaaaaaaaaaaaaaaaaaaaaaaaaattcccaatatgtcttagcaacatactaccacttaaaatttca

SEQ ID NO: 45934 - DNA, 1050 bp, Homo sapiens
ctcttccaattttaatatccagatttagagtatgaacatagcttttcttcctgattccagagtttcctgcagacttgtggtcttactgaaggccctcttgaaactgatttgtgatgtagcaagggatccaaaccttacacctgagtctgttaagagcgccctgctacaggaggccacagactgcctgattctcctggaccgctgttctcaaggacgggtaaaggtaaggcagactgaaacttggtttcagttgggcctcattatccttatgtaattcccatgattgattataatttactatgtatgtgcctgaccaagtctggaaatgaacatggagggttttagatctccatatgagccctctagcctcaaaagagcttgatcttttttcttattcatcttttaaagctattcagaaccatttagaactaaaggcaggaggatcagcacatgtcactggggctaaggacgagacagtatgggcaaaagcattatgatcaaaagtttgtaaaatttaagttctgttctagtcttctgaattaaaaaaaaaaagtaaaaataatgggctataagctcccaggaataataacataaatagagcatttcagatgtttccagttttttagggacaaccatcttttaggtagatgtttttccctattcttaatttatctacatggaaattcttcctttggtttcatattccacaaaagttaacttctcaaagccacagcatataatagctgtgtacttctatgtatttaataaactactgcctcatttcttaccccttttagaaatctttagttgaagattgaaggtagcatgaaaagaaattcatgccataagtcactggacaatctacccagcaggaaaaaaaaattcatatcctaaaaatatgtagagatagtatgaattgttattttaccagtttattcaaactatttcatcttagctctttaatcttgggcagttttcaagccctagatccaactgaatttgccttggctggaattctgctgtttcatgagccagcaggagatttgcaag

SEQ ID NO: 45935 - DNA, 1050 bp, Homo sapiens
tgtctggtccctctgcacagctccaaccaacaggactgtagggtgatgacgatcactttcccagtgatgagaagggtggtctaggactgggcttctaccctcagtgcaagaccagtgccagatgtgcccccacttcctgcctcctgaagccttcttccctgctactccatgctggtggcctcacccatcaagaccactgtctcctggtactggactatctacctgccttgtccctgttctgggggaaggtgtccaccccgatcaagaacatggagaaagtcctctttcaaggctcccattaggaggatgagctgccttgacccagaagggatgagacgggctcttacctctctacaaccttccctccccttcccactccttccggagtaaggttagaagggaaggaaggaaagatcaaggaaccaagcgcctccacgggaggcgagggaggctctgtatgaaacagaagagcagggacataaaggaaaatgtcagtgtttacatgggacctatggaaacaaaggctggcgggcgccagctgactccagagtaagagagggcccttcccctgccaggacccacggtgctatccattcagtctcttcctcagttaatctcggagcttcctattccatgttgaggtttgtgggcccctctagaggagggctagttctatacttaaattgattcccaggggccttttttttttttttttttttttttttgatcaaaaggggtgtggggatgggggtgtctacggttaagcaacagatacctccttccctttgtaaatagtatttttatacttcatcctcgcctctcaggctttagatacgaaatctccagaatggaagggggtggggattttctgttcctccctggagtgggtgagggtgggagaaagttacatatttaaagaaaaataaatttaataacaagtttctctaacctacttttgcttgtggttgtggctgcctggcccttttctgccagtagagggaaaaaagttctcaaactgcctcttctcacttttccatacccaaatcaaac

SEQ ID NO: 45936 - DNA, 1035 bp, Homo sapiens
acccccttgcaggtcaggatctgttcttgcagaaggacaggtttgagagctgtgaattgctgatttctttttctttggctgtggtcaaagaacagaacagggctgggcgtggtggctcacgcctgtaatcccagcactttgggaggctgaggcaggtggatcacctgaggtcaggagttcgagactggcctgaccaatatggtgaaaccctgtctctactaaaaatacaaaaattagccgggtgctgtggcaggcacctgtaatcccagctacttgggaggctgaggcaggagaatcacttgaacccaggaggtggaggttgcagtgagctaagatcatgccattgcactccagcctgggcaacaagagtgaaactccctctcaaaaacaaacaaacaaaaaaaaacccaaaaaaacacaaaaaacagaacagtaaccacatgatgctaaaagctgaccccactgtggtgctactgagcaccacctgttcctttagtaatctccttcgtcaccctgccctggtctgtagcctgcctgaagcctgctgaccctggagtttcacagtctcagaggcccactggtacatggtagcctgtgaatgtctatatatagaaagacacacaggcgcagaagccaccacttcctctccctgcttctcggtttcctcctcagccaaaataggccccacttctgacctggtgagctcagcggccaaggccagcccctcgctcattcttccccctctctcagagctgacctctgccctacacaggaatggaggggccggggaagtacaaataggcaggaagggaaacattattttcaggacctggctgcattgtttgttctaaaagggaaaagaggaaagggagagcccactggcagcggctagaaatggtctcattgaaatcagggtatttttagttgctgtgttcacccaacagctgagaaggccacctgtccagactggttggtactaggtccccagctgggattgcccagggtttttgctttttgctctggtttccttgcaag

SEQ ID NO: 45937 - DNA, 1050 bp, Homo sapiens
gggagcaccaggtcttgttggaagggaagtcctgagccccttttccagcatagactgaagtttgtcactctagccagtctgccatgatgtcctcatggaaaattgttcttctttgacccacagaaagtaaatatttgggtggggactggtggtgaaaagcactttctctctaacccctactagagcctagacacaaggaacttcctgttgggcacagcaaagtttagtagctaattatttctttcatttcaacttaatcaaaaagtctttcacaacaagaacttctactttctgttttcccacaatgtgtaggtcagtgcataaagcaagccctcaataatacttgctggttgactggtgatccattagcggagggcagtttctgggcaattttcccaaacatcagtcctgctgctttgaagtgggaggttttgccaaggggaccaggttattttaagaaaatggggaattatttatctgttaactagttattgagaacaagccaaactctaggctaggccggacactggagaatatacaaaagtccaagttggagtcagcaaacctaggagggttcaggcttttttttttttttctttttttcttgagtctcactctgtcgcccaggctggggcacagtggcgccatctcagctcactgcagcctctgcctcagctcactgcagcctctgcctcccgggttcaaccaattctcctgctccagcctcccgagtaactgggactacaggtgtgcaccaccatgcccaggttttttgttttgttttgtttagagacgggagtctctctctgttgcccaggctagagtgcagtggtgtgatctccgctcactgcaacctccgcttcccaggtcgaagtaattctcctgcctcagcctcccgagtagctgggattacgggtgccagacaccaaacccagctaatttttgtattttagtagagatggtgtttcaccatgttagccaggttggtcttgaactcccgacctcaggtgatctgcctacctcagcctcccaaagtgttgggattacagg

SEQ ID NO: 45938 - DNA, 1050 bp, Homo sapiens
tttttaatgtgtacaattatattattggtgtataatgacagtattatttcttctttttcattcaatatcccttttatttctgtgttttgtcttactgcatggactggcatctctagtaaagggttgagaagaaatggaggtagatttgtttcatgtgtcagaaggaaagctttcaaagtttattgaatattatattttctataatttttaaatagataaaatttatcatgctaggtaaattacttctatttcttagcactagaagtattttttaaaaatatatgaatggatattaaattatatcaagcttttttcttcatgtattgaaatgttcaaatgttgttttctctaatatcttagtatgtaagattacaacaatttatttactaacgtaatcaactttacattcttgcaataaatccaatttggtaagatttattatccttttttatatattgctgcattcattttgctagtattttgtttacgatttttgcatctatgtttatgagtgggattagaatatctatccttgttgagtttgatataaaggtaatgctaacctcatgttgtctgttaggtagaggttgtgtatgattgaaattattttctccctcttgaataattggtagaacctcttggagaagccatttgtctttgataggctgcgatggtgaaagagttttttttcttgaaacggagtcttgctctgtcacccaggctggagtgcagtggtgcaatcttggctcactgcaacctccgcctcccaggtttgagcaattctcctgcctcagcctccagagtagctgggactccaggtgcacaccaccacgccaggctaatttttgtatttttagtaaagacggggtttcaccatattggtcaggctgatcttgaactcctgacctcttgatctgcccacctcaggcttccgaagtcctgggattacagatgtgaggtgaggcactgtttttttttttttttttttgaaaggctcttgcattgtcacccgggctggagtgcagtggcacaaccacagctcactgtagc

SEQ ID NO: 45939 - DNA, 1029 bp, Homo sapiens
gtggaagttttctttgatccaaaccatcatttttgaaatacattttcatttgatatagaattttgggatgatagtttttcttttccttttggagctttaaatatatctttccactgtcttctggctttcactgtttttttttttttttttttttttttttacatgacgctcagccgtaatttctattgttggttctctgtacgtaatataccattttcctctgactgctttcaatattatctatttatcattagttttcaacagttttattataacttgtcaacatgtggttttcattgtaactaaccttccaagggtttgctgaactccttagatccttatgtttttcacataaatttggaaaaattttaccatatgtctttgaatatttatgtttccccattctttctctccttgccttctggaactctaattatccatatgttagatatcttaacattgtcctgcaggtgattgaggttctgttccttccttagaagacttttccttctttttgtccaaattggatagtttctaatgagttaccagcaagcttgctggcctcatctttcattgtctccaatgtgcttttaagtctatctaatcatcttttcatttcagatattgcaattttcaattctaaaattctcatttggaccttttctatagttttcatttctctgttgagattcctatctatttgttcattatgacattaatttcttaaagtccttgaacgtatttttaatggtttctttaagttcttgtctgctaatgctaacatctgggtcatctggtggttggtttctatagacaacattaaatttttttttcttgactctaggttacattttttaaattatcccccatatataataatattttacatataccagacattgctgataagacatagagattctggattttgttatctttttctgaagaatgttaatttttatttcagcaagtagttaacttggctgggctcagctttaaaccaccttcctggaataggcaatagtttaa

SEQ ID NO: 45940 - DNA, 1024 bp, Homo sapiens
ttgttgccacctaacactgactcttccttgcgtttgtgtcatcaggccagcctaggcagatacccagagcgggttctgtggcccctgggtaggttagcaatgttttctgccctgggggctgggcctgccagcacaatggtgtgcagggcaggcctctgagaacttggaatctgattaggcagctgtcacatagccccaaggcagtgttcctcaagggtgggcccagcagcaggggctgaggcagggtttgaactgagggcggaagtcaagaagcacagagaaggggagatctctccacagccagaggaaggaggagccagcagtggaggatgcaggcgctgctgagtgcccgcctggcttttggggcctcgtccccgcacaaggagcctgctccgggttggtcggagcatcctgccaggcccttccaaggatgggcagtgcagcccagccagcacattctgctcagctggttttcctccagctcttctcagcgcgttgttacttctgctgggcttagcacatctcctcatccctcccccggctcagtccagtgcaaaccaattctccaggcagagaggagtattgggttcagatcatctcttcacggctgctttcagagcactgcctctcctgctttcagccctgcaagtggagcgtgcggtcccctatggcatggactggcccgtcgcacactcagcagcctccccttcccagggcttagttcagtccaaccaagagaactggagaacctgatccacgcctccttgttctaactcacttctgcttgactaccttgcttttgttactcaaagtctctctctctctcttctcgtctccccctctccttacaaatgcctttgcagcggccctgggagtgcacggcagcaccaataacgtctccatggtttcttgttagctgctctctaagcaggaaagtgactcggcctgacaatataatttacattgctgtataaaactatctgtggaagccaagctaatttgtgccagattaggctatttgtct

SEQ ID NO: 45941 - DNA, 1100 bp, Homo sapiens
tgtgtccccctccctctgcacctatcccactcctttttacatccctgtgtgctccccacaggcagtctgtatttaatttagagtagggaattactaatcgaattttccttccagtgtgtggagcgccgccgccgctgcctgccatcttgctacgcctttgttttgtgcttcccacctcaaggccactgtacaaatgtgtttgatttgtggttgtggtttgtagctgtcactgatttcttttttgttgttgttgttgctgtggctgcaactgtttccttgcagctcaatttttagctgagtgtttgggtagtaaatatggtttacaccaactgtgttggaaataatggcatttatgtgctgaagttttttccaaaacctgtgatgtgtgtatacaaatagatccacggcagggcccctagactggggagaacacagactcaataaaacctttgagatggagtataaacaggtgtctgagactagggctaggccaggcggttcagaaaaataccccccacccctgatgttggctctaaacttaagctctaccataaataccttgcttagcgttgggggaggtaggagatatttttgtgatcgtatttatctgctaaatgttcgcttgtatccttttgagcatctcactataaacttcgcaatttttctattcactcaccctcaatggctttaaaccttaactgccctggatcttagtattggaaaaaaatgtgccaagaaacaatgggattggcctatgaaactggcagccctcttttcttccaaatagttgccagtctgggggttctttggtttatggggtgaatctaaccattttgaacaatgccttttaaactgtatcatgtgactttgctaatcccaaccttgggcagggagtacagagttagagaactctaagaggggggagtcaggctgctcttggtagatgtggctctaccctctgaatttgggtggagtgggtttctttgatgcctagattcttttatttttcccttttttttttttaagagacagagtcttgctctgtcacccaggctggattgcagtggcatgatcataattcactgcagccttgaactcct

SEQ ID NO: 45942 - DNA, 1046 bp, Homo sapiens
gtaggagcttgtatctaggttttgctgagttatactgtgatcactgttcccctttaaatgtgttttgggcaggagaacaacattatgaaaaaattctctcctttctagtttgattcattgttttcctataacttagaaaattcaagagagaagaaacttactgggaagtgattacctaattcctgctttttgtccttttaaaattttacaatggctagattctgatcactgccccattactcctcatctttgcaaacatggggcaagtggttatggctgtttgcttaaaaaatatgtcttctcctctaagccagtgagcttctggagcccagtgagcttgtgtttgggcaacatgggggctagaaggcctatcctgttatttgctctctgaagttgggctgatcatatattcccagagcttgaatttgacaagcactcactgtctgatataaacatgtacatcatttatagaatctctgtgtgtcagaagatcgtgatattttagagttgaaggaaagactgaagttctatgaagtcaaggcttttgcccaagcagaactgggatgggactaaccactttagacaactaaacaaaaaaatctcctgacaaaacaaaatagagaacatggcaatatagatctaaagactttgtttacaatataacttggaaatgtcacctatttttatttattactattttatttattattaactctctttaattttgtcctgagttgatttttatagcttcttttatagaacatcttctatttactctctgttctctgtcttagagcagctttcatggtaagccatactgttctgacctatgggtggcagaaggcaaagattcctgtaaggatgcaaggctttctgcactctcagcttccgatctgaaacgagctcggcctccccacgacctgatgaggtttggcagggtccctgagtcggactggagtgagctattgaagtataagtctgctcatgtctccccagcctgatcctggtgatggctttccatagcttcacgatgagagaagcccttt

SEQ ID NO: 45943 - DNA, 1032 bp, Homo sapiens
ttctttggggcatggtgttataaattgggcatgtgatgatgtgtaatcgctaactgaaaagccaatacattttcactgtaccggccacaagacaaataaacggcaaaatgaaaggtttgtgctctttaacaaaggggaaagcacacaacagacatattaaagaaaaaaatcaaattgcaaattgaaaatgttgtcatcttaggagacttgttttcttggggcagtctggctggtgcctgcctcctgagagtggggtgtcttgatggctgggggtggggagggtgaagggcaatgttttattcctcttgggaaccacattattgttgggctttgtaaaccctcaggctattgccccaggagcttatgagctgggatgcgggtggcccttggttgagaacaactggtctatggtcagagacatttggagaaatagataaagagaaagataaagagacgcctacgtgtttgtgttcatagagtgtatgtcgtagagtgatcgtcactcagtagaaattcagtaaagcctcttgttgatggtgatgtgtgtgtagggcagtgttatctataataagggctttggaaggaatgttgctcagggtgttctgattcggtgctctccgtagaggttgagcacctgcctgctgaataggatgagtgcgtgtgtctgtttggagcatattttgagaatgtttaggagagaagttctctcatccattcatattcaacttcacgacctttggaaatatggtctgcagggccatggagttttattttgttttctctttcccaaagccccgaaggaaatgcaataaaaatgaggactggggagtagtttcctaaaactgattaaagcaaaagataatggggaataatatatattgttattctagaaaaggttagagattttttccggaaaaaataaaagagaaacaaaatcttcaggcttggtaactaatgatgttcgtgaagttaagatgaatgtgaacagagattaggggctctcttttgtaaagaggattcaactatgtgagc

SEQ ID NO: 45944 - DNA, 1092 bp, Homo sapiens
ttcctctgtgatgggaaattttttaaaaagtctcaggaggtggtgatgagacccagggtttggaagggagttagagtactcctggcacatctttttaattttattttttaaaatgttttaaaactcggatagcctttttctttctttctttaaaatattcaacttttattttagattcagggggtacatgtgcaggtttgttacatagatatattgcacgatgctgaggtttgggggtacggttgatcctgtcacccaggtagtgagcattgtacccaatagttagtttttcagcccttgccccgccccccagtagtccccagtgtcaattcttgccatctttatttccatgtgtaccccatgtttagctcccacttataagtgatgacatgcaatatttggttttctattcctgcactgattctcaggataatggcccccaggtctatccacgttgctgcaaagaacatgatttcattattttttttatggctgtgtagtattccatagtgtatagataccatgttttctttatccagtccactgttgatgggcacttaggttgattccatgtctttgctatggtgagtagcttttgcacatcttttgagaaaacttcttttcatggtttgggggcccaagtgtgatgaagaggatggactgggagcagccagctctgctgaagggtctttgatgattcctcttgttgtttctggtaaaattatgttgatatggaatctacttaattaattcaaccagtttgtcacttctcaagttgtcagggattcagccctgggggcaaagatagccagcagaggtctccagggccctgcacccagcagcccgccgagctcaggcctgggcagggcagagaattaaaagcatttagttaacttctccttggggacacaaattcagaccttcttagaacacacccagtcccttaccactctgcaagcaaagcatgatattggtttctttaaccccaataggttttgccaaataagagagcgttaatatccccctcctacccaccgcatggattgaattacttaaagcgtctttttggagatgtcagcagtttaatagagg

SEQ ID NO: 45945 - DNA, 1026 bp, Homo sapiens
ctcttgggtagagaatggatttgaagctggcctaacctagaattggacagacaaaatgggaggctgttgcagtaatctagatggtggatggtggtggcttggactagaatgatgtccaagccacctgtggaggtggacagaggtggtggatttaagaaatatcttggaggttcaactgacctgacatatgatggattggatatggtagggtgagagggaaagaaagtaataagaatgaacacataaaatcaggagagcttggtgttgaaagtgaaccaggaagtggcagctgctttctttcccttacagtcactgtgataccagggtgaggtcaccattacaaagacagctttgggctgtgacacctgtgagtggagatttctgttggagatttctgttgaagtgaattactaggaaatgccattgaaaccagggcgtgtatgtatgtgtctgcaagtgattacccactcagtaccgccaagtctttgtcttgtaacagcagagctgctgtgatctcattgatgtgctgtcacacagcagatgaagtcactgctttaagggatataggactaagaaaaggagaacataatatataacattagtaaagttagacccataaatgaaaaaaaaattctcaagtaagtgaaccagttaaatgttttttgcattacgaactgtaagcatagaaaagagtcttgtgcctttctcattttacttaaactgcctttggttacaaagacttctattgtatttctgtaactcccatcagaggaaggtttttataaatagtatctgatatgtcattttaattgtagttattaactaaaaaatgttataattacattacaagcaatccacatgcttattaaaatgccatcaactctaacatgtatttgctgacattactcttcctatcccttaacaataatcttagacatccattaagatactatggttttcattgctatacgccctggaaaattgtgcttcttaccctatacttttgaaggagggacagctagctct

SEQ ID NO: 45946 - DNA, 1092 bp, Homo sapiens
atttgttgactattttgttacacttttaagaaccaagactagtacccatatttcctgtgttctaggctatcatatctctataactgagattcagaatatcattaaagtaagaaatggagcttaaaagtattttaactgatacgtcattgtttgaaagttgtacaactttcataaacatatttcataaacatcagttaaaatgtcgttctttatgattgctgggatctggctcctgcaaccctatcctccctgccagtggccccttcagccaccgtgacagcacttgagaggctcagttctgtggagcttatccagattattagagttcaaattcaggaaacctgaatattcagcttttcaatgtattgtgaactttaagtaaaaacagagcaaacagataagcactggagaatatatcctacacagtagtccttccatcagacagctctccaagttttgtttctcatttttctttcttctttctggcctaagctctcatgtatcccctcctatactagttttgcttcctgcttggagcagaaaaggaaggctgacagcaaaacaacagagcagttatcagaactttgagatctctaatcagaaaataccattcctaaacctctggcccactaatcttctaaatagcattattccatggtctatttgtttctagaagcaaacttaaaaagcaactaaatcccactttatcctaattactttgacttgaaggtcatcaaataaaggagagaacttagtaaattacccaggcagcctcacatttcctgatctgtcagttgtcaaacaccagttggtagcaaaatgctgctgcctgtgatccttgactgagttggatgtttctgggagagacttaatttatgtaaaaggtacttttcttttctttctgaaggaccgtataattgatgccggcccaaaaggaaattattctcgcttcatgaaccacagttgtaatcccaactgtgaaacacaaaagtggacagtgaatggagatgttcgagtgggactatttgctctctgtgatattcctgcaggtaaaaaagtgactcgttccccatgctttcctccctaggaaga

SEQ ID NO: 45947 - DNA, 1047 bp, Homo sapiens
ttgctttctttcttacctctgaaggagaaaagaaagttgctacttacatgtttgaaaaacctctcaaatctactcagtcaaaagattttatgcttcaatttggtcatatgttaagagtttagcttctaaactgatacctcagtagcccatagtttaaaggagtaaagagtacatggatgcttttggtactactcagaagctctgagtttctggccactgaaaccctgaaaagtagctaaatacgttcacttgctattttaatccatcactgtagatatgactcagtccctttgttattttcccccaatttgaaacaaatttaatgtgctgaaaagataactttctcctttttctttctttttctctctcctcttttctcagttattaagactgtttatttgtttcaaggtggaagattgctctgctgtgaatcgtgcccagcttccttccacccggaatgcctaagcatagaaatgccagaaggctgctggaattgtaatgactgtaaagctggcaagaaactacattacaagcagattgtttgggtcaaattgggaaattacaggcaagtttttccaagaacaaagaggaagtattcaatcattgtgcagaccagtttcatactctggatacagagtgacttggagatagataggtagacagcatggacctacttccttaaaaaaaaaaaagaaaagaaccatgttttgaggctgggttcttaaggggttgggaaggttatgttcctaattcattattgaatttctttttctttttctttgggattggttggttgattgtttgtgaggcggtttggctctatcaccaaggctggagtgcagtggtatcgcagctcactgcaccctccacctgctggctgaagccatcctcccacctcagcccccaaagtagctgggattacaggttcacaccaccacccctggctagttttttgtatttttagtagagacaatgtttcgccatgttgcccacgctggtctcaaactcatgagtcaagcaatctgcccacctcagcctcccaaagtg

SEQ ID NO: 45948 - DNA, 1063 bp, Homo sapiens
cagctactcgggaggctgaggccagaggatcgctagagcccagaaattcaaaggtgcaatgagccatgatcacaccactaccctccagtctgagtgacagagcaagactctgtctcaaaaaatatatatataatataaaatgaaataaaacatgtaccatattgatagagaagagtttcattatctggcagagaaagttaggatttctttgagtatgtctgaagatatgaatagaaaaaaggagagacttccattctgcattaaagtgctacttgatatattgaaggtagatcagggtctacttatgtaaatgattcttatttctatctcattacatgatatataatatcattttgttctttgggctgtcgtcattgtacatccaaatacgaagcagtgtagctttgttttccctaaggggttttctgtatgatgtcaagtgtttatatcttcaaattatttgaagttttcttctgcagaatttaggtttctataatatatagggataaggaattgagtagttcagactccctttgaaaactgtagaaaacctttctgtcagatctttcttttttcttcatattctcattttcgccctccccaccccagctttgaagcatacataataggtgttggtttattttttcctcatggaatcatgggtagtttcattgcagctcatctctttctgtttgtttcgtatagggctgatagttcaggaccattcagaccccatgttcagttcatatgcctataagtcccactacctactgaatgaatcaaatcgtgctgagttgatgaaattacctatgattccttcttcgtcagcttccaaaaagaaatgtgagaaaggtaataatcaaaatagtttctcttgcttttatttttgcatttcctatttttttctctttcaatataggggggaaatgtatgcctgtcaagcaccatctgttgcttttggtaaattctgccttggtggttgtgactgtttcttcatatggctgcacaattattaaaaagggcttaaaataattccattgttgcacatttttacatactcttc

SEQ ID NO: 45949 - DNA, 1034 bp, Homo sapiens
tggataccaccgtctctgcagcattggaacaaataattttttctttggatgatctctacgtgactattaggcttacatttaggggccatatagcataggatgacagagccagactagggaagaaaaaaatgctttccatctactgtaactagcatctcagagggacccaaaaaagcccaactccagaaacttatttttatgtcccgctgatgccttattagattcctttttgacttgtctttaaacaggccgcatgatgagatgtttaagatgtccagttgcctatcactctggagatgcttgcattgcggccggaagcatgttagtatcctcctacattctcatctgtagtaatcattccaaacggagcagtaattcttctgctgtaaatgtaggcttttgtttcgtttgtgccagaggtgagtgtctgacttttctcttcatttatttttgaggtcattggcatatttctccattaacatagagtctcagcattgggaaagaactcaggccatctagtagaatctcctacccagtgcagaattccactgtaatatatccctgagagagatgaacatttccagtaacttttataatgctagatgtccaaagtgttagaatactaattcttccataagttaagctaaaatctgcatttctaaaaataacagaattatagttaagttcttagtttttctgtttggagcattaaaagattaatcttttcccttctgcaaacaactcttctattcaaagtagatccttcccatttcataatcttaaaccagaactttcaactgattgagatttcacttggaaggcaaaactagcacatccatttttcagttgtttatgctgtattttatcataatgttttggtctggcattgaggagggcctgatgggacacagccaaggcagcatatgtggtggtgttagttcagagccagccatgtgggctttcttgttgccagctgttgacgtttaagtacaccaagagattgatcaactaaaaacaatactgtagccctacgg

SEQ ID NO: 45950 - DNA, 1111 bp, Homo sapiens
taacgaggcccacctcctccaccacagaacgtggctatgttccaagtgctactctcactcagcctgttgcggatcttcatggcctcaggagacttgtttctccatgggctcttctggactgcacacttccaccatagcttgctgggttgatctagatgtctgtttgttgtatggaaattttgggggaaaaaatccaaaacacaaactgtgggttgaaatattaaccgtctccttggttccttggtattcaccgtgcctgatctgcacatttcatcgtggctgtttctgtatagcctatactgcattagcccaagagattgttgctttgtaactttttgcactattgttttggctggatttgtattacacacagttttaaaaaaaacaattccacactattctctgccttttttttcctatttatttcttcccgcacaaattccacatagaggccttcccatccagctctacgtgatttggctgcacttgaacactgattgtccatttacagccctcagcaatgtgccttctaaatggcatgacatatgtagatgtgctgcagcgcttgttaatggtcacaataaatgccacttcaccaaggaagtctcagatgaacaattatgaacatccaaattttattggggggcaataatcaactgaattgcaaaatttgggggaaaatggcactatccgtgtacgaatcgaatacaaatcaaagatttgtcacatccctaataaaaacaagatggagatgtctctgcaaccatatttgtaagctacacagtgtgttgggttttatgtcttccccctccaaattgaatggttctttgaattgctccaaatccatcagctatcctgcaattttcatagaattgatttttaggttggaacgtgggctctgttgactgaaaatagctttagagaggagaactgaattaaatgttttgatagagcggttgtaaattaaatcagtcactaccaggaaggtcagaagttctgaagttttgactcattatttcagtgttacaaagagagctatgctttttccacactaaagatgagtttgagaaaagaaaatattctcccacacacaaaaaaattaaaacaaacc

SEQ ID NO: 45951 - DNA, 1051 bp, Homo sapiens
ccacgtgttttacatatacattggcagaataacttctgatctcgctctcctaatgtaggatcaagacactgttcataagacactcaagaaagtgcttttgcaatatcacaaacttattttcttaagtttgtactagcagcaaaagtattgagcttccagctgtatggagccctgtagcactctctacagagagggtcctgattcccagcaacttagctgtgagtgcaggcgcggaagggtcttaaagtggcgtgagttacattaacctgagtatcatagtaagtaaaaatttatcctaacgtctttggggcgggaggggtttttagcaacattggggccggttgcagaaacaacccctctcctgccttccagacactgaggaaagtattcttgttctcttcatataccaagggaatggtgggaaaagtctttgctagagagcatgtggctgtgtgttgtcacttgatattcagcacaggcagctaggatttaaaccctccctgatcttgagacagagaactttacccaaaagatgggactgagttcagatttcagatacattaatcactcatcattgcttagattgatgaaagtatcttttccctctgttaataattaaaagggaaaaaaattctttgttaatgctgtatttttctgtccaaacaggttgaaacagttcctcaggctacagtgaagactggattacagaaaggtgagttaatattataatgttgctttgcatttccttgattaaaaccaatttttaagaattatttgtacttcatgtatttttgtctgtctctgtaaatcgttgttgctcttcagtgtgaaattgcagtattccccagtgttcgtgtgtgtgtgtgacttttagagttgatcttattctgtacctccacgtgaaaagtcttacttgttttggtaaattggagaacacaacgtagacttgatactgtttccaacttttctccataagattctggggtttcactggcttataaactagggatgtgacgaatccactttttttggtattcgactgaataccgaa

SEQ ID NO: 45952 - DNA, 1031 bp, Homo sapiens
tcatatatagtaatcactggtttccatattgttattagtcagtattttttttttcttttttttgagacggagtctcgctctgtcgcccaggccggactgcggactgcagtggcgcaatctcggctcactgcaagctccgcttcccgggttcacgccattctcctgcctcagcctcccgagtagctgggactacaggcgcccgccaccgcgcccggctaattttttgtatttttagtagagacggggtttcaccttgttagccaggatggtctcgatctcctgacctcatgatccacccgcctcggcctcccaaagtgctgggattacaggcgtgagccaccgcgcccggccattagtcagtatttttattagattcttagcactggaaaatgtacttaacagtttttcacacataaagatgtaataattatttgtaagagcatgttgaaagatgtttggatcacaattctattttaagttgtattttattatttaggactcattaaaaatttagctcttcagtcagagacagatgtgcttgtttcttgacttttcaggtctgtagcttcttatttcagtcttatttcatagttttccaggtgtcaggaaacaaagtgctaacaaataggcaaaatgtttgtcttgtttcctctctagtaaatgatttaatgggggaagaagttgaaaatacagattaaaatgaaattgtgttatctataaatttcggcttttatgttaagtcctttgggattatctgttcatatctgaagaaataactctgatgtttggaaacattatgtactatgtttttttaatctgaatacctgtacccactaccctgtccttgaaattcacttattagtttaggttatatttctatttttccccccaaaaaccctttggatttcagataaatcttctttgactaattataattagatttgtgcttgggtctttattctcagatgagatgatatgaaaatctgagtccactgttgcctttttcttcctaattactttgggttctctga

SEQ ID NO: 45953 - DNA, 1048 bp, Homo sapiens
cgaggcgggcggatcacaaggtcaagagatcgagacctcctggccaacatggtgaaaccccatctctactaaaaatacaaccaggcgtggtggcgcgtgcctgtaataccagctacttgggaggctgaggcaggagaatcgcttgaacctgggaggcagaggttgtagtgagccgagatcatgccactgtactccagcctggcaacagagcaagactctgtctcaaaaaaaaaaagtactaggctaaaatttgtaaaggaatatttaggataatgtaatttattttagctactcttaacataatttttaggtgttcttatgtggagtcaattaaaaatgtaaaaaagtggtatatacccacaaaatcataattttaaaattaagatgaattgaacattaaggagagctaactcactgtcatctttttctctgatgttttctctttctgacaaagcagtggaattagtacccaaagagggtatctctgtccctacttaattttaatgtcttaaacttgtctctgtctctgaatgcctaccaggtatatctgttttgctcacgtacattttataatagatactccctctctattattgcagcatccttacttgaattctttttcttctcttacttatatagtcttgaaagcttagaataaatcctcttgggcatccttcgctccctagccacttatttcttttaaaatgactgtgtaaaaaactttaattctttgaaagtgattttgatggtgtttcaaaccagcctgaaggaaacaccaacaatctggaacaaatcaaaaaattaaaaaagataagacatttgaattataagatttggaaggaagtccttttttttttgtttttttggagacagggtctcactctgtcacccaggctggagtgcagtgacgtgatcatagctcacacagcctcaaactcctgggctcaaacaatcctcccaccttagcctcccgagtagctgggagtatataggtacacatcactacgcctggctctttttttatagagatggggtctcgccatgttgc

SEQ ID NO: 45954 - DNA, 1057 bp, Homo sapiens
caatgatctaagacttaaaggtatgacaatgaatgaaaagtagagatgcctgctctcaggatgcttatattctagtgaggggagccagaaaatacacacacatatacatatatatatacacatatatacatatatacaatatatatttatatatacatatatatacatatatacatatactatatatactatatacatgtgtatatacatatatacatatacatatactatatatactatatactatatatgtatatatacatagtcttcatagcatctaaagctaacttatgtacacacatatacatatgcatatatacataatacataggtatgtatatacatatatgtatatatacatatatacatacatatgcatacatatatgtatatgtgtgtacataagttctcatagctttagatgctatgaagacaataaaactgggtaatgagataaagagtaatcagtgatgtttctagtagtcattttgcaatgagattctaaaaccagttctgtctctgttagatgtctgctatacctagttctttatatcacctaaaccttcagttaactattatagctcaggattagaatgtttagattttattttattttattgtttttgagacggagtttcactcttattgtccatgctggagtgcagtggtgcaatcttggctcaccgcaacctccgcctccagggttcaagcaattctcctgcctcagcctcccgagtagctggggactacaggcataccaccacgcctggctaatttttttttttttttcaagtagagacagggtcatgttagtcaggctggtctcaaactcccgacctcaggtgatccacctgccttggcctctcaaagtgccgggattacaggcgtgagccactgcgcctggcccagatgtttagattttaatttaagggttttaattcattttcccttttattgaatcatgatgagcaaaatttactatttgattgtttaggatcttacaatagcttgggataaaggaatatcaacttgaccaaaagtatagctggagaaagtg

SEQ ID NO: 45955 - DNA, 1050 bp, Homo sapiens
gttaacagaatttttaaacatttccttcttatgtctgttgctgtgagctatacatttttgccaaaagttaaattaaggtaatgtttcagttgttaaacattgtcagtaaatatggtatgctaatcaagagcacagaccctggaactgcggtttttttgcagtgagccaagatcgtgccactgcactccagcctgggtgaatcttgggttgaatcttagccatgtgcacttgagcaagtcatttaacttctctgtgcctctatttccctatgtataataggagataatagctacatgaatgttgttgggaggattaaacgtagtacttatgtcaagcacttagaatggtgcctggcatatgcaaagtgctatgtaagtgttaatggtggttattagaatatttgtgattttggtagtgacgaaggaataaagtacctgaacaaaagaattcttttcccagaactgatagctgagggaaacagaagtgatacagtagtaaaaatcatggacatcaggagctcgagatcagcctgggcaacatagtgaaactccatctctataaaaaatacaaaaaattagccaggtgtggcgcatgcctgtagtcccagctacttgggagcctgaggtgagagaatcatctgaacccaggaagtcaaggctgcggtgagctgtgattgtgtgtttctgcactccagcctgggcaacagagtgagaccctatctcaaaacaaacaaacaaacaaacaaacaaaaacaacatggacttcagagtcagacatgcctagatccaaattcaagttctcccactttgtggtttaagcaggccacctagcccctctgaagctcactttcttttacctatgaaccagaaatcacaatccctatcttgcagagttgtgattattaaatgagctgatgtgtaaagtgcctgacactgaggtgacactaagaaaatgagagcgctctggatccctcccaccccccaccaatgtaaagcaatacatacagttcaatttcttgtgtgcagtcttattcatttgtttgtaatttta

SEQ ID NO: 45956 - DNA, 1065 bp, Homo sapiens
tgatttcttttcctgtttttgtttttttcaactctgtatctgtgatttggcttaaggattctataaacttttctattatcagcccaccatcccccaccaccatgaataagttggtaaataataagagcactaaagctttgattgataattttcaacttttttttgcttatttaaaactgtatagtttcagcaaaattagaagtattcattgattgatttatcttttttaaaaaattagcctagaaacattgttcagaggatgaatttatcagaaatgtttttgtgtggtgatttcatttacttgaaagtacatattagaatggatagattagtacaattatttagtctcccaccaaattgttagttaactctggggagtgggagtggagaagggtgaagtgaggttctgttgttgtttacatatttagggattgtgggaagtaagcttacttgttaagagccaatgctgtggaacagagtgtgtgtttgaaccctccatttacttgatctcagactatggcaagttatttgatcatactggccttgatttttcatttgtaaaatgggatagtaatagtatttcctcaaaggggtgttctgtgaagtaaaataatataacaaatgtaaaatgtttagaatagtattgacactaagctctcaaatgttagccattaaaattattgctttaaaaataaattgaacacattatctttatcagggatttatttaggacaaaggtttaagaatttctgatggcctgtaccaagtaatttgaaaagcaatgtgtgaagaacaccttacttccacatcctacttgtttctcatggcctaaatgcctccttgcccagcatttttcttctccttagatgtctgttataattgtagtagtaacacaattcaattcttagtcatcttctgtttcacattgtttgctactattttatgtgtcttactcacaaaatcttacattatcttgctaaagagattgaaagtacctttaggtcagtgatttttttttttttttaactttttagcagttctgtatgcccagcattgcaatgaatg

SEQ ID NO: 45957 - DNA, 1039 bp, Homo sapiens
ataggcatgagccaccacacctggccaaaagttagtattttaaccacatatatatatatattcttttcagaatgaaaactcaagccctacacttatgtattgataataggaggaatcacagctcattttcccatttttcgtggtcattttatatatgtggatcacctgatccaacctttcttatgatgttaaatgaaaacccaaagatactgtctgtcctcggaatttatgcagctaagttaggggtagaagcagaactaaaattcaagtcttatgactctaagaccaatgttagagtacatccttctactctgtggacattttgcttgtccctaggtatatgagtttgtcttactctggcatagagatctatttgctgaacttcctcttatgtgacttctttctagcatcacagtaatattaacagatttctttaaaaatttataattcttatttaatataagcttttaaaggatgtttttgttaaggtaaaatttgaaaaataatgtagatcagcactgtctaatagaattttctatgatgacagaaatattctgtatctgcactgaccaatatggtaaccttagccacatgttgatgttgaatgcttgaaatatggccattgtaactgaggaactaaatttttaatgtaatttaattttaacttgtttaaatttaaatagctacgtgtggttagcccagaattagctattcttagtgaagggaaagaattaagtagatataggctgggcacgttggctcacacctgtaatcccagcactttgggaggccgaggtgggcagatcatgaggtcaagagatcaagaccatcctggccaacatggtgaaaccccgtctctactaaaaattcaaaaattagccaggtgtggtggcgggcgcctgtagtcccagctactcacgaggctgaggcagagaattgcttgaacccaggaggcaaaggttgcagtgagctgagatcataccattgcactccagcctggcgacgacagagactctatctcaaaaaaaaaaaaaaaaga

SEQ ID NO: 45958 - DNA, 1029 bp, Homo sapiens
aggaatagccacggggtagagctacagtgattaagaggaaagcaagggcgcggttgctcacgcctgtaatcccagcactttgggacaccgaggtgggcagatcacttcaggtcaggagtttgagaccagcctggccaacttagtgaaaccccatctctactaaaaatgcaaaaattatccaggcatggtggcacacgcctgtaatcccagctccacaggaggctgaggcagaatcccttgaagctgggaggcggaggttgcagtgagccgagattgcgccattgcactccagcctgggcaacagagaaaacaaaaaggaaaacaaatgatgaaggtctgcagaaactgaaacccagacatgtgtctgccccctctatgtgggcatggttttgccagtgcttctaagtgcaggagaacatgtcacctgaggctagttttgcattcaggtccctggcttcgtttcttgttggtatgcctccccagatcgtccttcctgtatccatgtgaccagactgtatttgttgggactgtcgcagatcttggcttcttacagttcttcctgtccaaactccatcctgtccctcaggaacggggggaaaattctccgaatgtttttggttttttggctgcttggaatttacttctgccacctgctggtcatcactgtcctcactaagtggattctggctcccccgtacctcatggctcaaactaccactcctcagtcgctatattaaagcttatattttgctggattactgctaaatacaaaagaaagttcaatatgttttcatttctgtagggaaaatgggattgctgctttaaatttctgagctagggattttttggcagctgcagtgttggcgactattgtaaaattctctttgtttctctctgtaaatagcacctgctaacattacaatttgtatttatgtttaaagaaggcatcatttggtgaacagaactaggaaatgaatttttagctcttaaaagcatttgctttgagaccgcacaggagtgtctttcctt

SEQ ID NO: 45959 - DNA, 1097 bp, Homo sapiens
accgtcagctgtaaccctcacccacagcccctgctgggcccaccacctgtccgtccctgtcccctttcctgctggcaggagccggctgcctaccaggggccttcctgtgtggcctgccttcaccccactcagctcacctctccctccacctcctctccacctgctggtgagaggtgcaaagaggcagatctttgctgccagccacttcatcccctcccagatgttggaccaacacccctccctgccaccaggcactgcctggagggcagggagtgggagccaatgaacaggcatgcaagtgagagcttcctgagctttctcctgtcggtttggtctgttttgccttcacccataagcccctcgcactctggtggcaggtgccttgtcctcagggctacagcagtagggaggtcagtgcttcgtgcctcgattgaaggtgacctctgccccagataggtggtgccagtggcttattaattccgatactagtttgctttgctgaccaaatgcctggtaccagaggatggtgaggcgaaggccaggttgggggcagtgttgtggccctggggcccagccccaaactgggggctctgtatatagctatgaagaaaacacaaagtgtataaatctgagtatatatttacatgtctttttaaaagggtcgttaccagagatttacccatcgggtaagatgctcctggtggctgggaggcatcagttgctatatattaaaaacaaaaaagaaaaaaaaggaaaatgtttttaaaaaggtcatatattttttgctacttttgctgttttatttttttaaattatgttctaaacctattttcagtttaggtccctcaataaaaattgctgctgcttcatttatctatgggctgtatgaaaagggtgggaatgtccactggaaagaagggacacccacgggccctggggctaggtctgtcccgagggcaccgcatgctcccggcgcaggttccttgtaacctcttcttcctaggtcctgcacccagacctcacgacgcacctcctgcctctccgctgcttttggaaagtcagaaaaagaagatgtctgcttcgagggcaggaacccc

SEQ ID NO: 45960 - DNA, 1941 bp, Homo sapiens
gtgcgtgtgtgtatgcgtgtgcatgtgtgtgtctgcagcccccgccatccctcctgtgttcaccttctggctatctttacctgaaaccaaacagcccctgcccgccggccccatttctccatgccgctcaccgcccgcatgctcggatgggccagtggctgccagcatctggtgaagggtcgtaaccagccatcgtcttctcaggtctgccggagttcttccctcagggtctcaccctcttcctctaacaggttttgctgcctggtggttttcgtttgttccttgttgcaaagaagatgtcagggagcatttcttcctctagtcccccttctttctgtctccttcccttgctctgcgtctcttagaggtctcatgtcctgtgcttgtccattttgcttccgttgtctcttctagactgctggagttaataccaccgacaaagagatggaggtgcttcacttaagaaatgtctcctttgaggacgcaggggagtatacgtgcttggcgggtaactctatcggactctcccatcactctgcatggttgaccgttctggaaggtacacactgtaacttctcctctcgatgtcctgccctcgccacgggcacggggggagcatgcatttccaggcttggggagacacagaggcaggagagctggaagaatgggctcctgcctgcctggtgccacatcctgccccagctttgagggctgaatcctctcagctcagagaagagcttccctagttttgcaggcgcacggaggcctcccacccgtacacctgcctctgctctccccctggccattgcaatgcatgcccgggatctgggtttaccctgcagcccgactcctccagggcaggctccttccgtccttgggtccagcagcctcccccctccgctgggtactgagcatctgaaaagtctcagatagggccctacacctcttctcccttctcaagtgctcagcccaggggtggggcttgctgcttgcaaagagcagcccaccctcctgtactgccatcctattgcctttgaagaaggaggtcagcctggacaggtgaactgagttgccttcagaaaggcctgtctcaggcagccgcagcaggcttcacgatgtccatgtatcctgtttgcctgctgccgtctctcctctcccaagaggggaggtctgcgtgttgagccagggaggaaggagcctgcagcctgctcagggtggtggctggtgactgcggggccagggcttgctgctgtctctcggaatgtcctgcatgtgggtctggctgttcctgctggcactgccctcttctctctcccctcctttcccactctgccctgcttgcccgtcagggtctccggatgcccctgctggaggcagagaagcgttctgtttttatcatcgtccctgtcttggtcctgtccgtgctccccatgtgctcccaatcagttgtcttcgttcctcaacatcagggaaagaaaaaacagcaacacttctccctgtcatcagctctgctgtctccttgtcaggccttgggacgttctctgggctcagtctagggtcgtgcctcatgcctcatgcctctctgggaaggttcccaggggcgccgcctccatggttggctggtgggttttaaaggggaaggttgggaggaggcctgtggaaggaggagggccgtccacacccgtggggcaaagcgtgttccatgaaaccagtgctgtgcgtgctgggatgaaagcctcccagcctctcgtgctgaagggaaaggtggaccgaactggcttagctgctgtggcaatggggtggggggtgagtcctaatcagaaggtgggagaagagaataacaaaatggaactccgccccctgccgccacatttccttaagttttaggagttggggcctatgagtagaatttgaaagaactaccaaaaaagcttatttttg

SEQ ID NO: 45961 - DNA, 1063 bp, Homo sapiens
agtatctctgtcagtttcttttcatcagcccttttttttccttcattcacttactcattcatccagttaacaaacatgttggcatctcctgtgtacatgctaggtgccgagggtgttagcaaaggttagggaggcacagaccctgttctgaaggagcctgcagtttcgtggggagagaagagaatgaagaacataaataacaatcatataatatgacctaagtgctatgtgagaggggctagtaatgtggtttgcaaatttggaggaatgaaattctccagctagaaggcccaagaaagtcttatggaagaaacagcttcttaaggtggggttcagagaaaagggaagggctggcctgttgcagaacaaggaatggcatgaagaaagtcttgcacagaggcatggatgttgcttcgagctgtggcgccctatagaaatagaacatgagcagctggtcacagtggctcatgcctgtaatcccagcactttgggaggccaaggcaggcggattgcttgagcccatgagatggagatgagcctggacaacatggtgagaccctgtgtctaccaaaaaatacacaaattagatgagtatgctcgtgcttactggtagtcccggctattcaggaggctgaggtgggaggatcacttgagcctaggaggcagaggctgcaataagctgtgattgcaccactgcattccagcctgggggacagaggaagaccctgtttaaaaaaaaaaaaaaaaaaaaagccaggcacagtggctcatgcctgtaatcccagccctttgggaggccaaggcaggtggatcacctgaggtcaggagttcaagaccagcctggccaacatggtgaaaccctatttctactaaaaataaaaaaattagccgggcttggtggctcatgtctgtaatcccagctacttgggaggcaggagaatcgtttgaacccgggaggcggtggttgagccaagattgcgccactgcaactccagcctgagtgacagagcaagactccatctcaaagaaaaaaagaaaggaagaaagaaatataacattataa

SEQ ID NO: 45962 - DNA, 1030 bp, Homo sapiens
ccaagctcagctcaaatttcacctcagtgttctctgtcacatcatcctattttgtctctacctagcagttaacccccattatattcccatctttttatcatatcaatctatcaatcaatcagtctatccatccatccattcatctatccatctatcatctatctcttcttttacaaatagagtaaaagctgcagaggtgtatggcttttctgggtcttgttcacagctgcatctccagggtttagaagggaccagcacacagagggcaggcactgcactctaatgttgggaagagacagccagagagaggggatgttattataaggtgggaaatgccttgttaagaaaaagcagagagtgctatgggaatataaaagaggggctaccaacctcacctgtgaggagaacttgaagagctggtacttgacttgagttgttgaagaatggacagatatacaggaagagtaaagaggttggttcaggaccataagtaaaggctgatttatatgtttaagacggacacttgcatgatatcttcagggaactacaaatctttaaaatagtactagaaaaaaccctggaatgcagagaggaaagacataagcctgagacattagcaggaggtaggagctagagtaggagtaggagctagattaagaacctaaatggtattttaaattaactattatattctttttatggctgaagagtattctattgtgtatatataccatatattcattggtcaatggacatttaggttgattccatatcattgctattgtaaatagtgttgcaataaacatgagagtgcaggtatccttttgaaatatacatttcttttcctttgggtgaaacttgaggtcattatgttaagtgagatcagacaggcacagaaatactgatgcctcatgttctcactcatgtatgggagctaaaaaaaattgatctcatggaggtagagggtagaatgataggtatcagtgtctgagaagagtttgtaggtgggagtgggggttaaagagagttg

SEQ ID NO: 45963 - DNA, 1079 bp, Homo sapiens
ctcataattcctgccttgtgtccctgagatcggatttcttacagaattcttatctggaaaagcgtaaagataggtgatgtgagtccattcggaggcatcccagtccatgttttcattaatcgaacatggtaaagtacacggaagggtcttgttcctgccctgtcaaagtaagctgcacacatgtgggaggacacatgcaagtcggagggaatcatgcctcacgacagggtcattctcagggtattgcaattgtggatgaagatggaagctggatgtagatggccaccagagctaaactggagagcgcgtatcctgtttccatgcatggggaagattgatgtgttctctgtgatgcagcagtgtgagttacttgtctgtttctgcattaactcaaattcatcagtgaggattccctgtatacctagtgctttctgagttctatagatacagattgagggtggaactcttcctctaaataaatgtaatacatgagtattgttttttaaaaaagacagaagttggaggattcagaccctttgccacataggctgaagaggcaagcctgggaaagaatttgaatctggcaaggttgaccttaaggtgtagggcaggggtctagagggcactcaggtaactcatctgggatggacatcttcttcccacggcagcaggcacctgccaaatcagccagcgttctgtacacagaagaggacagaggatctcatgtcgataaccagtcacggtttgtggaatctgagtgattagctgtttgggattgggttcctttagccctgacaatattttcctcttgggttcacagaacttttgggttcctcctggacctcagaggtcatcttatccagtcctcttatttgataaagaaggaatttgactttctcaactggagtccttttacactctgccacctgccctcctcacttaagagttgatgcacagccgctgggctctgccacggaggcgctgacctccttagtgtgcgtatggtgtatggcaggcttctttgagctggttgcaggagaaacctttttgtttttttgtctgtaatgttctcataaaac

SEQ ID NO: 45964 - DNA, 1033 bp, Homo sapiens
atgactttgggtgactttcctctgctagttatggcaaagcaatttgcctaatctgtgaatgggctaatgcactcccactcccaggtagaatacttgtgtttgaacaagaacctcctgaaaatgatgccctgacacaatgggagagctggaattcgaggaacgcagggtggggctgcggagatatttggggacgtgagtcagggaccccgcacatcagacctgcagaaaccaagccctccgtctaggtggtgaggatctgtttcatgaactggagcctgaagtggctctgaggcctcccctggaaaggaacgcaatagaacagaattaatcaaaacgggaggccaggaggaggaggacaggaggggaaaattgctggcggggaaggaggaggacaggaacaaaataaaaaagcaggaggtggagtttgctcactgactaaaatcattttctgtacggagccaagatcgactcatccgttggaattgatattttgctccttcatattgtcagacttatttgtggctccgagtagcactccttgatgtcagcttttgccggaaagtttcaagacctttcagggcaaggatcagaagagcaggaagcatgagagtgatgaataaaacttgaacttggctgccttccataaagcacagtggcagcttcaccagatgcagctggaactttaattggttaaattttaattggctctgctcttgtgggctaagggttgggcaaggaaaatgtgttttgtttgtttgtttgtttgttttttgcttttcctaaagcttaactgtcaggcagccttctttggtcacctttgaaatggtgggatggcaaaggggctattttatgttttacattttatttttatttttgagacagggtctggccctgtcacccagtagcaggatctcagctcactgtagcctcaaactcctgggctcaggtgattctcccacctcagccccctgagtagctgggactataggcacacactaccacacctgtctacttctgtgggcttttttttttc

SEQ ID NO: 45965 - DNA, 1050 bp, Homo sapiens
gcagggatggaggaggttggctgggaggcagagcgaggaagcagcatttctgcaggcctggggttgtgggtgggggctgggaggtggtgtggggcagcacctgagtgtggagggaggaccccctgtctggaaggctggagaaccctactgctgatgccctagggactccctgtttcagtggtgaagacgtgaagcgctgctttgtggaggaggatgagagttccatttggtcttcggctgtagatttggagtcttctgtgttcaagggtgttcaagggtggtcatcactagtgtgtgcatgagtttcccatggttgctgtaacaaatcgccacacacttagtggcttgacactacggaaatgtgttctctcgctgtctggaggctggagatctaaattaaggcctccacagggacacactccctccagggcttcagggccttcttctatgagcctccacctcccagaggttccttgcttccttgtgcatggctaaagtcactccagtctctggctctgtcttcacatagtttcacctctgtgtgtgtgtatacgtgtgtgtgaacatgtgtgtgtgtgtgtgtgcacacaggtctctgtatgtgcatgtgtatgtgtgcaggtgtgtgtatctgtgcatgtgtgtgcgtgtgtgtgtatgcatctcttggtgtgcatgtgtgtgcacacacgtctgtgtatgggtgtgtatgtgtagatttgtgtgcacacatctgtgtgtgtgtgtgtgaatctgtgtgtgtgcgcatgcatctgtgtgtgcatgtgtgcatacacatatatgtgcatgcatgtgtgtgtgtgtgtgtgtgcatgtgtgtcttctccttttctgtcttttctaaggacacttgtcattgaatttagggccagcctaggtaatctaggatgatctcgtctcaagatccatgacttaattacatctacaaagacttttttttcaaataaggtcaccttcacaggttccagggataagagtgtggacatatcttttggggggcaccattcagcccactgcagcatgtttttt

SEQ ID NO: 45966 - DNA, 1050 bp, Homo sapiens
gccatgaacagctatcgaatgacacagcccatgatgaacagcagttaccatagtaaccctgcctacatgaaccagacagcacagtatcctatgcagatgcagatgggaatgatggggagccaggcctatacccagcagcctatgcagcctaaccctcatgggaacatgatgtacacaggcccctcccatcacagctacatgaacgctgctggcgtgcccaagcagtcactcaacggaccttacatgagaagatgagcaagatgaacttgcaatcaaaaacttaaatatatataaataaaggaaccttttatactgacaaaccagagaaaaatggacctttttccagttaaaatattgctgtagatttagaggaatttttctttggtttattttattttttagaaaacctgatcttctctttttttgggttcattttgttctgggttttggttttcttcacaatcttgaacattttacagtagaactcatctaaaaatggatttggggatggggaaacatgcacaaaatcttttcataattaaaaagagccttactttctttacataccacatggacagaatttgtgtaaaagtgaattatctttattttaaaatgtatgtttcccctcactgtttgcagctcccaatgttgtcatttttaaatgttatatacatctcaagggttaaccagaccctttcctccaaacccaacctttcatttcctacttcattccagcaggaggcacttaggggagactcggatggggacatggagaacaacccaagctccttaaacttattattattgttaatattattattattattattaataaagtgaggcaggaaaatgcttctccttttaaaatcccctccactcctcacacacacacacctcttgaaacccttccccaagaatgtttctttatagacggacttcattgaaatctttgttgttcttgaatcaagtgtaatataatttttttcttcttttttaaaatattcccactcagcactcagagacacaaaaatactgtaagtctcaattaac

SEQ ID NO: 45967 - DNA, 1084 bp, Homo sapiens
tacaattttaataggattatgtgaaaatgaaggcattcttttgtacttctcagttcagatacagcagttgccatctagtggtccaaataaagcatgcaaggcttgttttccccaggacgttgaacgaaactgttaacagtcctgatttttaacacttcgaatattttaacaaggtgattgatattaactgtagacataataatactaacttagtcttcaatatatataaattatgtattctttctgcagatttgttttgaagtagttttgcaatttgtttctctctttttttttttggaaggaatttacctttggagttattcttggttgtagaagaggggattgttattttggtgaatccagtttttcagagttgctgacctagttctgatttgagttatttgtgattctttaggttatttgttatcaaagcgtgaaggccaagcagggtctccagagaaaccgttatctgatctgggtcgtctttcctacatggcatattggaaaagtgtaatattggagtgcctttatcaccaaaatgacaagcagatcagcattaagaagttaagcaagttgactggaatctgccctcaagacatcacttccacactccaccacctacgaatgctggacttccgtagtgaccagtgagtatcacatctttttgtatacctttgaaagataattaggttgaagttttttggatcagccagtcagattattgatgaaagggcattaactaatataaatgatatacttggtgataatgagatatcattttcctttctaggatattttatttgattgactatatatatggtctatatatagtctatatatatgctttttaaactgaattgtttttctgatacccctaatttttggacctaagctactgaatctttcatcttctagtattgggagctctttcacaatacaagaagtaaccactctagaaacagtcattaaataaaatgcccatgttaaattttcatataaatggcacaaagtaaatatagattgaaaggaagaacagacagttcacccttcactaaagtggtcagaaaaaggtcacaaagaaagg

SEQ ID NO: 45968 - DNA, 1023 bp, Homo sapiens
atttaatccacccccttgctaccccctgttagttatcttagattaaaaggtcaattctagcctggaacatacgtcttcttttaaataatttggcatatttaaattaggaggacatgaagtggcagaatttgagttaaacatttaaatatattttgtgcccttgattatattagacacctgctgctttggaaagtcacatgtttagcgaaaacgtactttggttgaaatgttaaaataaaaagacctagcaaaggtaaccttgtagttcagatatgacagtttgattttggctaggactggaatgagtggtttctgtgtagccatttcttcctccctgtgtagagagccttgctgatttctaaatcttcgtaaaaggaaacacccttgctgtggaggcttgctcaggggagctgggagtggaggcgggctcacacatgagcgcatgtgcaggaacgtttcacggtgcaaaggttaaaggcgggtgtgggcagaggggaacctaccacaggtcccattctggacagacgtgcgcagttgtggtgatgtgcaaacagctgtactggaactggatatccactttcacatcgggcatccgcctagaagagcagcgggcagctgatgggaagaccctcaaacaacagacagtgccgcagcaggtgcatgacttcagcttttgggctttctatctgatccttgcctcaggaagttagatctggtttctggtatttagttattttgaaagtttcctatactgttgttattactttgagttgtgaagatagatgaaaagatagtactttatgagttagagtagttgattctagaatgtagtttaaaaacagcctttaaaaaatctttttacaaagttctgtttgggttttgagaaatgaaagaaatcttattttaaccctgtattatgtattcttcattgtttttggttttgtatttggaggagccccagtacttggtggtgttataacacaattcatcccacaaacagatctttgtcttttgttttgaggt

SEQ ID NO: 45969 - DNA, 1040 bp, Homo sapiens
cagagatgatttttgcctgaatcatttactttgttggtggccaaacattattttctaattctatcatttctttgccatttattaattggcattctattgtaaggagaagctttttcttcttcctatttgtttattcattttgtttaaactcatagattattttatggttataatccattgctattagtatttattttgatgcttaaattgttccaaatttaggcagaggggaactcctttctagaagctcctctgtccttttaacacatcatcatcatttttatttacttctggccacagcaagatgttctaggctcttactgttgtagccatagattctggcttttagtggtgaacaagagtaaatggtagctctatcctgtacttgcttaggcccacagagatgtcatcttgattttttttttctctgtcatacttcacattcagtccatcagcaaatcctaatggttctgccttcagaatatgtctgtatttgctactgccaacccactgtcatctctggcttaggctgctataattgcctccagactaaacttgcttctgcttttgccaccaccccactctctagtctattttcttcatacagcggccagggtaattatttttgaacgtaggttggattataccacttccttgcttagaaaacctttcatgtcttacagtcttctttagaattaaaaaaaaaaaaaaagagtctgttctctcatctccaaggctgtatatgattttgtgcctgcctccctctttggctgctctttttgctctcaggctactccagccacagccgcctcctcttcctcagacacaccaagcatgcctgccttgggcctttgcagtcgctgcaccttgcctcgatggcccttcctctagagtcgatgatttagtaggttcactgcccattccatttaggtcttgctcatatccacacgaaaatagcttacagcccattgtgtcactctatcccctgacctgcctgctttttctgcatagtacctaccacctcttgaatttaaattttt

SEQ ID NO: 45970 - DNA, 1027 bp, Homo sapiens
ggtcccttcagcaaagttcgaactggccctggaaggggtaggaaacgaaaaatcactctttccagccaatcagcatcatcatcatcagaagaaggatatttagagcggatagatggcttggacttctgcagagatagcaatgtctccttgaagttcaacaagaaaaccaaagggctcattgatggccttaccaaattttttaccccttcccctgatgggcggaaagctcggggggaagtggtggactactctgagcaatatcgaatcagaaagaggggcaacaggaaatcaagcacttcagattggcccacaggtaagagtttagaacagacttagaaacaaatagtattctgtacatgtattattcgggataacactaattatctataatggatttatatttgattattaacaattggttatagaatataagaacacattgaaaaaacatgtagatgatactgaggtgataactgtggcaggaatttagaggatggaaataaagttgcagaatgggacagtaggaactcttaggcaaaaggaagctgcttttttgtagaaccacaaagaatctgcctagagaaacttggggtgtaaccttgaggattactttacatttcacaaattactaaagaaatcatatggtgaatgttatgatgcctgcttattccaggaaggaaactggaaagaatagaactgggtgaaatgctgttgatctaagcataaaaaaaagaccaaaatatttgcagatgtgatgaggtcattgacttttctacttcagatcttgacaaatatagttgtaagtcatggattgcacttaaaaagggagagacagaaccacagctccaggctgcttatgtatcaggctaagttccctaattttcaaagtagaaaacatctgtggagaggacttaataatgtggcaaatcattcaagtcagaggagaagaatttgattaactgtccaataaattaaagcttaaaatagtcttattgctgagccttgaatttagagatactaaccctgt

SEQ ID NO: 45971 - DNA, 1049 bp, Homo sapiens
gaatatctcttctatttttcctataaccaccttagtgcatttcagattcaaatcttatggtgaacccaatatagttttagccctacctcactggttttcatgctcattaatagtttgggaatgagagtgacctggagttataatttttaaatgcttttaacaatatagtttggcatattgtaaaacaaatcatggtgtactgattagcagtgctatttgaccaataaattaaagaaaactgatagactgtgtcttaacctagatgatttatttaaaccatttgttgctgtagctcatcagctgaaatgacttaaacccccaaggtactgttactctttcccaaattgcacttaaaaaacaaactgaaattatcacttagttaaaatgtcatgatcattgtcagtaatagtatatctctgtggattcactttggtttggtagctgaaaagtttattatttttatgcttggccaaagaatatgcatcttcagtggggagcatgccatgtgtgactgaaaactgtttttatacagcttgactctgtttggaataacgcctttatttggcttaacaaattgcttttcagctttattttcacactgtaaatatcaatattgtataaacttgtcattattgggactaatcagcaaattgttttgtgtcatgagtaagcacggtctaagactgggattatttgataagtgctagaataatttggttaaactgtctatccagctctaagtaacaacacagccagttggtctgaatcactgtgcctcaacccttcactttgatgaataggtttgaatggctgaagctaatttggtttggggtagacaaagtctagtaatgtgaaactgatcatatataaaagaagtgttaacagtagtaatattacagggaatatacagggacatagagggacaattttgctagcggtttcttagttatgattttgaataccattttttttgcagttagaaactttactgtcttgttctggatgataaagacacatgtttgaagacaggtttcctatgctgaagaata

SEQ ID NO: 45972 - DNA, 1035 bp, Homo sapiens
ttacttagttacagagacactaatgtgctgtgttaaaataaaaggtcttattagttacatttaggaacctgctttggttccatatttttgtctatcttttcccctttcttaataattctctgggagtggaaaaagggagtaaagattgatttctttttgctatgaataatgctgttctttgaggaaggcagcagagaacctctggtcagtatttgttttaaatatccaagtttaaaccattctacactatattatgttagtatcactatttaccaataatagaaaccgagcattttctacctgtaaagcctccttcctcctccttccttccctccttcctctccctccctcacgttttatctatagattgttcacttgagcaactgagttgaaaactgcataatgtatttagagttatgaacttggagtcagaatatctacctgactttgaatgtcacttttgtcactttactagtcatgtgcaccgtttgacagtgattttttttctttgtttaactgaggagcgtataatgatttttgcagatccctttcagttccaaacatcatgattctgatagcagaaccttgcattctatcagatatgtatcagttattgttcttcataggtcttgaagaaaatgatgctatatgccgatttgttcacgtgttcttaaacctttggccgaaataaatgcctacaataacaatattttaaaaatttaatgaacatgaaagtcttgttgaacatcttcttctaaaacatcacttttttttcttttttttttcttctgtttttttgagatggagtcttgctctgttgcccaggctggagtgcaatggtgtgatctcggctcactgcaacctctgcttcctgggttcaagtgattctcctgcctcagcctctagagtagctgggattacaggcgcttgccaccacaccccgctaatttttgtatttttggtagagacgaggcttcaccaggttggccaggcaggtctcaaagtcctgacctcagatgatgcacccgcatcagc

SEQ ID NO: 45973 - DNA, 1093 bp, Homo sapiens
atgtagctatttaaatttaaattaattaaagttaaagtaatgataaccactagcacatttcaagtacccactagctcacatgtggctagtggttacagtattggacaacagagatatagaacatttcatcatcccagaaagttctactagatggcactgttcttgagaacagtgttaaaaaaatgtcactcgaggggccaggcgcagtgtctcatgcctgtaatcccagcactttggaaggccaaggcagaggcaggcggatcacttgaggtcaggagttcgagaccagcctgggcaacgtgaaaccccgtctctactcaaaaaatatataaaacttagctgggtgtggtggtgcacgcctgtaatcccagctacttgggaggatgaggcaggagaatcgcttgaacccaggaggcagaggttgcagtgagccaagattgtgccactgcactccagcctgggcgacagagtgagaccctgtctcaaaaaaagaaaatattacttaaggatagggtttcagtttttaggctctaggatttttggagttgaaaatgttagctttggattatcctaatgaggggagctttgtgagttactgtctgtggatcaagcctgtcatgttcacactctgcctaatcttttactagtctctctggctctgtatatatcagccatacttggctgagggttttttttggggggttaagtagtacagaatttgcaaatgtttgttttatgtagttaaagccttgatgcttagtatcttttccttatcaataaaatgaagtaatgagatactgactatatggaatttgaattaattgattgggattatgaagttaacaataaaaattttttttttttttttttttttttttgagacggagtctcgctctgtcgcccaggctggagtacagtggcacgatctcagctcactgcaagctccgcctccctggttcacgccattctcctgcctcagcctcctgagtagctgggactacaggcgcccgccatcacacccggctaattttttgtatttttagtagagacggggtttcaccatgttagtcagggtgttctcaatctcctgacc

SEQ ID NO: 45974 - DNA, 1056 bp, Homo sapiens
gggtttggtggcatgcgcggctgagacaggagaatcgcttgaacccgggaggcggaggttgcagtgagccaagatcgcgccactgcactccagcctggcaacagagcgagactccatctaaaaaaaaaaaaaaagaaagaaagaaaaatgacagagccacctccctctgtattgctatatttatttatctataaatttacatgcaataatgcattcttttctgtgtctacttttatgagttttgataaatggatagagttatataaccaatcaccacaatcaagatataggaaagatccattatccactaaaaaaaaaaaaaaacttgacttttgtagtcatcaccctcccccaaccctggcaaaccactgagctattattctccctataatattacattttccagactgtcatataaatggaatcaagtatagttttttaagtttggcttatttcatttggcatcatgcatttgggattcatccatgtagttgtcaatagtttgttcctttttgttgctgagtagtactccatggtgtggtaggtacaccatagtttgtttatctcttcccctattgagggacatttggtttcagtttttggcaattatgaataagctttctataaacattcatatataggtttttgtgtgaatatagtacagtagtttcctgtggctgctgtaaaaaattgcgaaactggatagctttaaaacagcagaaatttattccctcactatcctgagggtcggaagtctgaaattagtatttctggactgaactcaaagtgttggcagggacacattgcccctgcaggcattctgagcttctggtggctcttggcatttcttggcttgtggtcagcagcagcatcactcccatctctgcctcttcacatcatgtcttctcctttgtgtgtgtgtcacctgttcctctgcttctctagggacacttgtcacaacatgtatggcctgcttagataatccaggataacccccccatctcaaaattcttaatttaatcacacttgtgaagacccttttcccaaataaaatta

SEQ ID NO: 45975 - DNA, 1935 bp, Homo sapiens
tcttagaccaaaatggaataaaactagatatccagaagaagaggaactttggaaactatataaatacaaggaaattaaacagcatgctcccgaacaatcactgggtcaatgaagatactaagaatgaaataaaaaaaatttcttacaacaaatgggatatagcaaaagcagagttaagagggaagtttacagccaataagtgcctccattaaaaaagtagaaagatatcacataaactacctaatgctgcacctcagggaactagaaaagttaagaacaaactaaatcctcaaattagtagaaagaaagaaataataaaggcaggagcagaaataaaatagaaactgaaaaaatacaaagaatcaacaaaatgaaaagttttttaaaaagacaaaattgataaactgctagcgaggcaaaccaagaaaaaagagagaagacccaaataaattagaaatgaaaaaggagacattacaactgataccacagaagtacaaaggatcgtcagcaactattatgaacaactgtatgctaacaaattggaaaaccagaggaaatggatacattactggacacgtacaacctaccaaaattgaatcaggaagaaacaatacctgaacacccaataatgagtaacacaattgaatcagaaataaaaagtttccaaaaagagaaaagcctaggaccagatggctttcctctcaattctacctgctgaattttaccaaacttaagaagaagaactaacaccagtttttctcaaactattccaaaaaattaaagaggagggaattcttcctaactcactctacaaggccagcattatcccaataccaaatccagataagaatacaacaacaacaacaaaagaaaactacaggccaatagtcctgatgaacatacatgcaaaaatcctcaacaaaatactgatagacaatccaaacaatccagcaacaatcaaaaagataacacaccatgattaattggggtttatcctagggatgcatattcaaatatgttcatgttcaacctatgcaaatcaataaatgtgatacattgcatcaatagagtggacaaatatcttgataatttcaatagatgcagaaaaagcatttgataaaattcaacatcttttcatgataaaacctctcaacaaattaggcataaaaggagcatacttcaacattaataagggccatccatgacaaacccacagctaacgttatactaagtggggaaaagctgaaagccttttctctaagaattggaataaggcaaggttacccactctcacaactcgtattcagcgtagtactggaaatcccaaccggagcattcaggcaagagaaagaaaaaaaaggcatccagattggaaaagaggaagtcagattgtccctctttgcagacaacatgatctcatatgtagaaaaacatgaaggctctacaaaaaaacttttagaactgataacacaaattcaataaagttgcaggatacaaaatcaacatacaaaaatcagtagtgtttccatacaccaataacaaaagaatggaaaaataaagcaatcccacttacaaagctaccaagacaatcacacaaaacctagttataaatttaaccaaggaggtggaagacctctataagggaaactgtaacagtgattaaaaaaaaattggaggacacaaacaaatgggaagacatcccctgttcatggattggaagaattactgttgttgaaatgaccatattacccaaagcaatctacagattaaatgtaatccccataaaaataccatcaacattgttcacagaaatagaaaaaacaatcctaaaatttttacggaaccacaaaagaccctgagtagccaaagcaatcctgatcaaaaagaacaaagctgggggcatcacactacttgacttgaaaatatattacaaag

SEQ ID NO: 45976 - DNA, 1052 bp, Homo sapiens
cggctgtcatttcttacagtggtaagagccattgccatcgattctgatgcttaaaatggaaactttggtgtcatcttccatacctcacttgtctgtcttttggattcagttctattccatcccatgtcttctctcttacactttttaacatctcttatttaacctcttctgtattcgaggtcctctgttagagcaggtcctcatcatttctctcctgattaccttagtagtttcttcattgattttccttcctccagtatcatcttcgtctagtccacattattgccaaaatgatcttactaagaaatgattaagaacacaagcgcaaagaccagaccatctgggctttctatcccacactgggactacttgctttatgaccttgggtaatttgcttaaccattctttgccacattttcttctataaaatggggataatacagtgcttatctcatagtgaagttgtgagaatttaatgagttaatatacatctgggctgacagaactttgtgcaatgatggaaatgttctatatctgtactgccctctgtgatagccagagccatgtgtagctattgagctcttgcaatatggccagttgagtgaggagctgaattttaaattttatttagttataatttaattgaaatagccacatgtggctagtagctgctataatggacagtacagaatatgtaaagtccttagaaatagtgtttagcacataagtgctccataaatgttaactgttattaccatctttctaaaattaaacttctctgcttaaaatccttcagtaccaaattctgcgatatagtatatatgagttgtaacccattcccgtgcgttgctccaaacttgtcaattgccacttcttcataatgccctctgtgttccactgtaccagttctcaaagtgtggatgtagaggacagcaccagcaatagtatcccccaaaaacttgtttaaaatgcagattcttgagccatatttcaggcctattcaatcagaaactgaatttggggctttgcaacccgtatgttagtaagtcctc

SEQ ID NO: 45977 - DNA, 1028 bp, Homo sapiens
aaatttgagagccaaagaggttgaagtgtcttgtccagtgccacacagccagttaataccatctggaagaattggtcaggcccttctcaattttgtgcttttttcattatgctgtagtactgctttatagtattagagagcagtgagcctaaaataatttagttagaattctcttccttaatggaaaccatagaataaaccttgtctagagaatattggtggtatcgtaaaccacaaatatataaatctgctatttcagtgtgtgaaaatagctatacactcttgttagagttttgaaacaactttttgggaaaagactgctttcttatggcccaagttagaggaatcaaggttttcttatgttgttggctaaatattagaaggggaacatgttgagctaccttaatgctggaagaaaaagtactccttgagttttgggaaaaaaagtccatttaaaggtaagtctaattttcagtaggtctgcaacacaaatgacctctgagtgacttggatcattggttagaatttaaaattcttgagactgagctagagatagcaaggtacaaacctttctattaattaatgaagtaatttttaccaaagacattaaatatgggtggaccaaaagtgtatagtctagcacttctataaacatagtgtctgggaggagcttgagagatttgtaatgttacttgtaaacagaccgtgtggggaagaccgcagacagcacatcattttttgtctttattggtctttatgactaacacttcatctctgcatcacttctgctttgctgtaaaacttagcaagtacattaggatagtggcaaataaagattaagattgaggacagatgtttgtaaaataactgggcgattttaagattataggtgtaacttgttaagaagaagataactggtgtggaaataaaatctggcagccaaaaaaaaaaaaaaagctttcaatgtgttaaagaagatagttgcttcttttgccgtttaccttttatgtagaataggtgattccgca

SEQ ID NO: 45978 - DNA, 1033 bp, Homo sapiens
atgctgaccaccatgcctggctaattttgtatttttagtagagacggggtttctccctgttggtcaggctcatctcgaactcccaacctcaggtgatccgcccaccttggcctcccaaagtgctggcattacaggcatgagccaccctgcctatagtgttaactgaagtaactaaatttagacatgttggaaaatagagtttgtttcttcaggtagacttgtatatgtactaatctcattggaaaactaatttcatgatagtatctattcaattagagttggtgagctctgttctatatttttaaatggagtcttattttcagtagtgaatttcctgtgtgacttcccccaaagatatgaaaagtttacattaaaaatcgtaatacagtgaactctaggatgagagattattcctttgaacagattatgtctgctccttttattgtattttaactattttctttcctctccttcgaactacgcagtcagttgctatgcagaattgatagtttgctgttacgaacctagatgttctcaaaaaaagaaaagaattatccagagtttatttgacagtgatggagaaaggaaggtgtataggtcaggagtagtttcacttttaggaattaattggttcagcatatagtcattgagcacctactgtgggccaggcactctgcttggaacagaaacagttctgtcttctctgggatgctaatgcaggtatttctattgacctggccaactgtaaggtgaagatgaaattcaaagactgcgtggagtaacccgagcaagttcctctttactttttctggtatcaattctaactttttgtttttttttggtgatattaacctttggaaggaactgtatgttagattttcggcagctgagtggttttgatccttttgggagatcaactgtgttggaatacgtttaagaggagtttttgtgaagacattggaactttagtgtgttcttttcacattgataagtactgaggagaatccatgggatactgtgattaaaagttttt

SEQ ID NO: 45979 - DNA, 1046 bp, Homo sapiens
aattttgttagtacctgttttttacattgacctagtatcttagctgtaaatttacttaaggtgctctgaattatagttccttggagagcagtgatgctttaagttgctgcacaccttggtagacataagtaaaatgatcttcattttgcttaagatgatggaggatactcctagggtggaaagatggtaaagttaacattgaatgtattttgaaaattggagatttgatctcaatttgttgtattattagcagcccactgaatacctgtagatttttctttaacaattgaaaattaacggtatttttctttgatgaaatttttagagatctatttcagggttcaattttccctgtgaacattgaaataaaacataatcttactgttattacccttgaaatgattctcatacagtcatgaattgatagagaatctcattcataaaatggctctatgtaatttgagcatttattaaaagtatatattaaaaattcagggtagacaagtaattaaaatgctttattctatatttaagtgctgtaagaactcttacctgtagaaactttatcacatgtggctgaatttaaatacagttatcggatttctacaattattaaatgatctaacaggttaactgcctggaaacaggaaataatttatagttagatcagttcagtgccatacctgtgaattggatgttataagttcctgttaggccacctgtttgcttttatttatttatttttgagacagaatctcgttctgtcacccaggctggagtgcagtggtgcagtctcactgcaacctccgcctcccaggttcaagcgattctcttgcctcagcctcccaagtagctgggattacagacatgcaccaccacgcccggctaatttttgtatttttagtagagacggggtttcaccttgttggccaggctggtctcgaactcctgacctcgagtgatccacccgcctctgcctcccaaagtgttgggattacaggcttgagccaccgtgcctggcctgttgtttgcttttattgtaatta

SEQ ID NO: 45980 - DNA, 1033 bp, Homo sapiens
attggaataaactgataaagcgggcagttgagggcttggcagagtctggtggctcaactttgaaaagcattgaacgttttttgaaaggtcagaaggatgtgtctgcattattcggaggcagtgctgcctctggctttcaccagcagttacgattggctatcaaacgtgccattggccacggcagactccttaaagatggacctctttatcggctcaacactaaagcaaccaacgtggatgggaaagagagttgtgagtctctttcctgtttacctccagtgtcccttcttccacatgaaaaggataaggtaagaatggcatatgcttcggggtttatagagctgatgatataggatgctacaaattcacatttctgggaagttatattcaagttttttgtttggggacttctgtggagtgatcacctctggttttttattggtgagttgtagctatgagagcttcatagatttgttctggtactttgaaatatttgaagcctaagattaaaaatgtagaatgttaatctgactaaaagaacttatttacattacaatgaaaaagtgacatatgagtttaaaacttttttttaaatttttttttattattttgcttgaggagtactccagcgtgagactttaaaactttaactaaaggttcttagaacaccttactactggaagttgatgagcagccaaatcatggagacttgaatttgaaacaagcagatgactctgagaacatttttctgttttccattttgttgcagattactcgttagacagaaatgagacagattctcatgacccataggcgcaactaagcaaacttagcaattcttgtttctgctgtttgtattatagctttctgtcatgtattatggctttgcatatgatgaagtcctaaatgctatttatgacagctgtagttgcatgggacaggaatacagtatcctaaactagaaaagttctggagggtctggaacagtagttcatgcctgtaatcccagcgctttgggaggctgggacaggag

SEQ ID NO: 45981 - DNA, 1034 bp, Homo sapiens
atagtagcagtgtccagtaggctcaacataaaatactacgtaaaagttctgattcatcccaccaacatggtgcagcctacataactgaatcccaggactctttcagagcacctgttacttctgaatgcattagcggtacctgggttccaaccgagaataccagtacctgaaacctccacagaattaccgggatgtcccaggatgctcagatcaatttggtggtggttgttggtgaccaaaacagacctgcttccagatactgtcaagatgagagggcagcagaggaagcagtaacatctccaaagggtcatcttaccatgaggtaagccatgctctgggctccctctatcccagtggttcttctacagaggctggagcttcctcaagtttggggtgcaggctgaggggccagtgaccaccagcagcacagcctgcacaccacgtgcaccagcctcctggcaaggttttgctatgaggatagcaccgcaaggatggatattcaccaaggcatgctaaatctgagtaccatcacttctcagcatgctaatggctacaatattttgggcaactgcactgatactaaggaataaattataaacactcacacatgtgtgtgcagctggaagtccgcagccttgtaacccagggcgaaattattctgtgacagtttggatttggctgtgtcaaaactcatctgatagccagcaagccacccttcgaaggccaacacagcccagccatagatggttggtccagaaaaatctatatcaacattactgccaacactaaaacaatcccgtttataggaggccttcaatttcccactcttctttctgcaataaacaaacaaacaaaagcaaatgatgaaaacaacatgagttcttactactgtctaggaatttttagagtaagatcctctctctcatctcccaatgtaaatattattttggtacatgccacatatatagtaaaaacatttcaaatgacctagttctacaaatataattttgttaggattagacatgtatagacta

SEQ ID NO: 45982 - DNA, 2029 bp, Homo sapiens
taagtgccatgaaatagtagggagtgtttccttcgcttatattcgaaaggctggggctgggcacgttggctcacgcttgtaatccgagcactttaggaggccaaggtgggcggatcatgaggttaggagcttgagaccatcctggccaacatggtgaaaccccatctctactaaaaatacaaaaaagttagctgggcatggtgtcgcgcttgtagtcccagctactcaggaggctgagggagaatcgcttgaacccgggaggcgaaggttgcagtgagccgagattgcgccattgtactccaccctgaggacagagcaaggctccgtctcaaaaagaaaagaaaaaaaaaaaaaagactggaaaatgagaccttctctaacccttttcaggaagagcactgtccatgacccatggctctgtgaaatcgcccatctccaacggcaccttcggcttcgacggccacaccaggagcgacggtcatgtgtaccacaccgtgcacaaagactcggggctctacaaagatctgctgcacaaaatccacatcgacaggggccccgaggagaagccagcccaggaaagcaactaccggctgctgcgccgaaacaacagttacacctgctacaccgcagccatttgtgggctgccagtgcacgccacctttcgagctgcggactcatcggccccagaggacagtgagaagctggtgggcgacaccgtgtcctactccaagaagaggctgcgctacgacagctactcgagctactgtaacgcggtggcagaggcggagatcgaggcggaggagggcggcgtggagatgaagctggcgtcggagctggccgaccctgaccagccgcgagaggaccctgcagaggaggagaaggaggagaaggacgcacccgaggttcacctcctgttccatttcctgcaggtcctcaccgcctgtttcgggtcctttgctcacggcggcaatgacgtgaggtgggtgctttcattcattcattcaacaagggtccttgaggctccgccaggggccagcgctgtgcgggtgccgggatccagcagtgaacggcaccgatggaagtccctgccagggataggggtgcgcaggcggtggacagacccataagtcagcattgcgtgcgggacagcgagcagtgttaacaggaaagtaaggtagatagacacagggcaggagccgccaggatggcagtgcgacctgggcttccagggaagggctggccggtgacggaggtgcaggggcggccacgtggcgtcagcaggacggcaggtgcagtcttgaggcgggcacacacctgtgttctccaggacaagctaggaggtcgccggtctgcaggtcgtggatgcagagcacgtggccgatggacacaggaaggaaggcctcgcctcgagaggggagccgtggagctgtgagcaggggccacacagggcacatttgacaggggccacacagggcacgtttgacaggggcactggctttggacgacggcctggatgcggatgtgagagaagaaggaaagaggcagctgccaagatcggagccgtggccttggcaaaggcaagagtggagctgctgtctgttagggatgacggaggccctggatgcagccagggcgcgatgctgctattcaggttgagcaggcagcggccgtgtacgcccgagttcaggacaggccgggctgggtgcagagcaggtaacgtgggtggaggagcactggggcagtgaggcaggcaggcaggaggcagagtgcacagaccgaggaaacagccagaaggtatgctgaaccaggacgctaggagaacttcctaggaggtgatttaatttttttttttaagacggagtctcgctctgttccccaggctggagtgcagtggcgcaatctcagctcactgcaacctccttctcccaagttcaagtgattctcttgtctcagccttcccaagccgctgggattacaggctccccaacctggcccggctaatttttctatttctagtagagacggggtt

SEQ ID NO: 45983 - DNA, 1074 bp, Homo sapiens
tttctcaactaagttgtttcagaattcctattacataggtagctcctctaatgctttgaatatattgatctagagcaaaagacaaagctcaatttataaggcaagatattagagcagttctacaaaggaggtaatctctgtgtgtgtgcatgtgtgtgcacacataagtgtgaatgtttactatgagaagatatccgcagcatattgttatgtgacaaacaaaagcatagaatagtatatagtgggattctgcttctgtttaataaaaggaaaaaagaaaaataaatgttcgacatggtgtctgtgcctacctagaaaatgcctggaaacatacacaccaaatagttcttactgtctccctgggaagtaagttgaagaggggaggatgatgaggaaggttcatatttgtacatcatacaattttgtaggtactgctgatatttttacgataagcatggattatttatataatgaagacaaagaatctgcattgagtcaataagaaggaagattgtagggagatgatgggtcatgatataaggaaactgatatagactaaagccttattggtcccatataagttttatttgtttatagatccttagtcatgagtgttagatgtgaaaaacaagaagtacaacaaggcaataacaatggagactgagctcgtataaaaagttctatgtatttctccctaaatggcttgaatattcgtctaatcttttgggaatttggaatagaattgtaaagatgcttgaggttagagctaaatcactattcatcgtatcttagctgctccgcaaatgaaaggcgcttgacatttgcgccttttagtggctaaaaccgagaacggagacccagagctccttgcgcgggttcctggcagctacttttggctgagtgaacacgagccactgaggctgtgccccagtatgtccatccgcagggggaaatgacggccatgtcttactgcctgacgtagccataattgtttggaaacaattcgagatccgtaccagaaagacaatttaatagaaagtatttttgtcaaaaatgttgttgtgtagaagccag

SEQ ID NO: 45984 - DNA, 1064 bp, Homo sapiens
cattcgagactttaatctcttgcttggttttggccaaaattcaccccagaacaagttcatacacagcaccctcactgaaaactgacaagggcagtcagtgtgtagcaccaggagacttgcctttaaatgcataatctggccggacacaatgcctcacgcatgtaatcccagcactttgggaggccaaggcgggtagatcacttgaggttaggggttcgagaccagcctggctaacatagtgagaccccatctttactaaaaatacaaaaattagccagagggcttgcttgaacccaggaggcagaggttgcagtgagccaagatcaggccactgcactccagcctgggcaacagagcaggactagcttcaaaaaataaataaataaccatcatccctgtcccctctgtgttgaggaaggcagaagctttcctttaactgaagttaattgagtgatttttgtccaggctgtagcgctttgtaaagaaacaattcacagaaaattaaactctgggagatgttgttatggaaaacatttggatttcttcccttggtgtctgcacctctgtactctgtatctgatggttttttgtccttcaatctgtaggttccgctgtgtggcagctgattgcttccttcctgaggcttccaatctcaggaacgcactgcattgtgggttctactataggattctcactggtcgcaatcggtaccaaaggtgtgcagtggatggagcttgtcaagattggtaattggcattttcttttacccataagaaggaaagtttacattttctagagtaagttttattacaagttactttttttttttttttgacccggagtgtcactctgttgccaggctggagtgcagtggtgcaatctcggctcactgcaacctccacctcccgggttcaagccattctcctgcctcaacctcctgagtacctggtactacaggctcctcctaccacgcctgctaatttttgtatttttagtagagatgaggtttcaccatgttggccaggatggtcttaatctcttgacctcatgatcggcctgcctta

SEQ ID NO: 45985 - DNA, 1033 bp, Homo sapiens
gaaagatgatctttatcgtgcatggggaattaagagccatgagcattctcagagtgaggaaatagttttcaaagaaatcttataaaatgtcttttctcttttgtgttttttactgccatcccatggttttgtgaaggtattaataatatcaagccagtgctcatggtttcttaatttagtaaaaagatttcactctcagtctccatagaagatgagaggaactgctaaatttctacctgacttaccaatcaaatgaacgctcttgggactatattgccttgtttagtgtgtttatactgccaatttagcaagttattagtgaagtagaatcaggttttcagatttctgatgaagcacttcagagaattgaacagattctcccacatggcaaagaggaagaggctgcctagatcaacttaataatcatttgtcctctgttgttttttctgctggctaagaacaattgcttaagaatctctggaatgataacaagaaatatggggctgtaagttgagcatggaaaggagttaagataatttcatttgtcagctcctctgtttatattaatgttgcattaatggaaagaatatgcggttgtaccaggaacaaaaagttttataagtaccatccatatttttattgaacctccaatagaatcaaaacaaagttagcaaataaacatgtaagagccatatctattttcatacatggttccattttaaactgtctctgaagggaaagtattttcctaatatagctcttggaacttagccaaacagtccaacatttcagggcacagaattggaacaagtgatcctaggtttgtcatttgatagaagtttcatatgttaagcgatttgctcacgaatatctacctatttttggttatgagtgaagaaaatacctagaatatctgggagggcggggaatccatttatagtgcatacggaaaggaagaaaggagaaaatgttgaagagtcttttctgtgttagagagtgggaataaattcataaagcttggctattctcgtcc

SEQ ID NO: 45986 - DNA, 1057 bp, Homo sapiens
cataatgaagaaagggctctctgaggacatgttttgccagtgctgttaaaaaagtgtcatacttcctgcaggagctaggtttttaaaaataataataaagataaaaataaaaactgtcacacaagtaacgcactgccatgtctgaaaaagacccgccctaccttagccaggaaattgtggccctaatatttcagcacttgaaaatgggatctggccgggtgtggtggctcacgcctgtattcccagcactttgggaggccaaggtgggtggatcacttggggtcaggagttcgagaccagcctgaccaacatggtgaaaccccctctctaccaaaaatacaaaaattagccgggcgtggtggcgcacgcctgtaatcccagctacttgggaggctgaggcaggagaattgcttgaacctgggaggtggaggttgcagtgagccaagatcacaccactgcactccagcctaggcaacagaacaagactctgtctggaaaaaaaaaaaaaagggggagggatctgtagaatccttggcttttatagcatagttaattacatgtttgcagagtactaaaaattgcttgaggtgagaaaagactggtgaggacatttgagccaaactgtagtttgcctggtcataagatattgatgttactattcagtctttcaatctttcaacctcattatgtttcaaaaaactgacctctcagacatgaagctgcatgcactgttattttctacatctgtgtctgttttcagaacatatgaggcccaatgaacatggtgtctgtacagagataagatcgacgtgtctccccactccagagggcacagggagctgatcttaaccctgaatgagcctttcaatataagtagagtctgtgaaacccatgaacttccaataaatatacagccagtagggaacattccaagtgtctgtttaatttggttcttaataatggcagccaaaaagctattttcatttctgtacaaagaggaattactaaatagtcattcttttcttggtatttcttccttggaaaaatcacgtttcta

SEQ ID NO: 45987 - DNA, 1331 bp, Homo sapiens
ccacctcagcttcccaagtaccttggactacaggcgggtaccactgcacccgctaatttttttatttttaatttttaattttttttttatttttagagacgaaatctcactatgttgcccagactggtttcaaattcctgggttcaagcaatgctatgtccttggcctcccaaagtgctgggattataggcatgacactgtgcctggctaagcctagcatcttgtatcagcaagtgcagaattattgcccccaagagaaaggagaaagcttccagtgtgaaagtagaggaaggacagcctgtgttcttttaactgagtggaggctgatgttggggtgcatggaacgtgtctgaccttgtgctctagatctctgtggactccagacaatggaggaggaagggaaacatttaagtgtgtttagcattttctacataccaggtactgttcttggtgataaagctgtatctctgtatctacattcatacatgcctatctatatctatataactgtttgctgtgtatgcataaacatatgtttatttaacaaaacatttataccaggcactattctacatactttacaaatgaaaaactcatttagtcttcataataaccccgtgaggcatgtataattattattcccattttaaaagtgatgaaggcacagtgagaaagtaattgcccaagacaactacaaagtgatgaagctggcatttgaaccaggtagccttgctgcagatgccactttcattggatactttatagcctagatttggaaaaattaagtaatttagtcatcaaagcagctattacttgatggagcttgaatctcaatcaagctgtcccctagacaaacattatagctttcctttttctccatctttgcttgtgtgttgcttctgtatagtgttctttctactcctgctactgttgagagcttaggagaaggctccattcaaatgccactcccaggccgggtgtggtggctcacgcctgtaatcccagcactttgggaggccgaggcggacggatcacctgaggtcaggagttcaagaccagcctggctaacatggtgaaaccccatctctactaaaaatacaaaaattagccaggcgtggtggcaggtgcctgtaatcccagctactcgggaggctgaggcaggacaatcacttgaacctgggaagtggaggctgcagtgagctgagatcatgccactgcactccagcctggggttacagagcgagactccgtctcaaaacaaacagagcgagactccgagactccgtctcaaaacaaacaaacaaacaaaaacaaataccactccctccaag

SEQ ID NO: 45988 - DNA, 1051 bp, Homo sapiens
aaggtagatggatccttatcctcattttacagatgggcagagagaactctgttaaataacttgcctactgtctcaaagctagcaattggttcagtttgactgaacccaggaatatggctctgttaaaagactcctacagccctcttttcctcagaaagccttaaatttcaagttaaaagtagggtaatccttacctaaagacccttaagtgcttttgaaacagacttgaatgattgtgaaacaatatagattgaaatcacaaaaattagtattttatactgtgtatcaaaagatttgggcaattagcagctcgttgcttgatacttaatagttttcctattatctgagggagtaaactgagaagtggatgtttatgattagcagtttagcacaactcattatttcacattctatccaatacagaattgacaataagcctttgtttgtgatgggtggagtttaccttggtgatacctatgaaaaagtggtttctaaacaaataaatactgtaagattgcaggaaaatgttacttatttcaacatagtcgaatattttcaagcacttttaatgggtttttttgtttttgtttttagtataatccagtaactatccttagtactttccttttaaaaacagaggaaactcagtttaatatttgttgattcaagtaataaaactgcatttaaaagtattttcagtttagatatatatctagttcaagccaaattagtctgggattagtaaggtttttgttaacctaactttcgaattactgtggctttaaatctaatctttgactttttccccaaaatcttattgcattcagagtttctcattttagattagcttgcatagtaataaattatagaagtgaaggttgcacttaataagcctgtgcttatttttccatttgaggtgcatatatcacataaggtggtattagtgctcttttgttttgaagctagtggccatgttgtatctgtctctagtggtttcaagcctagcatctttttgttttgttttgttttgttttgttgagacaagttctcg

SEQ ID NO: 45989 - DNA, 1051 bp, Homo sapiens
atatcttagctactcaggaggttgaggcaggaggctcgcctgggcccaggaattctttgtaatgtggtagaggttaatttttacttatttatttttttggtgttcctgggtggacatgaagaatttttaaaatacttataaagatgggcataaagaggctgggcgcggtggctcatgcctgtaatcccagcactttgggaggctgaggcgggcggatcacttgaggtcaggagtttgagaccagcctggccaacatggtgaaaccccgtttctactaaaaatacaaaaattaactaggtgtgatggtgggtgcctgtaatcccagctgcttgggaggctgaggcaggagaattgcttgaacccgggagatggaggttgtagtgagccgagatcatgtcactacactccagcctaggcaacagagtgaggctctgtcttaaaaaaaaaaaaaaaaaaaaaaaaagattagcataaagagttgggaaattgggaaactcattaattgactaatgtccggcaacatttcaactgattggtagagcaccactggcacttttgttttccaaaatgtttggggtcctaatatgttttataaaatcattgtcttccaggctaattatacatgataaattatcagagtgaggctacaaatattcttttgacatgtgaggggcttctaactatgacagccataaatttaagtcactttaagttgggcatcaaaagccaacataaagacattccaggttatggatgggagacaggcaggggctggtccataggttttggccttcccagatgtatctggctagcctttacatacctgataaaggaagtgctctttgtaagaagttagaaaaagagaaggaaaagagtgaaatataaaaagcagtagttcttgaccccaactgcatattcaaaatatctaggtagctttaaaaacaaagcaagtgtctatgctgggccaattcaattaaaatctccgaaagtggcgcccaggtgttggttgtaatttttttttttttttttaagatggagtctcgctctgtcg

SEQ ID NO: 45990 - DNA, 1084 bp, Homo sapiens
gtaaaaagggaactaatattagaattaatttttttacttatttatttatttatttattttttgagacggagtctcaatgtgtcgtccaggctggagtgccatggcactgtctcagctcaccacaacctctgcctctggggttcaagcgattctcctgcctcagcctcccaaatagctgggattacaggcacatgccaccatgcccggcttattttatatttttagtagagatggggtttctccatgttgatcaggctggtctcaaactcctgacctgaggtgatccacctgcgtcagcctcccaaagtgctgggattacaggcttgagccactgcacctggccctaattttttgtatttttttgtagagacaggatttcgctaggttggccaggctggtctcaaactcctgacctcaagtgaaccacccgactcagcctcccaaagtgctgggattacactcatgagccactatgcccagcctatttatttattttagagacagggtctcgctacattgccccagttggacttgaactcctggactcaagcagtcctcccatcccagcttcccaggttgctgggactacaggtatgcaccactgcacctgattctaaaattaatttaggctggatgtggtggctcacgccggtaatcccagcaccttgggaggctgaggcaggcggatcacctgaggtcaggagttcgagactagcctggccaacatggtgaaaccctcgtctctactaaaaatacaaaaattagctgggcatggtggcaggtgcctataatcccagctacttgggcggctgaggcgtgagaatcacttgaacttgggaggcagaggttgcagtgatccaagatagtctcttattagggtaacattatcttgatttcaatcgggtattttatagagtgataatccagagtgattgatactggtgatacactgtggatatcatgggggaaataatgactagatgatagcagagttaagtgaactccactaagcaggttgttcttaggattcctgactaatgttttaatatacaccaaatagaaggacattgtatattgctgcagg

SEQ ID NO: 45991 - DNA, 1045 bp, Homo sapiens
tgttaactaatcgtgaaagttattgggaagggttacctaatttgaataaatgtatcattttgaatttgtaggtcttgttacattgaagcacttcaagactccctttttaaaagtggagccctttcttcctggacactatgaagtttttgatttaaagccaaatgaccaagttgcatccgtggtaatggttaaatatcatcactgtcgggatgaacccccacacgtgctctattacaatgtggagaaactctttccaggtagcagacacccacccacccacctattccccatccttctctaagggaaaaagttataagctgtactttcacatcaattgaatgattttagtttcaagacctacttcctattttgtttggagggaatacataaagatttggcagactccagcattgagtaaatgccatcatgatagatgttgatgattgtgtattttatttcaataactcatccagcccaagattttctggagctgtttgatttatttgccgtgtttataggttttgagacagaaactgtgaagaacaaactccggatcctttttcatgatgctataaagaggcgttttatgatagacaggttgccttttatcaggtgaagtcaattaagaaacctaattatacttcgtgcatgtttaattgaaatgatgtgcagccatccctttggtttttactataaaatatttactatatgatttaatctttccttcattataggatggaaacaattttttataagctgcatttaatagtcatagtaatactccaacttgagttacactatagctatattattggtgtaaaagtgagccagtgaacattctttagaattctgtgtagtgatttttaaccaattcaaatactactattatcacagtttatatacttttctcttcttgaagttgatttcagtttataaaacttggggattttaaatggtaaaactattatcttggtgtttatcaggattgtacatcctctgtccctgtcttatgcaagacacataactaggacacttccacttcctc

SEQ ID NO: 45992 - DNA, 1022 bp, Homo sapiens
taaaattaatttcaccttttttttaatggggctactagtatatttaaaattacatacgtgactcacatatttattggacagccctgctccagaagtttaggaagaaataagaaaaatattgaaaacaggtagcggcagtaggaagtttgccaacctttaagactgattacaataaaaataggtgacagttttaattggctttttcctactagaaaaaataagtatattttacatgcctctttgttctccctccttcccctccaatttagtggttagcttgtatttactatagcacgctaaatattcactaagcagcattaagaagacttaggtaaatgattccctgatgaccacacttgattttcaaagcaatttcctaacccatttttaattggtacagagtcaaagacagatggcttattagtagtcatctcatttaaatctcatagaattttcccactaaatctcaaagtaagtaatttgttataggctattataggctatttggtcaagtgcatggaagggacagcattaggacatgtggtagttcatttccaaattacttgagatgattttcattataatcatatattatttggttctggttttccagaaaagccagctaaacctttgttttatttagatataaatgaaatatcttcaaaggattgctcaaactgacttatgcagcttgaatatatattttttccttagggtgtttatcccaaattatctggctatttgctgcaatttgcagttaaaaaaaaatagttatttttcaagttagagatgttttagtaaaagcagtcattttgagctggcagcagccaaataaaacagccctttatttcacagttgagagtttgaaattggaagttaattgatgtatgtaaggatgatttatttgcttccaggtttataggaaggagcccagttgttttttttttttttttagaaatgttgttgctgtatatgtcccacctacttggcttccttcctaaacaatgcaactttcagacaga

SEQ ID NO: 45993 - DNA, 1032 bp, Homo sapiens
aacttgattaattggagaaggattagtacacacacttcataaatgatgctatattgaatggccagtgaacacatgaaaatgttactaaacatcgtcaattattaaggaaatacaaaagtaaactgcaaggaggtgctgctttacttgtcccattagcttaaagagtaatactaccatatatgtagagcaatgagaactcttataaaattaagagtttttctaccctaacccatgacttagcaattctactcctagttatttacttaatagaaaaagaaaacacatctacaagatttgttcaaaagtgtttataataggccgaaactggacacagctcatatacccaccagttggagactggatcaacaaataggtatagtcataaatggaatacaacttagcaatgataaggaacactgtcttggtacatcaacaacataatgaatttcaaatacatggtaggtgaaagaaaccttacacaaaagagtacattctgtattccatttacatcgagttctagaacaggcaaaattgatacataatggaagaaaaagcagtgctgtcttcgatagtggggtggggattaattgcgaaaagtcttagaggaacttgctgggtgataggaagtattttatttcttgtttggagtttgagttcagtgctatatgtatatgttaaaacttatcaaatggtgtgtcttttattgtatataaaacctactgaaaaaagtaaatacatattaatagaaatatacattgaattcttgttattgatgttcatgctgagatataatgggatgatgtgtactgtcatctgcaactttgaaatgcatcgaaaagtaagatggattggtggagccaagatggctgaatgggaacagctccagtctagagctcccagcttgagcgacgtagaagacgagtgatttctgcatttccaactaaggtactgggttcatctcactggggagtgtcggaaagttggtgcaggacagtgggtacagtgcacccagcgtgagccgaagcagggcga

SEQ ID NO: 45994 - DNA, 1048 bp, Homo sapiens
attataaacaattctttggagttgtgcttttaataattacagaggggcacatgtcggactacctttcctgaaaataacaatgacaacttttggacaaaatataaaaaaagtatgtgaaagcacagtaggaggacagaaagtaggaagaaactgaaggatgttgacatttggaagatagaatggtataagatgagcatttcattttttgtggatgtttcccagaggacagaactcggtcattggttgtgtaggtgacggaagcttgaataaaaaccacaagacagagttaggggtgactctagcagctagaaagttagtgagtataaagtagtctttcataaagaagcgtgtcccaaattctgcataaaagtcttaggctaaaataactaaagatatttcatttgcacaagaaagagttcagaggtgtatagccaacttacctacctattaagcaaaaaaaaactaaatagtcttcagaagaacataatcaaatccagagtttctaaaaatgtactatgcacagtgtccagaatacaatccatattcagtagacacacacatacacaaacagaaaaatgtgacccatacttaagtgaaaagccaattaattgagactggccttgatatgactcctatgttagaattagcagctgttataactcttcttaaggttatataaagaaaatatgtacaccatgaataaacagataagaaacctcagctgaaaaatggaaactaggtaaaaggactaaatgaaaattctataggtaaaaaatacaatatttcaaatgaaaactgattagagattacagaagattaggaaaagaaaaggagtcattgaagttgttggattcatagaagttattctttcttaaaaagtgaaaaagagatttcaaaaaatgaagctagcctcagtggctggtaggacaatatcaaaaggtctaacacttggagtcctagaaatagaggccaggggaaattgggtcaaaaaattctggagaaattatggctggaaatttccctaaattggtaaaaaacatgaatttac

SEQ ID NO: 45995 - DNA, 1115 bp, Homo sapiens
ggaccaggcaacagaccccaacatccttggcagaacctgggaaggatgggagccctggatgtgaggtctgtgggagtctgcagatagaaagcattacattgtttaaagaatctactatactttggttggcagcattccatgagctgattttcctgaaacactaaagagaaatgtcttttgtgctacagtttcgtagcatgagtttaaatcaagattatgatgagtaaatgtgtatgggttaaatcaaagataaggttatagtaacatcaaagattaggtgaggtttatagaaagatagatatccaggcttaccaaagtattaagtcaagaatataatatgtgatcagctttcaaagcatttacaagtgctgcaagttagtgaaacagctgtctccgtaaatggaggaaatgtggggaagccttggaatgcccttctggttctggcacattggaaagcacactcagaaggcttcatcaccaagattttgggagagtaaagctaagtatagttgatgtaacattgtagaagcagcataggaacaataagaacaataggtaaagctataattatggcttatatttagaaatgactgcatttgatattttaggatatttttctaggttttttcctttcattttattctcttctagttttgacattttatgatagatttgctctctagaaggaaacgtctttatttaggagggcaaaaattttggtcatagcattcacttttgctattccaatctacaactggaagatacataaaagtgctttgcattgaatttgggataacttcaaaaatcccatggttgttgttagggatagtactaagcatttcagttccaggagaataaaagaaattcctatttgaaatgaattcctcatttggaggaaaaaaagcatgcattctagcacaacaagatgaaattatggaatacaaaagtggctccttcccatgtgcagtccctgtccccccccgccagtcctccacacccaaactgtttctgattggcttttagctttttgttgtttttttttttccttctaacacttgtatttggaggctcttctgtgattttgagaagtatactcttgagtgtttaataaagtt

SEQ ID NO: 45996 - DNA, 1721 bp, Homo sapiens
atcacttagttcagcctcattcagtcaggtcacagaagtcatggtgatcagtgatatcatcagagccggtaattaaatgtgttcgcagatcaaaggaagactctaagaaagttttaggaagccccgtaataaaaatgtctggtcaaaaatgtgatacagatcttttctctggttaacctctgaatgttttggatcatccttctcaatctctgcggccctgtgtcctgtgcacgtgggttttgcattgagggataactcaagccgagggggttactctcgagcataggaactcacatctgtgtagctgatttcaagggaagcagagtctgtatttttactaaatgtgaacagtaactatgtgaggatgctgccatttgtgctcggtactttgagagttctggcttacatattctgctccttgccttttttcttgtttagtttctgccagtccctgagttgatgccttttcggctaactcgccagtttatcaatctgatgttaccaatgaaagaaacgggccttatgtacagcatcatggtacacgcactccgggccttccgctcagaccctggcctgctcaccaacaccatggatgtgtttgtcaaggagccctcctttgattggaaagtaggttttgtttcatgtgcacttttcacttttgtgacagtgtccccgtgatcaagctggtatctctcgtgtatgatggaagtgcattgagtcatgttgatgaaaatatttacattattttgtacagcatttctcaaagttagtatttaggattgtctgcttgaaaaccagttaagaggctgggcccagtggctcacacctataatcccaaaactttgggaggcagagacgggaggatcacctgaggtcaggagttggagaccagcctggccaacatggtaaaaccctgtctctactaaaaatacagaaattagctgggcgtggtaacgcacacctgtaatcccagctccttgggaggctgaggcaggagaatggcttgaaaccaggaggcagaggttgcagtgagccgagatcacgccactgcactccagcctgggtgacaagagtgaaactccgcctcaaaaaaaaaaaaattaacaggcaaaacctttatttggagaaataaggggactgctgaggcccctcgtctcgtgatgtgtgtgccatggagtctgtatgaacagctttgtagctgtagaaagcaaggctgctcctggttatagatgtttgtttactttaagatcattactagatttaatctgtttgggcatgattgtatataccattatgatcagccgggaaaatcatgttcttttcttctagaattttgaacagaaaatgctgaaaaaaggagggtcatggattcaagaaataaatgttgctgaaaaaaattggtacccccgacagaaaatatgttacgctaagagaaagttagcaggtgccaatccagcagtcattacttggtaagatttttatatgtggaaaaaactaacggactaccgacatgctactgtttctcgaggagccaacatatatacaaagtgctgagctcttgacactctgttagcatgacttctctgctttcattgaggaggaaagcagggcttagagaggctgacttccccaaagccagggcaaggcctgcaactctgacgtatgtgacccctgcactgtcttcaggtttaaactcagtccctggaacagtggcgccaatt

SEQ ID NO: 45997 - DNA, 1047 bp, Homo sapiens
ggatttcactatgttggccaggatgatcttgatctcttgacctcgtgatccgcccccattggcctcctaaagtactgggattacaggcctgagccactgcgcccggcctacagttttataacctaagaattttcatctcagtttaaactaggaggagagaattttaagatggagtggactacttttaaagctaactttaatagcaactcagaaaagatttcacctgaagtgattgaattgctaagtcacacgtgaaactgttctgtctttagattttatcgggaaaacttgttaaagctttccacacaaaagtacttaaacatacgtgtatcacattgtttcccattgcccaggtactgcctttttcctaggaaacactgaaaacagcttttcaagttcacttaaacatccattgtcatttaagaaaatattttctcataggagtgcagaagccttattggaagaaaaaagaaaaacaaaatattttctcatacttactatggattgtgtgtatatctacctattggaaatataaagaaagatgtggcactggctgggcgcagtagctcacgcctgtaatcccagcactttgggaggccaaggtgggcggatcgcctgaggtcaggaattcgagaccagtctggtcaacatggcaaaaccctgtctctactgaaaatagaaaaattagctgggtgtagtggcgggcgcctgtaatcccagccacttaggaggctgaggcatgagaattgcttgaacccaggaggtagaggttgtagcaagccgagattgcaccaatgcactccagcctgggcgacagagtaagactctgtctcaaaaaaaaaaaaaaaaaaaagacaaaacaaaacaaaagaaaaagaggccaggcgtggtggctcacacctgtaatcccagcactttgggaggccgaggcgggcggatcacgaggtcaggcattcgagaccagcctggccaacgtggtgaaaccccgtctctactaaaaatacagaaattagctgagcatggtggcatttgcctgtaatcccagct

SEQ ID NO: 45998 - DNA, 1053 bp, Homo sapiens
atcacgaggtcagcagttcgagaccagcctggccaacacggtgaaaccctactaaagaaacaaaaattagccgggcgtggtggcgagcacctgtaaacccagctactcgggaggctgaggcaggaaaatcacttgaacccaggaggtggaggttgcagtgagccgaggtggcgccactgcactctagcctagacgacagagcaagactctgtctcaaaaaaaacaacaacaacaaaaaaaaaaatgaagaaaaacgtttgcaacacatataagaaacaaaaagctgacttcggcaatctacaaaataaatggtcacaatagaccagtagaaaatggtgggaggaaatgcatgcgtgattaaaggatgtaaggcaaataaacatggaacatacagcctcactaataatgtaagttgaaaatttaaattaggtgtttttcacttctcagattgacagtgattttatttttatttatttatttattttttatttttttggtgacggagtctcgctgtcacccaggctggagtgcagtggcgtgatctcggctcgacagtgattttaaaagatgattatgtgcagtgttggtaaagactttagaaagtagtcagtctaatactttcagaaatgaaaatttgaaaaattctttaccgtggctcatgcctgtaatcccagcactttgggaggccgaggtgggcggatcatgaggtcaggagattgagaccatcctggctaacacagtggaaccctgtctctactaaaaatacaaaaattagctgggcatgatggcacatgcctgtagtcccagctactcgggaggctgaggcaggagaatcacttgaacccaggaggcggaggttgcagtgagccgagatggcgccactgcactccagcctgggcgacacagtgagactcttgtctcataaaaaaaaaaaaaaattccataccaatgtttattacaatttttaaagttgacactgtaattttagttctaggaatttatcctacaggtatatagcacaaagagttacgtgtacaggggaccaggcgcggt

SEQ ID NO: 45999 - DNA, 1033 bp, Homo sapiens
gtaatctcagtgctttgggaggccaaggtgggcagattgctagagctcaggagttcgagaccagcgtgggcaacatggcgaaaccccatctctaccaaaaatacaaaaaatagccgggcatggtggtgcaagcctgtagtcccagctaattgggaggttgaggtgggaggatcgcttgagcctggtaggcaggggttgcagtgagccaaaatcgtgtcgttgcactccagcctgggtaacagagcgagaccctatcccaaaaacaaaagaaaagaaaacttctatagacaatgaatttcttctttttaattccacacacacatacaaaattttgttttgttttgtttttttaatccaacagatgagaacaacgtgtcaagctacttaagcaaaaatattctggctttccgtgaccagaacattctcttgggtacaacttacaggatcatagcgaatgctctcagcagtgagccagcctgccttgctgaaatcgaggaggacaaggctagaagaatcttagagctttctggatccagttcagaggattcagagaaggtaatactggaggaatgttttacgctagtgtgctgtgtatgtcttcaatgtgcagtgttcaggctacaggaaagtaataataaggatgttgctttgtgtttttaaaatatatttgacagttatgcacagccaattttctttttatttatgtatttgtttttatttatttattttctaaattattattatactttaagttttagggtacatgtgcacaatgtgcaggttagttacatatgtatacatgtgccatgctggtgtgctgcacccattaactcatcatttagcattaggtatatctcctaatgctatccctcccccttccccccaccccacaacagtccccagagtatgatgttccccttcctgtgtccatgtgttctcattgttcagttcccacctatgagtgagaacatgtggtgtttgattttttgtccttgcgatagtttactgagaatgatgatttccaatttcatcc

SEQ ID NO: 46000 - DNA, 1178 bp, Homo sapiens
tgaattgtacccaccctgccacaccccctggaatttttttttttttttggagacttgctctgttgcccaggctggagtacacagcagctcactgcagcctcaacctcccaggttcaagtgatcctactaccttagtgtccagagtagctgggactataggcacgtgccatggtgctggctaattttttaaattttttagagacggggtcttaccatgttgcctagtctggtttcaaattcctagactcaggtaatcctccctctttggccttccaaaatgctgggattacaggcctgagccactaaacctggcctgaattgtactctttaaatatgaattatatcccagtgataaatttagagacataattgaagctaaagaaatggattcgctactctaaggtggattgtgtcgtgcaaagggggaagcaggccaattagaaacttctgtcacttgtgtatcatcataccaccttctctctttttattgtattcatacagaacaatttctcacttgctatgaaactactgaaggagctgcataaagagtcaaaaaccagagacgattggctggtgagctgggtgcagagctactgccgcctgagccactgccggagccggtcccagggctgctctgagcaggtgctcactgtgctgaaaacagtctctttgttgggtaagttgaccgcttttatccacttatatcttaaagggctgtgttatattgtcttgtgtatcttcctcttctttgtgctgcatcatctgacatttgggaggtaaatctttgcagtaatttcagggaatatagcaaagtgagccagagaatgatagtttaattattttgaaaactttgtgtttgcatataagatgtaaacaaacatgaaaagccatttcagcctgggcgcagtggctcacgcctgtaatccgagcaatttgggcgaccgaggtgggtggatcacgaggtcaggagatcgagaacatcctggccaacgtgatgaaaccccatctctactaaaaatacaaaaactaggctgggcatggtggctcacgcctgtaatcccagcactttgggaggctgaggcaggcagatcatgaggtcaggagatcgagaccatcctggctaacacagtgaaaccccgtctccactgaaaatacaaaaaaattaaccaggcatggtg

SEQ ID NO: 46001 - DNA, 1112 bp, Homo sapiens
cccctccctcccataccctcccttcccctctactcccctgcactcccctcccctctcctttcctctccttttttcctctttttcctttccttttcttctttcctttctttctttccttccacgcacagggtcttgctgtgccacccaggctggagtgcagtggtgcagtcatagctcactgcagcctcaaattcctgagctcaggcgatcttcctgagtagctgggaatacaggctcacgccaccatgcccagctaatttttacattttttgtcgagatgaggtatcactatgttgcccagggtgttctcgaactccctggccatactgtttctaagaaattggaaatgagttcctggaaaaacaacagaaatttacttgatggttgatcagggatgagctttgtatattagggccctttgtcagtgttactaatattaatagaaataaaattacttggacagaatcatacatgtaaattatgattcaaataaaaagaattttgaagttgggcatggtggcacacgcctattgtttcagcttcttgggaggctgaggcaggaggattgcttgagcccaggaattcaaggctgtagtgtgctatgattacatctgtgaataactactgcactacaggctgggcaatatagtgaggcctgtctctaaaataataataatttaatagcaacctagacttctcttttaaattttcatggctgggcatggtggctcatatctgtaatcccagcctttagaaggattccttgagcccaggagctcgagaccagcctggcaacatagcaagcctccgtttctacaaaaaagtgtaaaacttagcttgatgcggtagcacgcacctgtaaccaaccccggctatttgggaggctgagggaagaggattgtgtgagcttaggaggtcgaggctgcagtgagctgtgattgcaccactacactccaacatgggcaacagagcaagaccctgtctcaaaaaaataaaaaagaaaattttcagtgattttaaactgtttactgttatgtatttatcaccttaagttgggacatataaggagcaaaatggctcaacacagggtatgttacccattcatcaaaaga

SEQ ID NO: 46002 - DNA, 1065 bp, Homo sapiens
acttaccttcttgaatctgtacctttttgtcaccagatttggggagttttcagtcattgtgtttcttcaaatgctttttgtccaaatttctcttggtctctttgtgggaatgcagttacacatacatcgtgccttttgacattgttccataggtccctgactctgttcatttttattgtctttttttgttgtttattcatcagattagatcatttctattgatttgtcttcaatcttactgttattttcttttgtcttacttgttcttctagtaagtctgtctagtgactgttttatcttaggtattgtattttccagttgtaaactttccatttggtttattaaaaaatattttctctttttctactgagatgcgcaccttttcatttattgcatgtgtgtttttcttgacctcctggagcatagttaacatagctgctttaaggtccttgtatgatcattccagcatatgggtcagcatagagttggcatctgttttctgttgagatggatacattctcctgattctttttatcagttaatttttgaatgtaacttgtgaatatagtagtcgcttcttatctgtaggagttcaaagatccccagtggaatcctgaaaccatggataataccaaaccttatgtatactgtttttacctatacatacacacatatgataaagcttaatttgtaaatttgtactcttaggcagtaagagtaacagcaataacaataataaagtagaataattcaaacagtatactataataaacgttatgtgagtgtggtctgtctctctcaaaatatcttattgcactatatctccagtaactgaagccagggaaagcaaaactgcaggtaagataagggggactactggattctcttgtgtagatgctggcttataattctgtagctggtgatctgtttagatagtaggctctgtctttccttttgttggttgaaacctcagttcctgtccaaacctgtgctgttttgagtctgtctgcacatgcacacttcagggcagcctgagcctggtgggttcatgtgcagaactagagg

SEQ ID NO: 46003 - DNA, 1041 bp, Homo sapiens
tcagcctcccaagtagctgggactgcaggtgcttgccatcgtacctagctagtttttgtgttttttgtagagagtttttgcgttttttgtaggccatgttgcctaggctagtctcaaactcctgggctcaggtgatccatgtgcgttagcctcccacagtggtgggatcacaggcgtgagccagcgtgcccagctgggtttttctattcatttagtactgtaggattccttttggtttttcttccattcagtgttactctgaatagcttctcttttctctctcctttccgtaaatctgaaaaggattgtttttagtgtgattgttacattcctcctttttacgtgttctcattggtattctttccaactttgtaaaataattttattaacttttctccactaggctctcaataaacaagactgggtagatggtgagcccacagaagccgagaaggatttttgggaacttgcatcccttgactgttacaaccaccttgctgagtggaaatcacttgaatactgttctacagccagtatagacagtgagaaccccccagacctaaataaaatctggagtgaaccattttatcaggtgggtaaaattattttaagtgattgaaataattattttagataggtgttttctacttaacaaaattgtttaaaacatttcaaaaacaggtagtacttgtgaagcactagggaattgcatgacctgagtccacctacaaaccccatagtattgttaaatctcttatcacttttagctaatcatcttttcaaagtgaatgcaatgcattttaaaataaatattaacattcctagtatgactacataggagcatatttcctgttgtctcttatattacaagaagtcgccccggatcactggctaaacacaggcctcccagctcctgtgacaagaggctctccgcttttctccacaccatacctatcctgactgtgcttgtaaattcctcagtttgtacgtaacatccaaatcatcttccagccaaaagtagttcccattttttgtagaacg

SEQ ID NO: 46004 - DNA, 1070 bp, Homo sapiens
cctccactagatttcccttgtcaggatcgccattgctttccctcccctcattcctcccaatccacagtggatgctgagcttgtcctgtctcgcagcagcctaaacagtgggatgatgggcaggttgcagggagctcctggggtagggcccctcctgtcccactcacaagctcaggatctgtcccagtggcacgtgtgtatgtggacaagctgggtcgcttgactcattgcatttgggttgtggtgctgagcatgatatcaaacctttttatgcaaacattaagaaagctgggttttctcactcgatagttaactagtttttctagttggcaaatcagttaaaacttttaaattagagaaggttcttcttcagctgcatatgaagttatggtacaaatatgctgatggtaccattagattttaaatagaaatatatcagtgttcctaaaaaaggagcattatttcatttgaaactttatttcatttgaaactttcttatgtacaggaatataccattgattctgattggcgtttccgaagtactgttctcactccgatgtttgtggagacccaggcctcccagggcactctccagacccgtacccaggaagggtccctctcagctcgctggccagtggcagggcagataagggccacccagcagcagcatgacttcacactgacacagactgcaggtaacagtgaccctgcccgctggccatgtatacagcaccctgacctctgtgggcagcttctgtcacaacagtgttgggcttttgtgagagaagtaagggataatagcaaaaagcgttaagaacccaaggaagatgtcattcaaaagagggggttcctataacagtcaaactcatggaaacagaaagtagagtgccaggtgccagggtctggggaggaggaatggggatttatagtttaatgggtacagaatttcagttttgcaagaggaaaagtgctgtggaggcagggtgcagtgactcattcctgttattccagctggggcaggaggatcagttgagcccaggagttccgcaccagcctgggcaacatggaaag

SEQ ID NO: 46005 - DNA, 1083 bp, Homo sapiens
ctttgccattattaggtttttctaaaaataaactttttatattgaagtaattttgcatttacagaaaagttgaaagatagtacacataatttccatatacaccctttacccaactttcccccttacataatcttggtacatttgtcaaaagtaagaaattaacattagaacattactatttaccaaactagactttacttccatttcaccaatttccttctaatatcctttttctatttcaggatccagtgtagggtagcacatgaagtaatttgtcttatatttgataatctagtccatgatcattttaagaatataagttttatataagtgtagcgttatctattataactaattttgaaacaaagaagaaaaagttgcctgtcatactttgaaagtgcaataataaaaatagctaaatttgtgtgtttttaaaatctctcccatagagatgatgaaagacaaaaagtatgtttggacataatttataagatgatgccaaagttaaaaccagtagaactccgagaacttctgaaccccgttgtggaattcgtttcccatccttctacaacatgtagggaacaaatgtataatattctcatgtggattcatgataattacaggtaagctatacattgactattttattttgttacttttttgagataaggtcttgctctgtcgacgaggctggagtacaggggcacaaacacaggtcactgcagtctcaacctcctcctgggctcagttgatccttccatctcagccttttgcgtagctgggtctatgggtgtgcaccaccatacctggctaattttgtttattttttgtggagacggggtttcaccttgttgcctgggcaacattaacattttagggatcatttgggtccccttagcaatctggaacataataacacatttttttttaccatatgattaataattaaaacatgtattttggtatatctaattgtatccttttaaaaactcatttcacatatgtgtgtgaaaaaatcagagtgaaaaagtgtggtgttgtgcttataaaacctattttcatagttgtccttttaagatcttg

SEQ ID NO: 46006 - DNA, 1573 bp, Homo sapiens
caatttccttgtctatgacagaataactgcttgataacaacaaaaagaaaatgaggtcttttccccatttcttttttgctttcttaatctggataataggttaataatcactggcttgatgaaaaccttagattaaaatgtgctttaattttcatatcatttgaatttagagaaatacatttcttactaattatgtttgaatacatgtaattttctccttttttatatttcagatggtccttcctatatgtcttccctgtcatatttggcagacagtaccctgagtgaggaaatgagtcaatttgatttctcaaccggagttcagagctattcatacagctcccaagaccctagacctgccactggtcgttttcggagacgggtgatcacatttcacatactaaaagaatattgtcgatgtttgtgaagaaagggggtcacagctatgccttgctgttactacaggaagccagttctctgtccattgacaaccctcggagtatagagttaatttggagaattttccaagatctaattcctagccttttattctgtagactcagcagtcagatatcatcagcacagtaggaggtcagaggtcaacatagcaaagatgctctgacctgaggtgcactcccggggagtcaccatacagacggttcagggggtcacatagcagagacatctgacctgaggagccaccctgaggagtgaccatagatgggggtcaggggtcagtgtaacagagacatctgacctcaggagccaccctgtggaatgactgggcagacgggacggggactatgtacttgggatgcaaggaagacatgaaatccttcttatctgttaattgtacagtgagtgtatttgatattattaccagattatcattattacctaagtgtttgttatatgctgttgccccagaaagagcctcccacatccactgccttgtccactgaatgttaactgtaccctctgctctcctgggccctccctttcgcaggagcagcgggaccccacggtgcatgatgatgtgctggagctggagatggacgagctcaatcggcatgagtgcatggcgcccctgacggccctggtcaagcacatgcacagaagcctgggcccgcctcaaggagaagaggtgcttttcccactcatcttacctgttaatactatattcattggtgtcatactgagaatgaacatttaatattgaaaacaaaaccaaactgcttatcaaataaatgtgatttttttttgttcatgtcttactttgtccttgttttcccataatatcaaaatgtatcattattttattccacgttttaaggtaattttgaatgttttattttaggattcagtgccaagagatcttccttcttggatgaaattcctccatggcaaactgggaaatccaatagtaccattaaatatccgtctcttcttagccaagcttgttattaatacagaagaggtaagtaattgattatttctttattctttgaatagattctgtaagtctgtttattcaattctatgaatgaatcaattgcaattctatgaatatact

SEQ ID NO: 46007 - DNA, 1041 bp, Homo sapiens
atcacattttgcatcaccaaacaaattcattattaccctcctcttacttggtgctgtcttacctcatcagtgaatgatgtcaccgttcagtcatgactaggctgttgtctgtcctccttgcttccttccctctctttacttactgcacttgatgccgttgcgtcactgaccactgtgttgcaagatccatgtatatatgctgcctttgctgtgagatggatgacatgttccttttcatattcccagtgcctaatactctgcctggcacaagcctgaccctcgagaaaggctgaatggcattaggtcctgttgtctggcattgttgggcttgagcagtgattgccatgttgtgtgaattgatttgtcacatggatctctctgcagattgtgctacgatgcatttacagagaacatggcaggagagaatcagctgctggagaggagaagactttaccattgtgcagcatacaactgcgccatatctgtcatctgctgtgtcttcaatgagttaaaattttaccaaggttttctgtttagtgaaaaaccagaaaaggtaggccactcctacggtgtgcactattgttattgtaggagttcaaaagttagattatatcagtcaaacttacagataatttataccatcttatattaaagatgtggttcgtttaattctgcataggtatatttaaagctggagtgcttttccatgagctattacatagcattaattctaaagtaacatcgattatgaggatcttcaccattcagctatttttatatgattctttgtattcacagaacttgcttatttttgaaaatctgatcgacctgaagcgccgctataattttcctgtagaagttgaggtgagtgaaattttcaatgttaaaaaaaacttatcaagtgctcacaaagaaaaccatattatgtcaaacacgttaagttgccaatattcaagtcggctttcaacaaaaactggtggtttcatgtggtttctataaaatctggcaattgtagcttcagatacaatctcaggcaactac

SEQ ID NO: 46008 - DNA, 1047 bp, Homo sapiens
ggaggcttctatttagccttcttggtccactccttccattgaattttatcattcattcattcatttattatttttgagataaggtcttgctctattgcccatactggagggcagtggcatgatcatggctcactgcagccttgacttctgggctcaagtggtcttccttcagcctgcctagtagctggaactacaggcatgctatcacgcccagccttttttcttctttctttttttttttttaaacgtagagaggttcttcctaaattgcctgggctggtcttgaactcataagctcagatgatccttctttctcagcctccaaattgctgggattacaagtgtgagccgccatacccggaattaaaatatttaaaaagaaattgtaccagtagttcataaacccttcaggatatagaggaggaaggaatacttcccaactccttttgtgaggcgagtaacaagaccaacataagagaaagacagcacaagaaaactatagaccagtaagtatccttcatgaatataaacacaaaaatttttaaagatacattaagctattcagcaacacccacaaaacattatacgccataacctattggtgtttattgtaagaatgaaaggttgcttttctctctgggaatcagttagtcttagataccatataatagaataaaggaagaaaactcattataatttcagtagatgcaggaagacttttgacaaactacaacatccatttgtgataaaactgacaaaggctgtctatgaaaaaccaatagccaacaaaatatgtaatagtgaaggagtgcatgcttcctcctgagattgggaacaaggccagagagcctgaaaaaataaacaaaaataaataaaaggcaactaaattttttactattaaaatttttttcttattcttttttctgttttacaggattttaatgtaacttcttttcttattcctttacgctgtgcatcttgttctcttttcctttctaatgtttccagtgatagtctataattactcaatggctttacaatatgcac

SEQ ID NO: 46009 - DNA, 1034 bp, Homo sapiens
cattatataatgacttcaaaaatccctttttatactttttgtcttgaaatctattttgtctgatgtaagtacagctactcctgctctgttttggtttccattggcatgaaatatcttttttcatccctttattttcaatctgtgtggatgtttataggtgaagtgtgtttcttgcaggcaacagatcattttttttttttttttttttacttttttatatcagtttagccactttatttttattggacagttcaatccatttacattcaatgttgttgttgataagtgtggacttctaccatttgttatttgttttctggtcattttgtggtctttcctccttgcttcccttcctgtcttccttttagtgaaggttattttctcgggtcatatgttttaatttctagctttttatttttgtgtgtttgttgtatgttatttttgatttgaggttaccgtgaggcttgcaaatgatataactcattttaaactgctgacagcggaacactgattggataaacaaacacatgagcaagagaaaaaactaataaaaattatacactttaatctcatcttccgctttttaaacgttttgctgtttcaagttataccttattacactgtctatatctggaaaagttattatttttgataaatttatctttttagtctttctactcaaaatataagtagtttacataccacaattacagtgttacaatattctatggttttctttgtacttattagtgagttttatacttcaggtgatttcttattgctcattaatgtccttttctttcatattaaagaactcctggccaggcgtggtggctcacgcctgtaatcccagcactttgggaggccgaggctggtggatctcctgaggtcaggagtttgagaccaacctggtcaacatgatgaaaccctgtctctactaaaaataagccaggcgtggtggcgggtgcctgtaatctcagctactcagaaggctgaggcaggagaatcgcttgaaccctggaggtggaggtcgc

SEQ ID NO: 46010 - DNA, 1054 bp, Homo sapiens
ttgggaggccaaggcgggcagatcataaggtcaggagatcgagaccatcctggctaacaaggtgaaaccctgtctctactaaaaatacaaaaaaaaaaaattagccgggcgtggtggtgggcgcctgtagtcccagctacccgggaggctgaggcaggagaatgacgtgaacccgggaggcaggtgactgagcgagactccgtctcaaaaaaaaaaaaaaaaaaaatagcaaaataccattgactgtaatcaccctattctgccatcaaatactagatcttatttattctatctaaccatgtttttgtacccattaactatccccatttccccctccctcttaccctttccagcctctggtaaccgtctttctattctctatctccatgagttcaattgttttaatgatttttggatgccacaagtaagtgagaacgcgcaaagattgtctttctgtgccttacttatttcacataagatactgatttccagttccattcacgtttttccaaatgacagtatctcattcctttttgatggctggatagtactccactgtgtatattttctttatccatttgtctgttgatggacacatacgttgcttccaagttttggctgttgtgaacagtgctgcagtaaacatgggagtgcaagtacctcttcgatatactgatttcctttcttcacccaggctggagtgcagtggcatgatctcggctcactgcaacctctgcctcccaggtgcaagtaattcttctgtctcagcttccctcccgagtagctggggttacagatgagtgccaccttgcccagctcattttttttgtatgtttagtagagatgggttttcaccatgttggccaggcttatcttgaactccagacctcaggtgatccacccgctttggcctcccaaagtgctgggattacaggcttgagccaactcgcttggcctatttttttttttttttttttttttttgagatggagtcttgctgtgtcacccaggctgtgtgtatacctaacagtgagattgctggatcatatggaag

SEQ ID NO: 46011 - DNA, 1055 bp, Homo sapiens
gcaggtgaatctcctgagggcaggagtttgagaccagcctggccaacatggcaaaaccccgtctctatgaaaaatatgaaaagaattagccaggcatagtggcaggcgcctgtaatcccagctactctggaggctgaggcagggagaatcacttgaacccgggaggcggaggttgcagtgagcctactaagatcatgccactgctctccagcctgggtgacagagtgagactctgtctcaaaaaaaaaaaaaaaaaaaaaaaagctgaggtatagaattgtattcatgttggtttttaatataatttagaaattatggtgaagccattcattgattccacataatgctttatttgcaatgtcttacagtaattttatttattctgtaggatatataagccataattcgtgcagtttcttatgtctgtcttgctccacagggccaagctgtcactcttcttccattcttcaccagcctcactggaggcagtctggaggaacttagacgtgttctggagcagctcatcgttgctcacttccccatgcagtccagggaatttcctccaggaactccgcggttcaataattatgtggactgcatgaaaaaggttagtttctagtagtatcaagtaaaattaaaacactgttttttttttcttgttacatatcttgatgaaaagaggtgagtaaaatatccacaatcagagaagttgtaaaccacccaataggttattcaaaatgttctttctacacaaagcttgtacagtacatttttactagggtcattatttgtagaagaggaagcacatactgaatcagcaccatgtcccatttatttatgtgtgtgtggcctgagaattcatttaattcacttggaaagcagtgacaggagtatatgtgaatccactggaatttgtttttttctcccatttttaattgtgaaatattttatgtgtaaaatggaatgtgtaaaatatatgtaagttatgaagagtaataccaaaagaagctaagaaatagaatattaccaataatttccagtttctaaaatttaat

SEQ ID NO: 46012 - DNA, 1051 bp, Homo sapiens
tactcgggggtgctgaggccggagaattgcttgaacctaggaggtggaggtttgcagtgagccgagatcgtgccactgtactccagcctgggcaacagagcgagaccctgtctcaaaaaataaaacacaacaacaagacttttggacatttggaagaaatatgggtcaaggaagatttctttcccaaaatgaaacctagaaaatggaggctagttgaaatatatacaatttcagcttgaatccaggcttcacatatcaggctctttttagacctgtgtcattttccaatttcaaagttatcagttgcccaagggtctttctgtgccatgcaaagatgtgccccagttatggtacttctcctttctttttcccagtgtgagcgccttgtgagtcttctcctgaacccagcggtgctgtccacggcgtccttgggcagctcacagggcagcgtcatccacttctcccatggggagtatttctatagcttgttctcagaaacgatcaacacggaattattgaaaaatctggatcttgctgtattggagctcatgcagtcttcagtggataataccaaaatggtaacaaagtttccctttaaataaactgttttttttgtttgtttgtttgtttgagacagagtcttgcactttcgcccaggctggagtgcagtggcacgatctctgctgactgcaacctctgcatcccagattgaagcgattctcctgcctcagcctcccgagtagctgggattacaggcacccgccaccacacctagctaattttttgtatttttagtagagacggagtttcactatgttggccaggctggtcttgaactcctgacctcgtgatccgcccagtttggcctcccgaagtgctgggattacaggcgtgagccactgcacccggtcaatattttcttatataatccttataaaagggttgccatattcctgaaatatttcattaaagtatgacaagactttttcctataaggttgaaagctcttgcttttaacaaactcagaaaaacccaaaacataccccttatc

SEQ ID NO: 46013 - DNA, 1050 bp, Homo sapiens
cgacccaggcaacatggcaggaattcatctctacaaacaattaaaaaacaacaacaacaaaaaaaaacattgtccaggagtgggtgccgcggacccgtagtcccagctactcaggaggctgaggtgggaggattgcttgagcttggaagcctgagaatgcagtgagccacgattgtgtcactgcactccagcctgggcgacagagcaagaccctgtctcacaatagcaagaacaacaaaagcaaagttgaattaaaatttttctgaatattggaaggtagttgtcagtgctatctgaagtgggttttttatttaatgagaggagtgaagttgtttttttctaagaaatatctttttgctaggcatttcagtgttggcttccttttagtccacagatttgcatcattctgttggcacagaacttctttccctggtttataaaggcattgcccctggagatgagagacagtgtctgccttctctagacctcagttgtaagcagctggccagcggacttctggagttagcctttgcttttggaggactggtaggaaaaacgcctctgcatgctgcactcccctaataatagaaatacatatgtcacttgcaggtgtctctagaaactgtggaatttgggtagtaaggttttagctggacaagtattgtatgatttgcatgagccaactttctaaaagattattttctcaatagttaaaaaaaaaaagaacggaatagaacaacattctttttaaatagaggttttgtctatcccactttgtttccaaaaggaattagctagagaacgttttgtgactatgaagctgagtcatgttgacatgtggcctcttctcctctccttggtggtccttcacatggatgattgggagggcctctgaaggataatcccagaggaaccagagtctccaaaaaaatattctcatggctctttgaaccatgcagggctggccttaaatagtccctgctgtagctgaaatctgcagccagccctctgtgttcactccatcccaactttctttcttctgtagcagaa

SEQ ID NO: 46014 - DNA, 1044 bp, Homo sapiens
aaatttaataataatcagctatatatgccttctttggaaatatgtctctgtacttgagaacaggtacaattcaacagtgttgtgatgccattgatcacctatgccgcatcattgaaaagaagcatgtttctttaaataaagcaaagaaacgacgtttgccgcggtaggtgatcttgcttccttttccgtcttttcccacaacataaaactaattcacagctaatgaaggacaacctgggatggatctgtggaagtataaggaattacttcctaaacaaggaatgtgtggaagtctgaagagttcgttttccaaaaacgttaaaaagctttgtgtttgaaaatacttggtttaagggataaggtataaggtatttgatctgggttgagatagtacatacaaattgaaaattagttttgtaacagacgttttatttaatatgcactaattttgaacatgttttgatgtggatgatttgactagaatatgcatgaaccattattccgtaaattttgaagtgtatgaactgaatgttcaaatagtaacattttgacagacatggaattataaaattaggaaatgaaactgcttagagccaaccaaggctgggatgttggccagtggtttccagtttttgcccttattccatcctagtggtgttgccttctccagtagggtgagtgccctccataagcccctccagatctctgcagggtatctggggacatctgttatccatgctagtgaccgccactctggagaagcacagtcccatgtggactggattattaatattttctcagttgttttaaaagttgattcttccagattctactattaacttacgatatcagtttagttcattggttctaactttagcatacattagaattgcctggagatctagttaaaacacagattgctgggctggccccaccctcaatttctgtgtacccctggggtagggccagataatttggatttataacaagtgcacaggtaatgttggaacagctgtccagggaccacactttgagaagcactgc

SEQ ID NO: 46015 - DNA, 1019 bp, Homo sapiens
gatatacatggagagtctggccttagcacatgcagatgagaagtccttaggtacgttttgcttcagtgttctgtgtgcgttacaggtctgaagagtttccccaatgaggagttaaggctcgtgtgattctcttataaggttttttttttcccaagagttctataaattaataaatgtgaagagaatccccttcagtgcctcaaacccagcttgttaataattttttcatgcccttattttctttgactcaccatgtactcctggtggccattgaggttgaccctggttggttgcagattctgcccagggcaggggagacaacgaagccagtcagacactatgatgctgtgatgacagaacatgaaactgtgcagatatggtgctgaagaaactggatgtggtaaccactgagatgtggtcagtgcctctgcactcactcgtgatcatttagaaagtagaaagtggatctcattacaggactgtgatagagttgtttcatccatgatgaaggaatattataaagatattaagtcagaagtaggctaaaatagctaagagagtaataaatgattacaattaaattctatgcaagaagctattaggaactacatagagttgttgagctagaagacttcttaactccccgttggtcccagcacatgatgtagttggggcacagaggctcaggcgtgtcattgactgagacggccacacagctgtggcaggagtttatcactgatacgggtcttgacttattttattttatttgtttattttttgtgatggggttttgctcttgtcacccaggctggagtgcagtggtgcgatctcagctcactgcaacctccgcctcctgggttcaagcgattctcctgcctcagcctcccgagtagctgagactacagggacctgccaccacgcctggctaatttttgtatttttagtagagatgtttctccatgttagcctggctggtctataactcctgaccttacgtgatccacctgcctcagcctccc

SEQ ID NO: 46016 - DNA, 1027 bp, Homo sapiens
cttaggatatagccattttcttttttttcagggaagggaaagattgttttgttataattaaagttttctctcccctcttcatggcttttcagtttattaatttgtttaaaagaaaatgttttcattatatcagaaggaaatagttattcaagcctagattctggatacactatggagattggttttactaatgtttatttttttcttgactagtgctataaattaatttttaacatactttagttatgctcagagatagaccaagggtattcagttgtcagtggttataaaaattagtacaatcaaggtctctttgttttgtttcaggatggaattgtggaccctgttgacagtactttaagagatttttgtggtcggtgtattcgagaattccttaaatggtccattaagcaaataacaccacagcagcaggagaagagtccagtaaacaccaaatcgcttttcaagcgactttatagccttgcgcttcaccccaatgctttcaagaggctgggagcatcacttgcctttaataatatctacagggaattcaggtttgtaagctacacaacagagaagagaaacttgtggttttgaaaggtgacttggagtttcactctgtgtatccgtgtgtcatatttcctgcatttagtaagtaattatgtgctggatgctgtgctgtcttctggaaattaaaaagtgaattaaaattcagtttgcactccagaagcttggaaactgctgagaaatgcatgtaaacactgtctcagccattttggaaatgcaacaaaagacacatatacaggggctttgggtgcacagaggaggagtagctgatccagggtgagcaagtttgctgtggcctcttgctagggtttatattggagatgagacttgaaggataaatggaagtcagccaaggcattttagatcaaagttagtgggtggtgggggggtagagataagaaataggaaggtgtctgaggcgataaagtcctttgaggtttggaggcaggtgtcgtgaggc

SEQ ID NO: 46017 - DNA, 1193 bp, Homo sapiens
ctgttctttttcagtgtgcactgatttcatattgttcaagcacacatattttacaatcaatttgtacggtagtggtcctgaggtgatgtacattctcagcttacgaagataacaggattaagagattaaagacaggcataagaaattataagagtattgattggggaagtgatgaatgtccatgaaatcttcacaatttatgttcagagactgcagtaaagagaggtgtaagaaattataaaagtattaattttgggaactgataaatgtccatgaaatcttcacaatttacgttcttctgcctcggctccaaccggtccctccgtgtggggtccctgacttcccacaacagaagaaacatcaggcataaagaggattgtggctaaaccaatcctaagagtgttatggctgaagatgggccagggtgaccagacactgcctgggggctggggggagatgaggaattagattatatatcaaggggaggagttttcactgaactgactcagcggagttcttggtgaaactggactaatagagatgaacatggaagcccagaaatcaaggcctagttgagaagagttcagaggagcctgactagagttagggtaaggaagaggggctttgtcacaagtgaagaaactaactgtaaatcaataagatttagaaggaaaaacgaactataaataaattacagaaaaatgtaatgaccacatagcatatctgtctgtgtatatctttaggtcttttttgttgataacacatcagtttataatattaaaatgttcaaagataaaaatgaacgttcacgtcacccctttcacctgcttgttccctgggaaaagatgttagatcctctgtaaagtctggagaatgtctttataataacacatcttgacatgtgcatagatgttttgttaacaaaaagtagactcgtagcatttcaaaacgttttcttctgtgtgcagtgtgatttctgctccttggatggatttcattacttttctataatcagcatccttctgtgtctttctataaagtttgtacagatagggagacacataaaagtgttaatgtattgatagttttgaccttataaatgtttaagactactgaatggcacaaaaccaacattgtaacatgtataatgtgcaacatactactgaagagatcagattttaaaatggacaaat

SEQ ID NO: 46018 - DNA, 1050 bp, Homo sapiens
aggtatgcgtgtattaatttgtaaattttctatagtgcttcaaaaaatatttttacttaaagtgatagttgaaaatgtgctaacagatgaagcaaagttatatagttctttaatatggcaacagtgaaatatacttcccagtttctaaagcttttacattttaattctttgttcttggataaaaaaacaaagtgaacagaatcattagttttatagaacaagaaatgttaattccagttaatttatatttgggttacatgatagttatgtgcaatgaaatttttcttcttaaaggctaaattgagtgacatttcaaatattctcttgtcatcaacgtgataacttaaacattgctgacctcctggtctgttttaggttgcagcctgtgaacttttacatagcatggttatgtttatgttgggcaaagccacgcagatgccagaagggggacagggagccccacccatgtaccagctctataagcggacgtttcctgtgctgcttcgacttgcgtgtgatgttgatcaggtaagggctttgaatctgaaatagttgtaaaatttctaaaagtttggtttgtctaattcagtggtcagcagagcagtggaattacctggagatggttaggaacgatactgctccctgactgctaccccaggtgctctggtttaattggtcatgggcatgacctgggcaccaggacttctaaaagctctcccctccactttcagtgtgtctcggagtttgggaatcgctgttgtagttaaaagttactgagagtccaggcatctaaaggtgaattagctgtcacccctctcatggacaaacgtagtctttcacaaagggaagaagagagaaataaccatgggccgcgcgcggtggctcacatctgtaatcccagcactttgggaggctgaggtaggcggatcacctgaggtcaggagttgaagaccagcctggccaacatgataaaacccccgtctctactaaaaatacaaaatttatctaggcgtggtggtgcgcatctgtaatcccagctacttgagaggc

SEQ ID NO: 46019 - DNA, 1059 bp, Homo sapiens
tcccaaagtgctgggatcactggtgtgagctaccatgccccactgtgcctggccaaaagtctacatttttgattagtaaaaattcctctgtatttttacttttgaaatttggtgttaaatataccagtgacttttggttatttagggagttagagcctgtatttggaaagtgtttcaaagagattttttttttaagtaaaaattttgttcattgactttcttctacaaaatactttaagtaactcttactgaatttggatattaaacatttgagactattaggcttgtttaaaagtaattttactttaaattaaatcgagtgatttctgatgttgtaattacatatctgaggcaaaagaaaagggaaagatgaatgaagtgcttcactttaatagaatgtagaacagctggcattagaaatgttttgatttgtgaataattctgacactaataaaaagaaaaaaagtgtttcattcttcttaaatcttttctaacagtcacgtcctcagatgagatgatgaagagctatgtggcctgggacagagagaagcggctgagctttgcagtgccctttagagagatgaaacctgtcattttcctggatgtgttcctgcctcgagtcacagaattagcgctcacagccagtgacagacaaactaaagtacttctatttttcatttcacccattatttagatcctattgctttaaaaatacatattgcttaggatatagagaacatgtttcagccattccaatattagtaattttgtattttctgtaatatagtaattagaaaactacttacttattagaagtcagtgtcattgataaatgtaagttaagtataaatcatcttaataggtaattgggctgggcatggtggctcatgcctgtaatcccagcactttgggaggccgaggcaggcagatcacttgaggtcaggagtttgagaccagcctggccaacatggtaaaacctgatctttactaaaaatacaaaaattaggtgtgctggcatgcgagtgtagtctcagctactcggtaggctgaggcaggaga

SEQ ID NO: 46020 - DNA, 1034 bp, Homo sapiens
cctcttgatgagttttgggctgtgcctttttgacagacgctgggttctcttcaggacacttggtgcctttgctggttgtttccactgtaaccatttggtcagtgtttgcatcatctttttgtggttgtcaggttactgtttttctctctgtgtgagttagtaatttgaggcattccatgctccactttctggagtgatcagtcctgaggcctttaggtggtacagaggaaggtagatgctgggcagggggaggtcccaggtgctcccaagggtgtgaggaggtcatcccccatggggtggcctggcatggggtttacccaagccagatgaggcacccacgtgttgggacagctgtctgggatgttggggtgcaggcagggtgagaagggcgatggaggtagtagtttggttacatacaggagattgaacaaatacataaattcattgagaataagggaaactaggtttctcatgttgaagtgagctacaaatacagaaagacaggaaactggaatggacactgtggagttgcattggaagtgggtatatcagtgtgaacccatggtcctccgtctccctctgcctctccccagttatatatgtgcattcacttatggatgcatctaaataaatgtgaaaatagaactgagagagagagagtgtgtgtttgtgtgttacatgtactctggccactgaagggacctctaggagtgtggtatctgaatagtaacaagcaaacctggcacccaggtcatggcctccaaatctcattttccttttttttattattattattattattttgagacagagtctcactctgtttcccaggcgggagagcagtggtgcaatcttggctcactgaaacctctgcctgctgggctcaagtggtccttccacctcagcctcccaagtagttgagactacaggcatgcaccaccacgcccagctaatttttgtatttttagtagagatgggggtctcactatgttgaccagactggtctcgaactcctgacctcaagtcatctgccc

SEQ ID NO: 46021 - DNA, 1031 bp, Homo sapiens
caaaaaataaataaataacaaataataaaagacaaaatctgtaatcgattatatagatctttaaaatatatctaagtgtactaggttacagttttcattttttatatttaaaagatcctcaggtagagaaaaatggattatagatataactaaacattttaggatacctcaaaatgttacgtgatgggtttgtagcttagttgttcgattatgtcccttacaattttaagatcagaatgatacaaatttctaccttcaatttctaatttgtttttacagagagattctccctgagaaacaagcagaattttttgaaccatgggtgtactcattttcatatgaattaattttgcaatctacaaggttgcccctcatcagtggtttctacaaattgctttctattacagtaagaaatgccaagaaaataaaatatttcgaggtgagtctttcttgcaggatgttgaatcttgcgtttttttaggtcatgagtatatataaatgtatcataaaatatgtgattgtggcctatgcagttttaaagtctactaattttattctatgtgtttaaaaaaattgatatgtgaatggcagttggatagcactctaaaaagctagcagcattttttgccctgatgctcaaacacctggctaattatgtaagattaacaaggcctctcaaagtatggtcccaggaccggcagccttgagcattgctttctgcatcacaaaccttgggggcaggtctctgctgccctgctaagcaccaccaggtgattctggcacccagtgaagtttgagaacaactggattagcattctcgacgctccagtcagtcacatgaggagcccacctgggtaattacagggtgagatgaggaagagggaatggacttagctgtgtgcttggcttctcactagctgccaccttccctcctcttgttctgactagcctgtgccttgaaatgtctgcagagctgattctgcctcctgtcttcattagatgttggtaacttgaaatggattcacccctct

SEQ ID NO: 46022 - DNA, 1035 bp, Homo sapiens
gctggagtgcagtggcacgatcttggctcactgcaaccttcccctccaaggttcaagcgattctcctgtcttagcctcccaagtagctggtattacaggcgaccgccaccttgcccagccaatttttgtgtttagagtagagacattttgccatgttggccaggctggtttcaaactcttgacctcaggtgatccgcccaccttggcctcccagagtgctgggattacaggtgtgagccaccgcacctggccttagctttttaaattatgcttttttaatacgatgtcttccttaatcatatggtctcctatgggtggcagtttaatttagaaaattctgaaaaccagcatgttctggcagcagtgctgcttctgagaatccatcactacatattgtcatgctgtctttctggccagggccctgagtctgaatctgaagaccaccgtgcttcaggggaagtcagaactggcaaatggaaggtgcccacatacaaagactacgtggatctcttcagacatctcctgagctctgaccagatgatggtaacatttaccattgaaagccataaatgtaccttacttcctttattagtctccatagtttagacataagacttatttcagaattatattttactaactttcaaaagtttaaaacagtgtacttcaaaaataaaaaattaaaaccgtatgaatcaggaagttagaatgagagtggaaataaatgaattgaaagaaacacagacatagaactcctttaacattagttactgtagctgagtcctcattttagctttaaatagcaggatggtatagctcatgctaagctgttcttcctaacaggtccagcctgaggatggatatatatgtatttgtacgtatgtatgtatgtgtacgtttatatatgtgtgcatatttagttatgtatgcacataagtatatgtgcatgtacttacatgtacacagacataaaagatatagtgtctatatatgcatattacacatatttgtgtttatacatacacatccacagat

SEQ ID NO: 46023 - DNA, 1035 bp, Homo sapiens
gttctgaactctgtttattgacgatgtctgaagtcactggtcccctgacagctctctttcaccctgtgggtgacaggtgagctctaaagactgctctttgcttcctcagagagccttaattcaaaacctgtttttggttttttttttttttttttttcagacttatgtgtatccttggtctcttagtcccttctctaggaaaaatgtatcacatagccttatttaagacacttttctgaacctgatagagactaagcaaaatggaagcaaagggtctttatgattaaaagcaattgcgtgtaactataacagtacattagtagcatctaaacagttctagtttttccatgtttgtatagattccattgctattaaatatttccaaaaaaataaatattatgtatttgcaggtttctaatatggtggcgaaaaatgcagaaatgcataaaaataaactgcagtactttatggagcagttttatggaatcatcagaaatgtggattcgaacaacaaggagttatctattgctatccgtggatatggactttttgcaggagtatgtctcattaacttactctattttgtcttggtttcacgtgattgtttaaaggaatctaattcattgcattttgaatagtgtctaatacttgtaacaatacagtagacccttgaataacatgggcgtgaactgcacaggctcacttacatgcagatgtttttctaccatacggatcaaaaatacagtgtgtgctggatgtgaaacttatatagagggctgaccttttgtatatgaggcttccacagggtgactgtgggacttgagtatgcatggatttaggtatactgaggaggcctggaaccaatccctcccgcatgtactgagggtcactgtattagtattgtttattaacagttaagatttcttcagtgtctgctgtgtactagaattctttacatgtggtatctcaaaatctcctaacccttaggagctcagtattactctgttttgcagattagcaaactgagatgcagag

SEQ ID NO: 46024 - DNA, 1066 bp, Homo sapiens
gtgataacatctgtgatgtttcacacacagttatttacagggaggctttcggtgacttagtaagctctggttgaaatgctgatactcaggttacatggttgaaagcactttattttagggtatctttcaggggatccaggctgtttgattctgactttgcctcaatgaatcctgattccacttctgacccttgttttgggatttgtcagccaagttatgggcctgttaattggtagtgttagagctctgacaggaatccctgggttactgtagtgtaatggtactagatcttcctgagcacagtgttgactttgacatatccctgcaggtttgttggttttctgttctgtgttatgtcgtctgattttaaatataatggcatttgcatttgcagctggcttgcgcctatttgccctgcatgcatctcagtttagcacctgccttctggacaactacgtgtctctatttgaagtcttgttaaagtggtgtgcccacacaaatgtagaattgaaaaaagctgcactttcagccctggaatcctttctgaaacaggtaccacaaattcaactgtcatttaacaatatttctttcacacacagaattaaattccctttgcatgcatgcatgtttgaaaataaatacaagttgatctgtagcttctgtagtatttaaagcagaaagatgttgatcagccagccatatgggaggcagccagactgaaagagagctagggagatgccagatttgattagggcctcagagcctagattgagacaagtgtaatggagcaaagacgtggtgaggtgatggccggaagggctgggaggtcagggctggagagtgggtggagggctgaggggagccccatctctcctggaagaggagggctagctgtctccaggggatagatgcttgtgtgtcaacttgaaaacaaggggtgcctctttgccattgtggattttccacctggataggaggtggttacagaatctgtacctgcgtatgtggaagcttgtctggtcggctgaggagaccgtgcttgtcattctgagcactggtctccagg

SEQ ID NO: 46025 - DNA, 1040 bp, Homo sapiens
tcctgacctcaggtgatctgcccaccttggcctcccaaagtgctgggattacaggtgtgagccactgcacctggccaagagggggtttaaaaagtagaagtaggccgggcgtggtggctcacacctgtaatcccggcactttgggaggctgaggcaggtgtatcatgaggtcaggagttcaagaccagcttggccaagatagtgaaaccccatctctactaaaaatacaaaacaattagccgggcgtggtggcaggcgcctgtaatcccagctactcgggaggctgagacaggagaatagcttgaacccaggaagtggaggttgtggtgagctgagatcgtgccactgcactccagcctgggtgatagagtgaaactcggtgtcaaaaaaaaaggatagaattttcacacctatgttcctagcagcaagtccatagtgagccaaagggccagaaccacccaagtgttcatccagggatgaatggataagcaaaatatggcacgtagacacaatggaacattacttagacttaaaaaggcaggaaagtctgacacatgctgcagcatggatgaaccttgcagacaggatgctaagtggaataagccagccacgaaaggcaaacaatgtgtggtttcactcacacgaggtacttagagtagtcagattcacagagacaaagtaaaatagaggttactggggctgggggaggggaaatgggagttagtgtttgatgggcacccttctgttattgatggtgaaaacattttgggtatagacaatagtgatggttacacaacagtgtgaatatgtttagtgccaacgaattgtatctgtacacattgtttaaatgataaatatgtctgttttaccacattgaaaaaaacagatacaagaccatgcttctacagggagtgggccactagagggaggggctgcaggagagtggactgtggagggcagagcctggagaagtctgtccttgctaagtccccaccctaaacccactgtgtactgtgggtgtccttgtgtctgcacacttg

SEQ ID NO: 46026 - DNA, 1922 bp, Homo sapiens
cctcccaaagtgctaggattacaggcgtgagccactgtctggcgggaatcagttgatacgttgcagttaagtggttgttggggtcactgtgacctgtttctgttttttttgtatttgtattttagaattcctttgtttctggttgctccttggttttgtaggcttctgggagaaaggttctagtcatgttgttggtttcttgggaacgtaacacacctagagcattcttcccctgatgttcttccaccatacccatctcaacctctaattcccagataagctgggtggatgtgaatcctgtgagaccaagtgtaaatccttgagacacacctaattctgaacctttgctgtggacagatgcactgagatagaggaatcccgttatttccctctttagagagaatgctaatttgtattgtgttttttttcttgattcccgcactacattgatgtactaatttgtattcttttagttacttcagacttttagaagttctagactcatggatgaatttaaaattggagaattatttagtaaattctatggagaacttgcattgaaaaaaaaaataccagatacaggtgagatgcatttacatgttattttcaaatagtttagcaaattaatattaacaaattattagcataagacttaggttttctctaccaaggtcttattttacagtcgaatactttttgctgaaaataaaccaaaatggaaccaaacaaaaacaacatgtgaagacttcccttcacaaaaatgttaatttttacaaaattattcctgtaaatagaaaactcacaagatatgacaaatatgattaatacatttgcataaaacttaggaaagaatgcagtcctaaaagctttatattttatatctcttactgtaaaatcaattttgaactttattttattttattttcttcatacattttggttagtttaacttatttaaatgtagtttgaggccttcacttgtctaaaattttcttttcagttttagaaaaagtatatgagctcctaggattattgggtgaagttcatcctagtgagatgataaataatgcagaaaacctgttccgcgcttttctgggtgaacttaagacccaggtatgatgaactttatgacattctgcttccatagatgtggttgtgtttttctcttgtaatgacatcttcttaaatcttttcttttagatgacatcagcagtaagagagcccaaactacctgttctggcaggatgtctgaaggggttgtcctcacttctgtgcaacttcactaagtccatggaagaaggtattgcttggcttcacttgattttctttattcaaaaactgtaagtctaaccagcaatgcctgattatttctttgaactcttaaccaatcctgaatttacatacagtagtgagaaataatctagagggacctgtgggccctcccgagttcccctgatgatgacatctttcccaactacagcacaacagcaaggtgggcattaacattgatgttgtccactgagctttgtcagatctcaccagtttaacgtgcacacatttgtgtatgtgtatttagttctgtgcagttgtttaaaattttatttattttttttgagacagaatcttgctctgtcgctcaggctggagtgcagtggtactttcttggctcactgcaacctctgcttcccaggttcaagcagttcttcacttcagcctcctgaatagctgggactataggcacgcaccaccacacctggcaaattactttctttttttttttaaacagagtctcgctccgtagcccagggtggagtgcagtggctcgatctcaggtcactgcagcctctgcctccctggttcaagtgattctcctgcctcagcctcccgagtacctgggattacaggcactcgccactaaatgg

SEQ ID NO: 46027 - DNA, 1024 bp, Homo sapiens
ttatgatttctttgcattctggctttcattgtagctattatgtcaactgacagccattcctttgaaggtcatctgtcttttacttctgtgtgctttaaagatttcatcttgacattgttgatattcttgtcttggcactgttaattttctgtagtttgatataatgtgcctgggtatgaatttcttttcatttattctgcctattcttgtagctgtgcgggttcatctctttcatcagttctagaaattcttggctgtgttttttcttacaaatgttgtctcaactttatgtttctcagcattgaaatctagatttccttagataatatcttcttatcacgaatcttctctttagttgctttaaatctgctgttaaacctttacattgagttttaatgcttgttgtattttagtttatagttctgtgttttcaagtctgcctgtttgtttttatggtcttctactctttattaatatgttcaactctgtaaacatactgcctaattctattctatgttggattccagtatgtgaacgctcaaagtgggctcatgttcataaggtttgattgctagctttcataacactgtttctgtttcttttgtattttgtgggttttgactgagcttgtattgtaaactgtgggaattattagaggccccaggttgtttttgccaaggagcactgccaacttatgacctttttaaatgctccacctaaaagttttttgtgccatccaagtagagtggcccaaaaatccatgtgaaggctactttggagatagcacgcctccaggaagatttgtttgctgcctccccgtagcaagctttgaaataggtcattttacttgtgtcttctgggttgtataggtaggtgggtgggtggaagtggaggcagggggcagaattatttctagttcatccttaagatatggctgtggctttatacaggagatttttgaaataagactctctcataagaaaggacttttctttttcctgtatccctgctactccaattcctg

SEQ ID NO: 46028 - DNA, 1048 bp, Homo sapiens
acaatatggaggatgtttaaataattaggactgagacttatctaaaaggttttgtgtcattcaaaagaacttttttttattaattgtttgagacagggtctcactctattgcccaggctggagtgcagtggcatgaccatggctcagtgcagcctcgacctagccagactcagatgatcctcccatctcagcctactgactagctgggaatacaggcgtgtaccaccatgcccggctaatttttctcttttttgtagagacaggatttcaccatgttgcccagagtggtctcaagatcatgggctcaagtgatccacctgcttcagcctctcaaagtgctgggattacaggcttgagccattgtgcctggcccaaaagaacttttaaatgaagctcacatgaatgctactttaggagtcctgagtgttagcagctactgaagtcaagtctgaatctttttccatgctgggtccagttggtcttgataaatttctggtattcctctgatgatttaggattgaaagatacatcgctggaatagcacacagtgttggcaaaggaagaacataattacagtattggcaaaggaagaacataattacagtgttgacagagaataccagtaacagaaaaattcaagagccaagatcagcggaaaagactgatatagtttctatttcctagctcctttataatttctaaaactttagggtagatttattcttcactctgtccctttacagagccctctcaggcttagttctgggtgctttcttctactcttggtctttgcatgtcacgatgggctgatgacatgagattagcatctccagccccgaccttgcccctgagctccagagtcataatcttatggtggcttatggtgggaaaggcagcacacactctgcagtcaaaacctgcattcagtacgtaatctcctagcattcagttattacttgtaaaacattgaaaatggtgacgagtataacattgtagttattattatctctgaaatctccactttggataaatgatagacaattcacat

SEQ ID NO: 46029 - DNA, 1046 bp, Homo sapiens
agtatgtcaattacttttccttatctgcctaagagagtctgagaatattcattggattttcaggtttaaatcaataaatgattataagcttagaatgaatgattttgtggttattatacacatttcaggactgttgatttttttttccttctgtatacatataacatttttggtagtgtaatttaggagtgtgggtcatctctatcttggaaattttgttttgaacattttttttttcaaagaataaaaatgattgctactttttattttacttacaaacataaaattttaatgaactcctaaatcaagtataacaattagggaaggaacacgccaaccattcttttacgagtaattataaacacatattaagtatcattttagtagactttttgccatttttttccttctcagatttcatttattgtgtcgttgatataaaaaggtagatttcagattttctctttcaccatttttaacctatgtgtgtaattttataaatagtgtagtattattttgtgataaactgagaactttcgttgaatttattgttcagtcttagagattatacagaaattgtatttgtagtttaaaatatgtcctttacctctataggtttatggaaacttaggtaacatacagttttcagaagatagtcaaggcctaaggaggaaaaatgtttatttttttctctactttggaagaatcaataggagttgtaatttactgtgttcgataacatggtagccaccatctgtgtcttgaatcagtcatctagttattcacatatataaatatatatataaatatcagtaaacatttacctgaattcttttttttctttgagacagggtcttgctgtgtcgcacaggctggagtgcagtggccatggtcatagctcaccgtagtttacagcttgtgggctcaagcgatcttcccaccttggcctttggagtagctgggactataggcgcgtgctaccgtgcctaactgatttaaaaaaaaaatttgtagagacagggtcttgccacattacccagactggt

SEQ ID NO: 46030 - DNA, 1117 bp, Homo sapiens
gaaatgatggatcttgaattatttcatcttcagaactttatgtattgtgaagtactttttgcctgtggctatgttctgtaagttagctttacacaaaatactaaaggcacagtgaacttcattcaaatgcagtgtggaactctcaggtttccttggtctgcctcagtcttctactcatcagcaccacactgtcaaaatgttggacattacaaggggcgaacatagacataaataaaaaatattggtattgcatagacacttgatgcctaaacctaataattattaacttttatgtgcaagcttgggttcttgactaattggtaaatgataaatgaactagattagatccaattattagaaaagcactcttaagagtgcaatgaatgtgatttgaaaacttgaaagcagcctagattttactatatttgttattgttatcaatgggggtttgtcaaccttaaaaattattttttatgtaaagatacctaggaatttctaataactgtatttgttttaataaactttgactttgctgtatgtttctatgttctctttaatatttagctattaaaggtcaatattttctttttttaaaaaaaaagttacaaaaattaagcccttgtttcatagaaacatctttacattggcgaatacaaaataacattggaattcagagtcaaattcatgcctcagttggcctgttaatatcatcatcttttggataccatttcacttttttccattgacaacttgtacctattagctatatattacttgtttatttatttgaacatttatgttttttttaatctttcagtagcccattgttttttaattgaaaaagttatacacgcaaatggttaaaacaaattttatacaagagcatataatgataaaaatgtttccttaccaccctagatctcttagtcccctttctcagaagcagctatgtatgctttttcagttttctgttttattttcctgttgttctatttaatacagataccaaatgtgagttgtaataatcagcattgcattacatttttatacacttaatgcattcaaggtgtatatcacattctaaataaatgagatattggtgacattgctatttaaa

SEQ ID NO: 46031 - DNA, 1048 bp, Homo sapiens
tgttttgtgtgtgttttatgtcatggaggggaaggtatacatccataaaaatcacttagaactggatccagaggaggatgctcacatgctccctgtgattattgagtatagtgaatcaaatttggctccactgcttcacagccaccttattaacaaaagttctttattaaaaacaaaaaactataacactatggctcagccatttttcttttccactcacaagatagggataacaggtgctcccccataaacagtgggtcctatgggtactacatatttagtagtaaactctgggggagtcccggccaaagcagggagagcggggtatctgtgatttggtaacacagctaaggaagataccccttggggaatttccacttgactccagaaacacaaatccagaaacaaattcagtgagagtggggcatctgtgatttggtaacacagttaaagaagatactccttggggaatttccacttcactccagaaacacaaatccagaaacacgaattcagtgagagtaagttaggtttttcttttattattattattattaatttattcatttatttttaggtagggtctcactctcttgcctaggctggagcgtggtgacacggtcttggctcactgcagcttcgacctactgggctcaagtgattctcccgcctcagcttcctgagtagctggtagtaccaacacgcgtggttaatttttgtattgagttttcttcagaaaatttcttaggattaaagcacactttagggaattattcataaatttacttttatcgaagaaagtggagaatagatcaactcctgagatgtctcattgagacatgtttttcaatttcaaattgaagataattcatgtcctgtttgcttctccttaaatattttccctgaactaagggttttcgtaaagatctagtacttagttgattctcctctcagtactgtcgtttcattctcagggaattcctttgaaaaacaggatgcaaataaagcagcctcccacgtcctgtattttacctctgctttccataac

SEQ ID NO: 46032 - DNA, 1035 bp, Homo sapiens
aacccctttaattttacctttacttgccaattttgttcaaataatacttgtaacacagtttgtaaagataccgcaaaccttgatgccaaagcatagcagtccctggcttcacctgttttcacccccagcctcacattccagaaggaacttaacacatatagccattttgtagggtatttaatgtacacattgctaactaagatgctgcttttcctttttattcattacttttggacagatttactttctgtcatcatagataaggttttagctcccatgcccctcttttcctcttctctctcactcagtgtggttaaacgagtattaaaactaaataaggaattatgtttatagtattttgactatgtaaactgtgtcattctcccacacccccccacaccaagtaatacagttctctttatagttttggtttttccttaaaatcctatttaatctttagcaaagaataattgtatatttatggggtgcgatgtgatgtttcaatatatgtttacagtgtggaatgattaaatcaggccagttaaaaaatttgcctctcaaagctatcattttgtatggtgaaaacatctacaatttacagtttcagcaataattgtttcagcaatcacagataacacagtgcattgtgatttattatagtcaccattctgtaaagattactaaagcgtatttctcctgtctagcagaaactttatgccctttgaccagcatttctcctttcccccatctaccctcctgccccagcctctggtaatcatcattctatgctctacttttgtaagtttaaccattttaggttccacatgagtgagatcatgtagtgtttgtctttccatgcctgtcttatgtcttagtatgtcttatgacttagtgtaatgtcttacaggttcatacatgttattgcaaatgacagaattacccttcttttaaaggctgaatagtaatccatttatatatatataaatggattttatatgtatataatgtaagtctatatttatctttttcttcttt

SEQ ID NO: 46033 - DNA, 1050 bp, Homo sapiens
tgagaggctgaggcaggagaatcgcttgaacccgggaggcagaggttgcagtgagctgagatcgtgccactgcactccagcctggtgacagagcaagactctgtctcaaaaaaaaaaaaaaagaaattatgaaaacttttttgtgaaactgttctcaaatattgggactgagcgtactcttttttttttttaatttattttaaacgaggaaaatgattgcatggcttgataattaccataccaaatgattgatagttttgtttttttgcagtttctagttgctacttaaaattgagtttcagggtgttcagttagtttatacatagttattgctttagttagaggattttagactatcttaagaatataaccttgcgttatttacctgtaagagaaaataaattccaagtctgtcaagtaataataagcatatttcttctgctgatcctttctgccatattgtttcttcacctgtatgctggatgagaaatgggagaagggatggatttgggctgccggtatacattttaagatggattgtatctgattctctatggaacagcattaccctgaagagtaggagtcaaagtttgggtagtgtgctaggcaaatagtagccccccaaagaggtccatgttctaatccctggaacctgcgaatatgtgaccttatatggcaaaggggaattaaggttgcagatgaattaaagttgctaatcagtttaagataggaagattatcctggattatcccgataagcccagtgtaatcataagggtccttaaaaatggaaggaggaggcagagcgagagaaccagagagacagcagaaaaggaatcagcgtcatgtttcttgctttgcagatggaagaaagaaagggccatgaggcaagagagaaaaaaaaaaagcagatggacactagacactgatgcgagggaacagatttctcctaaagaaccttcagaaaggaacagtctccccaacaccttgatcttaacccagtgagacttgtatcatgaagcctgtgtcagacttctgacctccagaacta

SEQ ID NO: 46034 - DNA, 1044 bp, Homo sapiens
tgcctgtaggtgttaccttaggtttagttcttttcctttttagagtttgttctcttctttggcaatcccacacagatccgtggtttcaactgctcattcccctcaccctctttgctcaggcttccacttgtgtatcatcagccttattttcattcccaagcttcagatttgccaatgttgttctccctgatcaacttagtagctgtcattttgtaatcttgaatcagtagattcagaattaaactttttttgcaagcctgattcttcttgcttgtttatattaatgacctttgcattttcttagtcatctagactcaaaatcaaaaggtcatccttggttcttctctctctccttttcttagaattttttttttttttgtcatcttactgcattgtggttcctgatttcttctatctttcttcagttcttccagcagccatatacacagcaagagacattaatctctaggtttgtcattcattgtgaatactgcttattaattgtcctaaatgtagtcctgatcatgttccctgcctgatgacaagcaaacaaaacaaacccacttgggtgtttatgtcagtcagtgtgctgaatcctttgttctcatgtggtcattataatttatattatccccattctacaggtgaagaaattggaacttcatgatcttgaaggagttgttagtaggtagaagagctctgggatttgaatcccaaccatgtcttcttccaagtctgtgttcttgaccactgtgcctctgctgagtggctcctgatccactctggaagaaagcccgagttcctcagtgttgcctttcaaaactgcattatttgacttcagtgcccctttcaaaacttatttcttgttttagtttaaaatattaagttacattctttctgtcccagcagctgttccaaaaagaatgtaaacttcagttttactttacttttttgatttcttatgcatttccatttcttggaatttttttctttctcccatctctgcctttagaagtcttccatgtaaaagtctagtttatacag

SEQ ID NO: 46035 - DNA, 1021 bp, Homo sapiens
aaaaagagtatcatgtaaatgtgaaatttaatattgcattaatatcttaatatgtagttgagcattaagtatatatgctaagttttcagaatagggggattgaaagtaactctaagtcaataaaattgcatttctttattcagttttcaggtgggagatttggtactcatcatcctagacgaacgccatgacaattatgtgttatttactgttagtcctactttatattttctacattcagagtctctacctgccctggatctcaaaccaggtgagggtggtaagtgtcattccatgactaaaatataaacctggaatggaggaaattatataagtaaagatttttttttccctgtttaattacataagaattaagtcactaagagggaaccctgtgtaatctgcttttttataaaatctgtattatctagattattttcatggattccatttacaattcagaattaaggagtgtagcttatacaagggaccagttgatcagaatgtgcagtgattcggacatctcataaccctagcagttggataattatattgtcaaagttctcatgtacagactattcaaaattaatgtatgcttatttgtttatataaaagcattattttttggcaaaaaaaactttcttaaattataaaatgtctagtctatcctatatcatcctatgttcctaccttgtttatcattatactgttctatacacttatttttttaaaaaggaaataagctttgttaaaatatactaagtaacaatgtctattatctatttgatttttaaaatactaaaaaagaacagaatagatatcctggtgtacttagcctaagtagaattatttttaacactaaaacgaagtaagtccatttagattgatgttcctaatctaattggactgactcgcaacaaagtcaagtatcttatctatatatttataggtagatattttttttcgaaacggagtcttgctctgtcgcctaggctggagtgcggtggcacgatctcagctc

SEQ ID NO: 46036 - DNA, 1054 bp, Homo sapiens
taggagaggtacctagagccaaatgatacagaaagtttactataatatgattcagaaagatatagaagggaaaaatataaaagcaattcaaagcaaaaggctttaaaaagctttaggaatttaaggcttttttgattgacacataaattatacatatttatggtttacagtgtgatgtagttacatgtgtacattcaaattagagtaatccatcacctcaaacgtttatcatttctttatggtgagaacattcaaaatgctcttttctagctattttgagatagcgcagtacattattgaacaccaaaacttattcctcctatctggctgtagctttgtacccgttgaccaacctctcctcatctcctctcctctgtactctccccagcctctggtaaccactattctgctctctgcctccatgagataaacttaagattctgcatattagtcagatcatatgtaggtttttttataaatatgaaaattgagttattcagaaccaaagtatcaaaaacagatatgacgaaagtggtactctgagagaactgtgtagttcctttatttttaaatgaattaataaaaacaaatgagccacaataaaataaaagttgtttagtagatattgggataaatagaaggtacaaataaatatatgtaatgaaaagagggacataaccttagttatagttttaaaaattacagagaacatgatacaagttaatctcacctgtgaattataaatacaaggaatcctgaagacaattttagcttatcaaatgccttgtggttttatgatgatatagtcatcatgacccagtggagtattttaggaatgccagagtaataactaaacagtacaatacctaaccatactcactgattacttgagaaggtttatagagtcatgtcagtagaagctgaaatgacaattgatataatgcagtgcccatttatttaataatttaacaaaatccttagcaaactaggagtagatgggaacttctttttatttgtaagtatatgggagagacatagcaagcatcgtatttca

SEQ ID NO: 46037 - DNA, 1343 bp, Homo sapiens
ccaaggatggaaagtacagcaggaattacaactactacctcaccgagaactcctccaccactgactgttcaggatcccttatgtcctgcagtttgtcccttagaagaattatctccagatagtattgatgcacatacgtttgattttgaaactattccccatccaaacatagaacagactattcaccaagtttctttagacttggattcattagcagaaagtcctgaatcagattttatgtctgctgtgaatgagtttgtaatagaagaaaatttgtcgtctcctaatcctataagtgatccacaaagcccagaaatgatggtggaatcactttattcatcagttatcaatgcgatagacagtagacgaatgcaggatacaaatgtatgtggtaaggaggattttggagatcatacttctctgaatgtccagttggaaagatgtagagttgttgcccaagactctcacttcagtatacaaaccattaaggaagacctttgccactttagaacatttgtacaaaaagaacagtgtgacttctcaaattcattaaaatgtacagcagtagaaataagaaacattattgaaaaagtaaaatgttctctggaaataacactaaaagaaaaacatcaaaaagaactactgtctttaaaaaatgaatatgaaggtaaacttgacggactaataaaggaaactgaagagaatgaaaacaaaattaaaaaattgaagggagagttagtatgccttgaggaggttttacaaaataaagataatgaatttgctttggttaaacatgaaaaagaagctgtaatctgcctgcagaatgaaaaggatcagaagttgttagagatggaaaatataatgcactctcaaaattgtgaaattaaagaactgaagcagtcacgagaaatagtgttagaagacttaaaaaagctccatgttgaaaatgatgagaagttacagttattgagggcagaacttcagtccttggagcaaagtcatctaaaggaattagaggacacacttcaggttaggcacatacaagagtttgagaaggttatgacagaccacagagtttctttggaggaattaaaaaaggaaaaccaacaaataattaatcaaatacaagaatctcatgctgaaattatccaggaaaaagaaaaacagttacaggaattaaaactcaaggtttctgatttgtcagacacgagatgcaagttagaggttgaacttgcgttgaaggaagcagaaactgatgaaataaaaattttgctggaagaaagcagagcccagcagaaggagaccttgaaatctcttcttgaacaagagacagaaaatttgag

SEQ ID NO: 46038 - DNA, 1050 bp, Homo sapiens
agattagtgtttgtttaaaggcacacagctgctacagcttattggagtttccctcaatttgctttaagtatcatggaagaggagaatggaactgaggtcgtctatactctaacgatttctaaagcttctgattgaaagcaatatattggctgtagatcatgcagaggaaaagctgaactgtcccagattggaagagattaaatagatattacagctaaaagcaatatgatgatcctgaaataaatcctggatctgaggggcggaaactacaaaggatattattgaggcagtagtttgaatatggactgtagattagataataatagtgcatcagtgttaaattttatgatttgataaatgtactttggttatgaaggagaaaattcttgctgttaggtaagacattctgaagtatttatggataaagggaaattctgtctgcaaattacagtagttcaggaaaaaatatatccctgtgtgtatacgtatgtggagagagagcatgtatggagtgtgcactgacacaagtgataaatagaacacaagtgttcacagttggtgatctgagtaagggggacgggagttctttgtactattcttgtaatttttctctaactggaattatatcaaaacaaaagataatattcaaaggaaaacgagaaaacaaaaaacaatacagtgattattattgaagattttgtgtttagtctcacaaaaatggtgtgtctccttgtactgctttacatcttctcagttcaggcctcttcttatcccaacaataccgtttaaatgtaacccacgtagaggcctcctttgatcacataaatctaaagtaagtcgttcttcctacccactcttttcttttgtgcgttgattacagcttatatcatgtttgctttgttcttgtttaatgctgctttctccttcaagactgaactccatgaggacaaagactatgtctgttttttcccccacagaatacccagtcctggcacataatatcaatacacgtgttttggatttggatgaatgaatgaatgaaggaatatt

SEQ ID NO: 46039 - DNA, 1055 bp, Homo sapiens
tgaacctaatatagccatctcacttgctttaataagtaccaacattttgccaatctcacctttctactgcccagctaattctgttctttccttccagccttccttccttcgcttatttttgctagactagtttaaagcaagactcaggcatcattttacacactaatttttcagagttcattttctgttactacaatgccattatcatccaaacaaaagtaattctaattctttagtataatccgataccctgtccgtatttagatttgcacatttatcccaaaaatgttattatacagttgttttaagtcaggatccaggatctgaacaaattcacacatggcatttgtttattttgtctcgtccatcttttttagtttataaaaagtcttcttttttttttttttttttagtaaccatttgttgaagaaacagagtcattgttctgtggaatgcttattctgaatttaactgattcatcataatgtttgtctttttctttatactccatatttcctagaaactggaaaccgtaggtacatatagttgcttgattaaattcaggtttactttttcagaggtggtctggggtggcaagaaaactttatacttgggctgtgtccagttgaatcgctattagctggaggttttccatataaatggactgaaatacgtatcttttttgttttgttttgttttttgttttgagacggtctctctcccttgcccaggctggagtacagtggtgtgatcttggctcactgcatcctccatcccccaggctgaaacaatcctcccacctcagccccgcaagtagctgggagtacaggtgtgcaccatcatgcctggctaatttttgtatattttgtagagacagggttttgccatgttacccaggctggtcttgaactcctgagctcaagtgatcagcctgcctaggcctcccaaagtgctagaattacaggcatgagccactgtgcccagctatccaaaatacatttcatataggaaggacagtgcttaatttctttgctttttaagtttttatcatgggt

SEQ ID NO: 46040 - DNA, 1052 bp, Homo sapiens
gagtgtagtctgagaataagaaaaccttgaatatcctttatattggttagatgttggtgcaatttgtttttgtgtatacatgtttacttataggaaactgtaattttcattattggcaattgtttctatgttccctttatttagtaaagcatatttagtgtttatgccttgccatggatacagggtggtcatatcagacattgtttgtatgttctgctcatgttaatggattggctgcaaataagatatgccaatgaccaataagatatgcttagtccacacttaattaagaacatgttgctgattttttttcttttctttttgttttttctaaagatagtcttgctctgttgcctaggctggagtgctgtggcacagtctctgcttgctgcagcctcaacctcccaggttcaagccatcctcctgcctcagcgcccccaccccacccccccataactgggactacaggtgtgcgtcaccacacctggataatttttgtatatttgtagatatggagtctcaccatgttgcccaggttggtctggaactcttgatctcaagcaatccacctgccttggcctcccaagggtgctgccaatgcacccagcatgttgctgattttctttgagacatagtggcaaagaaaattttctcagctctgtcttaccaccgtgaaagactgccttcagagtgtttcagttacctcttcccatcaatatgagaaaagatgagtgtgaggaataggtagagggaaaaattaaagttttttgtgtagcatgaattatgggaggggattatataggtaattctagcatgcacatagctcttgtataggcattgtgccagtaggtaggtattagagtagacatggttctttgtagtagccttttataaaattgacttgctttggtgaaacagctcctggcatcattcagacatttttatcctgttgtgtgggtgtggaaacactgggattgttctataagctttcttttgtttttgtgtgtatatatatatatatatatatatatatatttttttttttttttttt

SEQ ID NO: 46041 - DNA, 1049 bp, Homo sapiens
tgggaggctgaggcagggagaattgcttgaacccgggaggcggaggttgcagtgagctgagattgtgccactgcactccagcctgggtgacagagtgagactccatctcaaaagaaaaaaaaaagtgatttttttttttttcaaagaagactttagtggtataggagctaaggtaaagaagagaaaatttgagatcaagcagctttatcaagagatttaagtgacagaaaagtgatgatctggccgagcatggtgagtcacacctgtaatcccagcacttggagaagccaaggtgggaggatcatttgagggctggaattcatgaccagcctgagcaacatagagagaccccatctcttaaagaaaaagaaaagaagaaaaggaagtaatgatccttgtgagcaaaaacaggtcagtatcctcttgttttgactggatcagagtgttcaggcaaagcagtaatcaaactcctttttccatttactgctgttgtatagatctggtcccttggccagtcacagtggctcaagcctgtaatctcaacacttggggaggccgagacaggtgaattacctgaggtcaggagtttgagaccagcctggccaacgtgctgaaaccctgtctctactaaaaaatacaaaaaattagctgggtgtggtggtgggtgcgtgtaatcaaagctgctcgggaggctgaagcaggagaattccttgaacccaggaggcggaggttgcagtgagctgagatcacgccattgcactctagcctgggcaacaagagcaaaattccatctcaaaaaaaaaaaaagatctggtccttcacacattgttatatacataaggttgtacagccatttgagaaagagaccagttatgtctgtttccctaaacaactggcttgagagtccaatttatacaacttacttgtagaatctttagtaattaggcactttgggtgtcacctaggtcaacctccctcttaatgcagtgacaggtccagggaaattcaattcaagtaaagatttcacgtttcatgcctgcagtggttgt

SEQ ID NO: 46042 - DNA, 1033 bp, Homo sapiens
acattgaggaagactttacgacagaatatttgtgaattcttggttacataatggaagctgtggaatgacatgagtagaggcatgaaaatccatttattcatgcacctcatttcaggagatcagcctaaatggtatggagcttcatgtagggacccaaataaaggaaatagtggagtgtcagtctaaggaatttatacttgagtagaagttatgaagcatttttagtttggggagaagtaaacattaaaagaatctaagattatgtagttggtggtgtcatctgagatggaatctgcagatagtaggtgctcagataggtaattgttagagcccgatatgcagtaggaagatctgaattagatagcttaatgggaataaggtggaagagaggatacacatacttagtaactgtttatgtggaaccaaggagtacttattcatatatgatgttaaaatatattaaaccaagttgattacttttttttttttaatataagatactgggaacacattggctgataaagaaactgctgaaaattagctacctgcatgtgatctctctctgttactaagttactatttggattctgctttgtcatttgcttagagtactgctactagaaccccaagagtacatttgcttatgaaaccctgtttattcaacagatgcttttgagtgctttgtgttatgtcacagagttacttcctgtccctagagaacattttgggaatatttactgtgatttcttttttttttctgcaacagccatatgaggtaggtatgataaatatccccatttacagattagagaatggaaatttagacagacatgtattgatgaagaaagttgttttcttgttttatctacatttttttcttcttcttttctttttttttgagtctcactctgccaaccagctggaatgcagtggcatgctctcggctcactgcaacctccacctgccgggtgcgagtgatcctcctgcctcagcctcctgagtagctgggattacaggcgagagccagcatgcc

SEQ ID NO: 46043 - DNA, 1138 bp, Homo sapiens
tatccccagatagggaaggacagcctggaatagcctgggctccattccacactcccttcctccccacagcagggtgagcttcagcacattagcccagcacatcatgtggcccccagggtgtaaaactcagggtgggctacttcctggggtccttcagctgccttggaagtgaggcatgcacagatgagacttcatctgccctgggctgctttcttgcacgttgggggactggcttgccatggatcccaggcctctgttgtcccttgcttcctatctgtaagtaataaatctgcttcatatagcctcttgggtgtgggtgttctgtttctccaaattcagccaagttggtaaccagtgcacagtgaacctgtttcatattttcttcttcctctcttccaaaatatcaacttcacttttttctggtctggtcatcctaattttaaagacaaaaagtataacttaaaaaaaaacaacaaaaactgggctggccaaaaaaaacatgtggtgctagtctcttatgtttgttgtggggaggtttgaggagggcagctgctctggcccaaaggttttcagcctctgccctcgaatctccagctgtcggtcatcagccaagagcggaactggaacaacaagactaattgtattaattattaatttgttcattaaaggtttattgagcatttgttttgtgtccagtcctgttctaggctatggtgatgtacgtttctgccctcatggagctagaatctgttagtgggaggaccaacaagtacagaaaatgacagcacagtgtgttgcatgcttagataggaccgagctctgcatccgttggggaaagatgagtgaagtgtttatcttggttgtggtgaaatcaggactgtcttcctggaggcaggcggcctgtgctgaggccttaagcaggagctgacccatgtgatgaggaggaggaaggcagggctttgtgctttgctggccttctgttagctcacatttgttgcccacctcaaggtagcacctaacaaatgccgtcgagtggatggcgttgccagaagggacaaagcaggggatctgcatggaattctgttgcctagaggagcacagcccagtgaaattgtaatgcgagcaacacaggagaaat

SEQ ID NO: 46044 - DNA, 1807 bp, Homo sapiens
gagtgctagctttgtaccctgataagtgtacaaatctgtaccctgataagttaaatgatgttaggtatgatgaaagtgggtgcaactttacataggatgattagagaaagcctccctgagtaggccacatagctaagttgacaataatgataagtaaccagccatacagctctattactggagtgaataagcattttaggtggagggaatgagaggtgaaaaggctgtgaagtagtaacgaacttggcttgtttaaagcaatgtacagggaattatgtggttgtgacactcaggggtggaggtgctactggcacctagtggatagacagctggagtgctggtaatatcctgtaatgcaggcagtccctagaattaaagaagtatatgtgagtgccaatgttgggcaactctgatatgaaggatggtcaagggcaaactctgacatgaaggatggtacgaggggaaaaacatggttcaggagaggtaggcagagacctgatcgtgtagggccttgtaggctataatttgactcctgtaagatgagttgaaaaccattgcaaggatattaaataggggaatgacaagatgtggtttatgttttgaaagggtcactttggctactccctggagaacgggttgtgcaagggtaagtgagaaagcatgaagagcatttgagctggttttcatggtagtctggggctgaggtagttggtggcttggcctagatgataaacattgagataagaagtagatggacttggggtagattcagagctagtgtggacagcacttgatgggctgaaaatgttttttacttttttccataacttcagtgcaagaagaatgggatcaaaacagaaggtgaaaaccccagaatggtttttatcagtttagcaggaggaaaaacttcaggtctgtcagtaaaacataggatacatcacaggatttctctccttacttcactttaccccaagccagatttttcaacataaatcatttatttagtaatttcatatcttatggtttgtttatatctctttcaggaatttaatttaaaggatgttggcatttaatagaatttcaggccattgcaaccaatgagcttatagttgccagatgtttttctaaagtttctgtgaaagtcaaagttttattttcccattgtgttgaaattagggctattgaaatacagttattattttattagcgtatttctcttgaagtctttcttgttgggttagtggttttcttgttttaaaaaatgtatattcctaatatgaaaggcaagatgtgtgtgaaataggatgttgaccttttccctttgccagtggaggaaattttttagttgagaatttttgttgttcagatgatcatgtattgaagatgaaatttttaaatttgacttttttcttgaatttaggaacttgatgtagtctcatagtacatttttctgtgtgtgattataagaggaagtgtattctgtctttacagggaaatactggtttatttgctctttatgagagagtattcttttttcctctctctttctaattatatggcaaactttttaaattttaatgttttaactacgattatctcctttgcatttaatggagaagcttagtattttcccacacttccttcatagagaaatttttgtatgaaggaagattaaaattcacctgtgatctctgtatttgattgtgacttataaatttctgtggctccctgtgccagagaatgaaagttgctcaagtaataatttattacaataccagtttaatttgagactaaatagaataccatt

SEQ ID NO: 46045 - DNA, 1041 bp, Homo sapiens
ggtcattgaggctgtggtttccggctgagttttacctgaatttttctgagtggggcgtatcttcaggaggagagccatatgtaaaagtagaaatttttctagtgccattccttttttttttcatatctagactccattctagtttctgctaccttttgttcgttcaggtaatcttttatatttcatccagattttatagttggtttctgtggaagggttgatctgatagaagccactttatcattcctggaagtggagtctctggaatatattttaaaattgaaccagtaaatatacactttgttcacaatgttttacatgaaaggataaaatagtaacatgatagaaattcagaagtaacctgatgaaaatatcacagaatcgtagttttgtttttctgacttaagataacagttcaaactgaactgtcctctctctctgaaatgaatactttctactttaagtagatggaagctttgctaactttaatagtctcgaagtttaccagggtcactttggttcttatgttttagttttgtgtgtttgtctgtgaattataaactcagaattctataggcaacaaaaatattctttaaactttttgtcagcttgacaatgctatgcctttgcatgggcttggtgttcactggacatcttgtgtctgaaaatttctctgagattgaatttgggaaacttgcagccattatttcttcaaataaaatatcagccccattctcttcctcctctccttttggtattccaattgcacatatgttgggccatttgataatacataacagattactgagcctctattcatttgttaaaaaaatcttttatctttttattcttctccttggataactttaacctattttcaagttcacttactctttttctgttttatctccacttggttcttaagtccatcagctgatatttttttatttcagaaattgtagttttacttctaggatttctgtttctttttaaataatttataagttttttgtttgaaatttttcatgtattgaaagcatt

SEQ ID NO: 46046 - DNA, 1022 bp, Homo sapiens
aaagcccagcaaaagctgctttaatcattatatgatattctatccaagcttcccacataccctacttttttgtccccacttagttcctcctctcttcctttgtttttcactgaatcattaggtaaaataaaaaggttattggaagcatgtatctaatactgtaatatcacagaagagagatattagttgatattaattgaatcctgcctttaagttcttccttctccttttctctcccattcttcctcttgtatttattcatctatcagtgcatcagatgtttattgaagaccaaatatatgtaaggcaatttgttggttactgagtatatggaaagatgcataagatagaataccttttctcagaacctttgcattttgtttaaacctttgttttgatagcgtaacttgatgaagtcactgtgtttacggtatacaaagctcaaaaagtcaccataagtgtagagccagactgagattcctaagttttttcttttgacctcatttgggagctttctgaattaattatgtacctttatggaaatctgagaaatagagtagtgtaactgtttcataatggcgcagtagaaggatagacaagagtctctctggagtggatagacctaggtgtgaattccagcacttgattgtttagtgttgggagagtggcttgaactcccagagctagtttctttatggtgaaaggtggtagatggtacttaactcatttaaacattaggtaaggaatccatgaaataacagttaaagtgtctgcaatagtaaatatacagtatgtatttatttccctgcccttttctccataaaatcatggaataataacagttttcctctttatctctgtaagttggattcttgctaagttaatattaagcccaggtaaagatctagtgctgttttgtttgatttaaaagagacagcatgaatatgttactaatatttagcaagatttaaaaatctcatttaaactatatttataatttcaaatttttacttataatgcat

SEQ ID NO: 46047 - DNA, 1059 bp, Homo sapiens
ttgcccgggctagcctcgagctcctgagctcaggaaatccccccgcctcagcctcccaaagtggtaggattacaggcatgaaccactgtgcatagcctaaattatttttcttaaatctaacaatattcagggtgcttggcagtgtttttctcatgaggatgaagaaatttcatattgaaaaagttcaggaacttgtccacggtcatttacatataggcctatcttgaagtatttactcttctttttgttaattttattgttctttgatagttctgtaattatgtggaacagtattctctatacatagtatctttattcagggatatgtgaaacattgcaaggcagtgtgcttatttatcaaactgtatcaaatataaattattttgttccggatttccctgtgtgttaagtagtcttgacttgtgtagatttaattcaggagacaaaatcttgttcatttctaagaggtagagattaaagcaaacatgaggattaacttttgaaaagagattagggaattttggatgctcagatggtaattccagtaggtaatctgacttttcatttagaaatgtgtgtctgatcgcatgactttaaatgcttcccatttaaaaactcaacacttcttcttgtgcagagttcgcagtatgtgcagtgcgtggccgggtgtttgcagctgatgctccgggtcaatgagtaccgctttgcttgggtggaagcagatggggtaaattggtgagtgccctttccttttaatgtaaaataacatttacaagcatctctccttgacattttcaaagaaatatgtaatcatctaaaagaaatattttatttttttcatatctgtttaacaattgactatgctaagctttttagaagttagtaactatcaaactgagcccctttccttgcttgatctgttcttttataagaggttaaggcctcttaagaacctaatgcttaacaagacagattccaggtactcagaatataaaaaattttagaaaataattgatgatgaatgtaggcaaaaatcaacaagaaaagttcttacccagg

SEQ ID NO: 46048 - DNA, 1025 bp, Homo sapiens
tacatttggtagaaatagtacatgaagtatccatatgaccattatgattttcactttcagcacagtattcagtaaattacacgagctgttcaacacttgattataaaatgggctttgtattgatttttggaaggattgcctggagatatattctgaaatgcaaaagaaaattaactggtaaagtatttaaatttaagactttcttttacatgtcattttcaaagtatagcactgataacaataataagctaacctaatactatgtatttatcagttatgttctcggaagttgcatacaaagcaataatttataaagaaaatcacttttttttagttatgctgacaattttttttctgtaataaagattcccactagtcatgtaattgaattactggattaagcacattagattgaaagcagtactttgaagatttataaatttgtaaaccaatagtaaaactattttttttttggtgaaactatcttcatttagatattttatgactgttgactagaggatctcttttaatcagccaacttcaagagaattcttggggtatatatgtattttaattcctgaatattgataataatagtatattttacaattgtttagtgttttgtagaaattgatttcagtgtcatgacagtttttttttatttttcccagtggtagagatattatttttcttttcctttgctaacgagaaaacaattttcgagattaagtgatttgcccaacattatgtgacaaaacttctgattcttgttctagtttttactctgtccttctccctctctattcctcttttactttcttttctctatttcttttttaaaattatgtcataacttacataaaggaaaatgcacagatgttaaatgttcagcgagataaatgtatacctcataattcctcctactgccttcacctcaactcgcacaaaggttatcattattatgacatctattaccatagagtagtgttgtctgatcttgaactccatttaatggaatcatacag

SEQ ID NO: 46049 - DNA, 1050 bp, Homo sapiens
tttgtttatgttgggagagacgactaatacctaggatgtatattatcctaagaaatggatttttaagtattaaaactcccaagtggcttggaatgagtgtgggagaggctggcagtttgttgaagagattgcttagaattctggcaagtggtttggtgacagtctgcttctaagaaagatttttgtgttctgttttttgctggtcatataatgaattccaatcttacttttgaaactcaaaataatacagggagtgtcaagaaattcctaagacccagctaatttgggttcactttgatggaaatatttaaaaatatatttttaatgtttgtttcaaaatatattttaaaaaatgaaatataaactattatttttagaggggttgagtgttaagaaattgtgtagcaaaattgttacaaatcctttttttaaggtatatgatgtgatttttagaattaatgttgcgttaaatgtatctcttatttgttttcaggcagcaagaattattgccaagttagcagcttggggaaaagaactgatggaaggcagtgacttaaattactatttcaattggataaaaactcagctgagttcacaggtaaaagaaaattttttaaagtacctttgaaaggaatataacatccgtgttcttttaagctatttatagtaaatatgttaaattacaaaaatgttttattaaaataatgccgttttgaacttgtcaagtaaaccaaactactctcagatatggtagtgtgctttgctttttctttctttgactggcttcatttcaatcctttctgtcttttctgccacttggggtttcttagtcatgcttttcaggggtcagggagtacctttcttctaggtggctgccaagatgatacaggctggagaactgaaaggacccacacagctccaaagagcacgtgcgtgtgaggcttcgataaaggaaaacaaacggtacagcaggagagagcatgcctcgggccgagagatttccaggcgcagctcccttggctgccccaggattgtgaaccaccaagattt

SEQ ID NO: 46050 - DNA, 1022 bp, Homo sapiens
aaagggatatcactttgatgacatgggattacattattttcctgttgatttattaagtatttatatgtcctttgaaatttttttggcggtggcattctttttattttaatatataaggttttgttactttttgataaacagtctttttacatacaaaatttattactgtttgccatatttatagcaaacatagtttccttttttactatttatctttgaagggttgtggagttttttcatatacagtggtttaaaatgtttagttacatatattgatgttttacattctttcatggtaagtttattgtagaaaaataaaatactattaagcaaaagaaaaaagttattctacctaatatttctctgttcaaggtgacttgtttacacttagcgtatacctctctagatatttttctgtgcataaaataacttatacacttatttctacaaatgtgaactttttacaaaaaggggtgatatgtacatatctttgttcttttcatttaactgtatattcttcccttccctactatgcctgtaaagatatttctgtggtatttaaaataattaatttattattatttcccatttatggaaagttccgttgtgtaattttccatttaatggatgaaccataatgatctaaactaattctatactgttgcatattttggctacttccttttttttctgttttgaggcgaacagttagtaatctcataattaattcgagaagtgcaattatctggctgggtgcagtggctcacacttgtaatcccagtactttgggagactgaggcgggcagatcacttgaggtcaggagttcgagaccagcctggccaacatggtaaaacttcgtctctactaaaaatacaaaaaaaaaaaaaaaaaaaaaaagagtgtaattattgattaaactatttgagcgtgtgagagttttgatatgatgaaaatgctgtcttgatagattgtaccagtttgcagatcctgccagcagtatatgagagggcccatgcccctg

SEQ ID NO: 46051 - DNA, 1044 bp, Homo sapiens
ctgcacgtatccctactttcttaatcttctatttcccaaatacgtacatatggaaaaataaagattgagataaaattcttgtgctttatttctttaaagaatgaaaatgcccatatttctttcagtaataaaaatggaaatatgcttatttgacagttttgttgtgaacatgaccaagttatgaatttaaaaattcattctttaggttggcaaattctgataataacagtaactcttttcaacaaaagaattttctaagcactgctgctgttaccagacacttgagactgatccacttcagagcacagtgctttccattaaccatgtagacatccacacgcacacatatgtctccatacatacatacatacatactgtaagatcaagtagaatgctatttttacatgtagtggtcacatcttttatgaactgtgaatttgggtcctgcaatggcactggtaagtgacgtattcaaaccgagcttgctggacagaagatgtcgttgagaaacacctgaatgtcttttctttgaggggagagtaatcagttaccaaactcatgcaaaataaaagtggttccctttgctctggtggatgtacctgctccgggcagcagggagccttctgtgtagccttggccactgacaacatgctactgttattgtaaatgcaaatacgctatctttctacaacagccatatccctttatttttttttttcaaaagtatcactaaaggtggctgcagtttacatggtgaatatatagcagtctgttgaaggaatcatctgttattagaatagcctgagtattactccagcagaagatgctacaacctctaaattccctgtgctagttgtagcccatgaattcttttattattttattaataataaatatatttgaaaaatcctatgcttcaatagatttctccgataaggactgaagcaagtccttatagacagcagagttcatgaatcgaggatatgagtctctgtgcatcagggtgtaaatctgaagttgagcatcatcgaatatgtgttggga

SEQ ID NO: 46052 - DNA, 1046 bp, Homo sapiens
taactgaaaccatggaaagcaaaaccatggataactggggactagttcaagaggagataagatttctttcttaagtgtaagaatgattttttttaaaaaaaattattattatttttttgcggagatggggtcttgctgcattgtccaggctgatcccaaatttccagactcgaatgatcctctcaccttggcctcccgaagtactgggaatacaggcatgagcctctgtgccttgtcagaatgctttcttaatactgattctagttaactaaaaccaagttgatatatttatactttcacagaaatagttactatgaaagctatgtcaaaatttataaaatataagaattaataaaatgaccatgttcttttttaaaagttcataagcaattgtattggttactaggtaaattggccataatcctttttattttgcaggactatataatttaaggaaagttcttcacgctcctccacatggcttatgagtactttaggcttaactgtcttctggataatttgttcctttttgtaatattgataacttacatttatgtacgatatgactagcctttttattctttaacagctgaaaaccgtgttatagttattttggttgcatgtgcatatgtgaaaattttttttatcactgtcttaatttcatttgccaaataggtttttgtgctatgttatctgctgtaaactcaagattgtctccttaagggacaacttactatgtttcagatagtagatttggggaattgattttttcaccgatagaacattaagcacttaaaaaatagcatcactaaactctaaaggggcctttacttaaaacaaattttgttggtagttatttttgtggttaaaaattgaaaaagtacaaaagtttatgagtaggaaattccattcccacttttgcctgtggccacctcgttctccctccctgaaagtaaagcaaggttactagtttgttgtgaaacttaggtattttatgtgtatacatgcaaatatttttgttttcctttttctttgagacagagtct

SEQ ID NO: 46053 - DNA, 1028 bp, Homo sapiens
ctcaagtgatctgcctctcttggcctcccaaagtgctgggattacagctgtgagccaccatgcccagtgaaacagagtttttcaagcattctctctctctatctctagttttggttgaaagctgtcattctctggtgtgaacctgggaggtggagcttgcagtgagccgagattgcaccattgccctccagcctgggtgacagagcaagactccgtctcaaaaaagaaagctgtcattctctggtcccatcccttcatccctctccttataccaagatcattgcttttcatttattgtactgagctataatgggtattttctctattaaaaatattgcttaatatttaaaatgagaatcaaagataaaatgtttagttcaaaaaaaaggcatacttgtcactttactaaattgtaaaatttttaacttctttttaatctgtatgcaggcaattttttttccatcacataaaggtcactgagatactgtgtcatttatttagaccccaaattttgtttttacagcatgatagtagtattgttactttgaaaggattgttcttgatttctttttggggtgtttgtgcgtatttcagtacttccagcggcaatgtaagcaacagaaaggatgagacaaatgctcgagatacttatgtttcatcctttcctcgggcaccaagcacttctgattctgtgcggttgaagtgtagggagatgcttgctgcagctcttcgaacagggggtaagtccagtgcatgttatttctcagtcctttggtcaccacccacaaccactgccatctccaactccatattgctgtttgatgagtgttaccctgtggatagcccacccactgctgcttagcttggggagaagttgttgctgatacgggtctgttaagggggagaggaggaggaatactggggcatttgcttattactatgtaattgtaagaaatagattccctctaatacatggatgttttccctgatttcatagtaatgtacacttttttctcacaaatcttttg

SEQ ID NO: 46054 - DNA, 1033 bp, Homo sapiens
gctgggattacaggcgcccaccacacctggctaatttttgtgtttttagtagagatggggttttgctatgttggccaggctggtcttgaactcctgatttcaggtgatccgccctcctcagtgtcccaaagtgctgggattacaggcgtgagccactgtgcctggggttttttattttttatttttgagacagagtcttgctctgtcacccaggctggaaggcagtggcacgatctcgactcactgccacctccaccttccaaattcaaatgattctcctgcctcagtctcctgagtagccgggattatgggtgtatgccaccacacctggctaatttttatatttttaatagagacgaggtttcaccatgttggccagactggtcttgaactctcaaccacaggtgatccacctgcctcagcctcccaaagtgctgggattataggcgtaagccactgcacccagcccgtgttgaggtatttaggacattaaggcaactaccgattttaactttgtttctcaatattttcccaaaattgatcatgtactcttcatgttaatgttaatgtctcatacactgttatttttttgtatttgtattaactatattaaatatatatattaaacatattaactatattaaaagaggtaagtcaaaggtaggcttaaacagcagttgttaataaagtttatgtaattttttctaacgttatatccgtttagttttcttaaatctggaatagttcctcagtctctcattgtctttgtttttattattttattattattattattattttttgagacagagtttcactcttgttgcccaggctggagtccaatggcacaatctcagctcaccgcaacctctgcctcctggattcaagggattctcctgcctcagcctcccaagtagctgggattacaggcatgtgccaccatgcctggctaattttgtatttttagtggagacggggtttctccattttgatcaggctggtcttgaactcctgacctcaggtgatccgcccg

SEQ ID NO: 46055 - DNA, 1024 bp, Homo sapiens
tatgcaaacttcatctacttgtaggaaacttaggattttagttcatgttgtgcaaatagcctgttaacgcagtattttagtttttagtttttacaaatgctagcaacttaagagatttcataattttcagatgggccatcaactgagaaagaccttgacgaaaagaagaaagaacctgcaattacatcgcagaacagccctgaggcaagagaagaaaggtacttcacagtatagacatatatttatattgaaagtcatagttttacttcctgcatcaattcccctgtctaatgttcccctatttacactcctttttttgttttctaatcaaatggaagtagtaaatgtatgtagccatgtattctaatttatttttttttcagatttcttgaacatttgagaggtagaagacattgaataaataagaagttatttatattgtactcaacaagtttaattgaatgggattgctggggtaggcactgatggaattgataatggaggtagtgattagggattcaaatggttgcttcctctatttaccacatttttttttttagatttattttggcccttgatctcattctcctttgcatgctttttttcttccttttgaatttagcaatttgtggctaggcacagtggctcactttgggaagctgaggtgggaggatcacttgaggttaggagttcgagaccagcctggctaacacggtgaaaccctttctctaccaaaaaaaaaaaaaaaaaaaaaaaaattagccatgtagccatgtgtggtggcatgtgtctatagtcccagctacttgggaggctggggtgggagaattgctggaacccgggaggcagaggttgcagtgagccaagatcatgccactgcactccagcctgagcaatggagtgagaccttatcttaaaaaaaaaaaaaaagccatttgttataagaacttaaaatgtgaagttcattaacaaagagttcagattgtccctcacctcctatgaggcctttgcatgtgttctttcc

SEQ ID NO: 46056 - DNA, 1055 bp, Homo sapiens
caaggaaactgaggaggaaaatgaggcaaggcctcaggaagtagctagaaattgaaaagcagttgggccttgctcaccatctctcatctcttgtttctttgcttgtctgtttcatttacctttccataaacaattggccatcttggcttttgcagcctatagcttttccagctcttgaatttacatgttacaggtgtagccacacagagagtgactggtggtcatcgaatcccatttccacagtgccaggagaaaacatcactgcctgggatgtgaaaggctctcgtgtactcatgtgttgcagtaacccatgggcatggtcagagtgatggggcttctggatgctggcaggagtacagcttccagaatgtgggatgttgtgagctgggtaggcagatactctgaaggtgtctgctaaatagttattattatcttaaattctcatttagaaagtaataccaatttaagggccaggcacggtggctcacacctgtaatcccaacactttgggaggctgaggcgcgtggatcacctgaggtcgggagtttgagaccagcctaaccaacatggagaaaccccgtctctaccaaaaatacaaaattagccgggtgtggtggtgcatgcctgtaatcccagctactcgggaggctgaggcaggagaatcgcttgaactcaggaggcggaggttgtggtgagccaagattgcaccattactctccagcctgggcaacaagagtgaaactccatctcaaaaaaaaaaaaaaaagtaataccaatttaagagcagattggattttatgcctaaaattctgcaaaggagaaaatataaattcagaatattcgtaaggcatgttgtaagtgcagcagtttcccatggtacaaactatgtctcgtcggaaaggaagtctgtatgttctctggtgtagagaaccgcatcctttaggacacggtggggtgtgtttgtatttccgatatttgcctgatttgatttgacaccagccaccaagtttgatttttttatggatatcattagtaacaagatattccctaaattg

SEQ ID NO: 46057 - DNA, 2834 bp, Homo sapiens
cttcattgtgcatatgtaccacattttcttcatccagtcatctgttgatggacacataggttacttccaaatcttggctattgggaacagtgctacaacaaacatgggagtacagatatctcttcaatatactgatttcctttcttttgggtatatatcccaaaagatatatacccaaatatagttaaaagaaagatactttcttttgagtatatatccagtgggattgctggttcatatggtagctcaatttttagttatttgaggaacctccaaactgttccccatagtagttgtactaatttacattcccaccaacagtgtatgagggttctcttttctccacatccttgccagcatttgctattaactgtcttttgaataaaaaccattttaactggggtgagacgatatttcattgtagttttgatttgcattttgctggcgatcagtgatgttgggcaccttttcatatgcctgtttgccatttttatgtcatcttttcggaaatgtctattcagatctttggcccgttttttttgttcttgtttgttttgagacagagtcttgctctttcgccaggctggggtgcagtggtgcaatcttggctcactgcaacctccgtctcccgagttcaagtgattctcctgcctcagcctcccaagtagctgcgactacaggtgcgcaccaccatgcccagctaattttttaatctgtagtagatacggggtttcaccacgttgggcaggatggtcttgatcacttgacctcgtaacccaccctcctcggtctcccaaagtgctgggattgcaggcatgagccactgtgcccggcctggcccattttttgatcagattattagatttttttcctatagagttgttaaagctccttatatattctggttattaatcccttctcagatgggtagtttccaaatattttctcccattctgtgggttgtctcctcactttgttgattgtatcctttgctgtgcagaagctttttaacttgatgtgatcccatttgtccatttttgctttggttgatatgcttgtggggtatttctcaagaaatttttgcccagaccaatgtcctggagattttccccaattttttctcgtagtagtttcatagtttgagatcttagatttaagtgtttattgtgatttgatttttgtatacagcaagagatagggtctaattttattcttctgcatatggatatccagttttcccaggaccatttttattgaagagactgtcttttccccagtgtatgttcttgacacctttgtcaaaaatgaattcactgtaggtgtgtgtgtatagatttgtttctgggttctctattctgttcctttagtctgtgtgtctgtttttatgccagtaccatgcagttttggttactatagctctgtagtataatttgaagtaaagtaatgtgattcctctagttttattctttttgcttagggtagctttggctactctgagtctttcgtgattccatataaattttagggggctaggcacggtggctcacgcctgtaatcctagtactttgggaggccgaggcgggcggatctcgagttcaggagatcgaccatcctggctaacacggtgaaacctcgtctctactaaaaatacaaaaaattagccgggcatggtggtgggcacccgtagtcccagctacttgggaggctgaggcaggagaatggcatgaatccagtaggcggagcttgcagtgagccaagatcacgccactgcactccagcctgggtgacagagcgagactttgtctcaaaaaaaaaaaaaaaataattaggattgtttttctatttctgtgaagattgtcattggtattttcatagagattgcattgaatctgtagattgctttgggtgatttgggaaaaatattccatggtcatggattagaagaattcatgaacaataacaatcaatattgttattggttcttcttatccatgaccatggaatcttttttccattttttggtgtcctctttcatcagtgttttatagttttcattatagagaccgttcacttctttgtttaattcctaggtatttaattttatgtgtgactatcggaaatttgatttttttaaaatttccttttcacgttgttctccgttggcatatgaaaatacattctaattttgtattttaatgaagtgctttgaatttttcactcatttccaccttaaaagtaattgcgcttttctattactaattttttcctaatttaaattttatcagtgggcttaactctgaaagtattgctgactaactttcatgttgtttttagtaaaagctttgattgatcaagaagtgaagaatggcattccttctaacagaattattttgggagggttttctcaggtaagataaaatttgagtggaatgtcagtaccatcagtatacttatttagaagtctgtgcattaatcctttctatagagtagtcttttttgatgttatagaatcttgactgatacacttacctttgatgtttaattaagtttcagtgtactggaactaattaatttcttcttgaaagaactataatacacatgtacacatgtaattaaatttctaagttaacacagtttatccttttaattaattaaaactgataacacaggcatgagtcccctctataggaggagactactgataggaacagtaaagtggaagacaagagaatttcttccctttaccttcacgtattacaggttttaggtatgaatatgtggtgtttatttttggcatttttctttgtctctgtactttttcccctgctttctgt

SEQ ID NO: 46058 - DNA, 1022 bp, Homo sapiens
gtgagctgaggttgtgccattgcactccagcctgggtgacagagggagactgtgtctcaaaaaaaaaaaaaaaaaaaaaggaagaaaaaagttgttaatgttagtgcggtaataataacacgtgccactgattgagcacataactgtttacaagctaggtgtttcttacagggcacctcatttgacaccgctgtgaagtattagctctgctttacaaaacctcgaaagcctggtctctggttaggagtccatctcctttatgattatggtaattctagttgttcggagggagaaacagaatactaacttactgggacgtgtctatttttaacaaatgcacaggaggccgggcacggtggctcacacctgtaatcccagcactttgggaggctgaggcaggcggatcgcctgaggtcgagagttcgagatcaggctgaccaacatggagaaaccccgtctctattataaatacaaaattagccgggcatggtagcgcctgcccgtaatcccagctacttgggaggctgagccaggagaattgtttgaacctgggaggcagaggctacagtgagctgagatcccactgttgcactccagcctgggcaacaagagtgaaactccgtctcaggaaaaaaagaaagaaagaaatgcacaggtgcacaggaatgtgcttttcttttacatatgtgtactgaaatattgacaagtataataatgtgaggactgggattgccttcaggaaaatctggttggtgactcttgagtgtgggtgggtgtaggtgggtgtgggcagcaatggcaaggcaggctggctgtgaattgttttgctttttggtaattttttatttacatagttacttagagactgtcgcccaggttagagtacagttggtgatcatatctcactgcagcctcaaattcctggtctccagcaactctcccgcctcagcttctgagtagctgggactacaggcatgtgccaccatgcctggctaatttttaaactgttttgtagagatgaa

SEQ ID NO: 46059 - DNA, 1054 bp, Homo sapiens
gaggcagggtttcaccatgttggccaggctattctcaaatgcctgacctcaagtgatcgacctgccttggcctcccagaaaaattatcttagatatacaaatatctataaagttctaggatatccctagggtatctctgaaggggatttacctgttagatttgtgagaactctttattacgttgaaaacactctttaattttatcgtttggggcaatgttgatgtactgtggaaagagcacagactttggaatatgataggtattgttttgaattctggctctgaaagttttgagcaaacttagaagatcaataagattggcacattaggtcaagcttgtccaacctgtggcccaggtcagtttgaatgcagcccaatgcaaattagtaaactttcttaaaacattatgagatttttttttttgcgatttttaaatattattttattttttacctcatcagctattgttagtgttaatgtatttttatgtgtggcccaagacaattcttcttccaatgtagcccagggaaaccaaatgattggacacccttgatttaggtcaaaaagttgctgagaagcaataaccatggagaagacaagaagggattggacatactcatgtcagttagtaattcatccccagaagtggtagtagcagtagagttgggacagatacataaacatgaaagagggaatgggaagaagaataacagctgagaagattggataagaaaacatttcttcctctttttatcctgaaatacagtctgtcttacctctaggctacagtgaatactgtggctagggttgctatgtcctctatcattctgctcaagcaagagacagaattctttttattctttttctttttttttgagatggagtctctctctgttgcccaagatggagtgcagtggcataatcctggtttactgcaacctctgcctcccgggttcatgcgtttctcctgcctcagcctcccaagtagctggaattacaggcgcctgccaccatgcctgggctaattttttgtatttttaatagagacatggtt

SEQ ID NO: 46060 - DNA, 1740 bp, Homo sapiens
gtgcttttgatgttatatctaagaaattgccagatctgaggtcacaaagatgtatgtgtgttttcttctagttttatagttttatctcttacatttaggtatttggtcagtgtttacatatggtatgaggtagcagtccaacttctttgtattacatgtggatatccacttgtcccagctacttttgttaaaaagactattccttccctgttgatttgtttcagaaataagtttgacagtaaatgtgaggttttatttctggattttcggttgatttatatgtctgtctgtactctagtactagtctttctgaatgttacttggtaggaatttttgagattaagaagtgtgagtcctctaattttgttctttttcaagatttttgttgttgttgttattctgggtctcttgagtttccatacaaattttagatcgggttctaatatgtgcaaagtcaggtggtattctgttaaagattgcattgactccatagatcaatttgagagtactgccgtctttaaaatattatatctcccagtccatgaaagtgggatatccttccatttatatagattttcttgtatttcttaatatgttttatagttttcagaaaaaagtctttaacatagctatttacacatatacacatgtgcatatacacaaaactcctatataatatcctggttatagttaatgttatgtaagtattgcagttaatactgttgttactaatctttttatatgtctttaacactttgggggaagtgggttgaaatagaaaaatagttaatagaaaagtatttaacagggggctgggcatggtggctcacgcctgtaattccagcactttgggaggctgaggcagacggatcatgaggtcaggagatcaagaccatcctggctaacacagtaaaaccccgtctctactaaaaatacaaaaaaaaaatttagctggtgtggtggcgggcgcctactcgggaggctgaggcaggagaatggtgtgagcccgggaggtggggcttgcagtgagccgagatcgcgccactgcactccagcctgggcaacagagcaagactctgtctcaaaaaaaaaaaaaaaaaaaattaacattcatcaagactctttgatgtaagaaaggctgaaattactggtactttattctttagtagagataatatgtaaaaagcatcaagtatatggccaaatgtaaataagcaggaaactatatgtataacatgatccctgttttgtaaaatgtgcatctattccttaattgacatgcatgggaaaaatcagaaggaaatgcatcagaaaattaactgtttattcctggctagaaggatttgattatttataatttttcaattattccatgttctgctttgaacgtgtatgtatgtgaacatgtacgcatgaagaaatattaaagttgctggattaaaaaatttttttttcttaagttttctgtagagtgggtcttactatattgtttaggctggtcttaaactcctggtctcaagctgtcctcctacctcagcctctcaaagtgctgggattatagacatgagccaccatgctcagcgaaagttgctgtttttattttatttactcacttatttatttattttgagatggagtctcactctgttgcccaggctggggtgcagtggtctagtcttggctcactgcaacctctgcctcctggttcaagcgattctcctgcctcagcctcctgagtag

SEQ ID NO: 46061 - DNA, 1526 bp, Homo sapiens
gtagcccatatgccaggtatttattattgctgcaaaatattgcttattatacacattaaaatctatttgcaaagctaactatgcacgttaagtttattcctaattctactgaaattatcagacagaaaactggacgggcgtgatggcttaggtctgtaatcccagcacttttggaggctgatgtaggtggatcacttgaggtcaggagttcaagaccagcctcgccaacatggtgaatccccatctctgttgaaaatacaagaaaaattagccagccttggtggtgggcacctgtatcccaactactcaggaggctaaggcacgagaattgcttggactcaggagtcggaggttgcagtgagccatccctgcactccagcctggacgacagagcaaaactgtctcacaaaaaaagaagaaaacttagtggctgttaacactgaaaatacgtacattgaaatagtgtatcaaattcaagtgaatagcttgtaataaagtgttaaacataaaaagcaaaaaaaaagggggggggttgttgaacatagacttgcatagacctgtaatatgtacttgaatcaattgatatagctcataacttacatttgtcttagcagatggtagaaggtgtttctatctacagaatctataatcttgtctcaaaatgatttcccaaatgttttcagacttacctcagggcaaacagctcatttccctcaacttcatctctctcttcctgcttatcccaaagtcacaagtctagatcagcagtaagcagcaggtagcccagaaaaggccacactcagccaaatctggtgacctttagctgaatatagatgcgccttgacttacaatggggttacatctggcagagctgaaaagttgagcagcgtacggatgtgttttgcttttgtgccattgtaaagttggaaaatcttgagtctaaccgttgtaaattggggaccatgtatactttagtagttgagtctggtgggtagagaatttatcagttgctttgctttgcaactattatgcagttctaaactcagattggtttggtgtaagaacttttttgagttggatttgctatttttgaaaattattttgaaaattgtattggattatgatatagtcaagtattcagatcttaaatgttcagccaggctgggtgcggtggctcacgcttgtaatcctggcactttgggaggctgaggagggcagatcacttgaggtcaggagttggagaccagcctggccaacacagcaaaaccccgtctctactaaaaatacaaaaaattagcagggcgtggtggtgcacgcctgaaatcccagctactcaggaggctaaggcacgagaattgcttgaacctagaaggtaaaggttgcagtgagctgagattgtgtcactgcactccagcctgggtgacagagtaagactctgtctcaaaagaataaaaaataaatgtttagctggataaatttttacttacacccatgaaaccatcaacatgatgaagatagagaacatt

SEQ ID NO: 46062 - DNA, 1067 bp, Homo sapiens
aatatttgataagttagaattccagcaatttaagtggaaaaagtgtatcctgggcaggtgcaatggctcacacctttaattcaaacactttggaaagccaaggcaggaggatcacttgaggccaggagtttgataccagcctgggcaacatagtgagatcctgtctctaccaaaaaaaaagtacattctaaaactgtagatacaatatagtctcataacaaataggagctaagctgttaatgattgtttctttttttaaaaaaaggattagttcttgatcgcaccagtccaaatgcttttcattttctacttttgtcttttctcccctaattgtaataaggaataaaacatactatggtgcgtatgtatgtgcgtgtgcgttgtggggaaaacctgtcctctgtcttactgctcctgctgtataaattctttttgattttcatagctgaaactaatcttttccttctcttccacattttgacattctttgtaacttgtttgtagggcttaacttttgatctgtgtggtggtatgtttatatcttgtttctcctacgggactgcagtttcgttgaggatacagtctgtatctcaatctttatctttcatgcatgtagaatgtttgttttttaaatttctctcctcagatgcggtggctcatgcctgtaatctcagcactttgggaggtggaggcgggcggatcacctgaggtcaggagttcaggaccagcctggccaacatggcgaaaccccatctctactaaaaatacaaaaattagccaggtgtggtggcacatgcctgtaatcgcagctacttgggaggctgaggcaggagaatcacttgaacctgggaggcggagattgcagtgagccaagatcgcaccattgcactccagcctgggcaacaagagcagaagagcagaactctgtctcaaaaaaaaaaaaaacgaaaagaaaggctgggcgcagtggtgcacgcctgtaatcccagcactttgggaggccaaggtgggcagatcacgaggtcaggagtttgagaccagcctgaccagcatggtgaaaccctgtc

SEQ ID NO: 46063 - DNA, 1073 bp, Homo sapiens
taatgatggccccaaagtgcaagagaagtgatgttgtcatattgttataattgttttattattgttaatctcttcctatgtctaatttacacaataaactttatcacaagcattatgtataggaaaaaacatagtatatatagggtttggtgttatccatggattcaggcatccactaggggttttagagcatcccccactgtttatttctggaattttccatgtaatattttcgaaccacagttgactgtgggcagctgaaaccatggaaaacaaaactgtgggtgagaaggactagggtattttaaacattatataatcacagaaaagttatcccattaaatttaacatttagtattatctaatatattatgcattcaacctttgccagattgttccattaatatcctttatagctatctcctccctagtcatacattatatttagttatcacgtctctttagtctcttttgtctcttttaatctggaacaattccctagattttcttttgtctttcacgacattgacacttctgcagagaacaggctagtcctttaatttgggtttgtgtatttactcatgattagattcagtttatgcatttctggtataaataccatgtaaacaatatgtcctattcattgcgcgcatcagtagactaatgatgctgagtccttttattgttgtaacttcgatcttttgattaaggtggtatcttccaggtctcgactgcagttactttccttttgtaattaaaaagcaagttgcggggggatactttgtgactatgcaagttgttcatcaagctttcacccaatatttttatcatccattgataattgcttgagtcaatcatttctacagtgtgattttccaattctgtcattcctttttttttgtcattccattttgtttattaatctgctactccccatttagttagtatggactcagatttattttctatttatttatttatttgtttattttttgagacagaatctcgctctgtcacccagccaggctggagtgcagtggtgcaatctcggctcactgaacctccacctccca

SEQ ID NO: 46064 - DNA, 1253 bp, Homo sapiens
ttttcccttctagtgtcaaaattagcgacctgctatggcaatgaagaaagaaactgaatttgtcattttcacctgaagaaaaatgatagacaaaaatcaaacctgtggtgtaggacaggattctgtgccctatatgatttgtctgattcacatactcgaagaatggtttggtgtggagcagttggaggactatttgaattttgcaaactatctcttgtgggtttttacaccactaatacttttaatacttccttactttactatctttcttctctaccttactattattttcttacacatttataagagaaagaatgtattgaaagaagcctactctcataatttatgggatggtgcaaggaaaacagtggcaactctgtgggatggacatgcagccgtttggcatggtaagcaaggatactttcacctttgtgttgccattcatgtgtgctgcattggaactgtgttaccattccattttattgattgagaagatactgaaaaatataatagaagtgatatttactattccctgttacctgtttgcatgcattgtgcatatgtatgtgtctttcttaaaatgagttttcccatagacgttggtttccattaaacaaagaaccacgcagcactgtagactataagttgaaataagaaaatttatatttaaaacatctaaaagagtaagagactaaataaagctgtagaaaactgctttaaaaatgcttcaattatttagcatttacttctgttcaaaataagtttgactctaccagtgtggatttaaaaaaatgaaatattaaataatattacattaaatataatttgcataccaaaatttatgcattttctgttgattcattcctgaggttggtgtgtctttctgaataaataagatagcaatagatttctctccaggatagtcattcttttctttattactcgagaaattttgatgttgtatacttaatgattggtggttcttctttgtttggccatcatgaaaattgccttctggtggcctatttttaagtggttagtgtttcactctaccaacttttacttcattattccaacaatatctagtttgttggtctcttttgtttttagactacacaaaaatactgaagattcaataggcaggtaacaaacattggctttctgtattatgttgttgagcatcacagtggtttcatagaaggacatggaaggaagcacagactttaaaagacacttgaggatatatatcactg

SEQ ID NO: 46065 - DNA, 1047 bp, Homo sapiens
ctttggaaggtggaggcgggcggatcacttgaggccaggagttccagacaagcctggccaacatggcaaaaccccatctctactaaaaatacaaaaattagctgggtgcagtggtgcttgcctgtagtcccagctacacgggaggctgaggtatgagaactgcttgagcctgggaggtggaggttgcagtgagctgaaatcgagccactgcagtccagcctgggtgacagagtgagactctgtctcaaaaaaaaaaagttttagacgaacacagttcagttgtatatttagccagcatttgttaggtgcctactatgtgccagaaagtaagtgtttttcgtatgttttcttagataactattttatttactgatatatttagaatagtatctggcacaaacttctcagggccatccacttgtacattgtatcctgtcccctttggcctagtcaaggacagagctctaacaattatctcctctcctacatcatctgtttctcactcccattgatgaattatcgttgacattgaacatgggtgtattttctcctatctttttttttttttttttttgagatgggattctcattctgtccctgaggctggagtgcactgtcagaatctcggcttatataacctctgcctcccgggttcaagcaattctagtgcctcagcctcccaagtagctgagactacaggtatgcaccatgatgcctggctaatttttgtgtttttagtagagacggcattaccatgttggccaggctggtctcaaactcctgacctgaagtgatccacccgccttggcctcccaaagtgctgggattacaggcatgaaccactgtgcctggccctttttttttttttttttttttttaaagacagagtctcttgctctttcactgaggctggagtgcagtggcttgatcattactcactgcagcttctacctcccaggctcaagtgatcctcccccttcagcctcccaagtggctgggatcattggtacatgtcaccatgcccggctaatttttaatttttttttc

SEQ ID NO: 46066 - DNA, 1070 bp, Homo sapiens
gtacatattttcaggatcgttcatctagtgagcaatacacatattataggccaatatttttttaaaaaatagagcttggtcaacctctatactacacatattacaagatatagcactttcaaaatgaatctaaacctttacagaaactttcttataggttatgccttttattttaagacttattataattcaagtgccattagatgatatatatgtaggcctttgatatataatgctttgtgtacaaaaatggtagatggtattttaaacaggtacatttttacagtgttttcttatcaatttgctatattgcacagaatcagtgtgtgtcttttcataaggttttacaatggtttatttttttacaaggtttacgtgtctcaaagcacactgtcttcccagtacgtaagttaaaaaataccagttcacccaagttgcttctagcctactgagatccatgtgacattggaggagatcttttaaatgtttagtattcgtcattagcaatggctggctgttagttctggtaaatgtgtgcctaagttgaatttgtcttgtttttctcacactgtgtcagcagccatgtctacaacacagataagtctgttgtgatcacatagatctacataagttgtgcagttttgtgctaaaaacccatagggagctcctttgggatcatagaaaagaagatcatgcaaccagcattggtgaaggcacactcagattgcacttagggcctttctatgatgttgtcaaccctctgaggatggaaggcagtgtcttttgatgttatctagcctagaaatgacacagaactattgctaatgtataaaacacttcattatataagcttcagtggtacagatgaaccagaatgaatgtttatcttctcagaaacactccttcaatattatattggatcatgctgctaatgtaacttgggctacaactcttcatggtgctacaaacttctctgtctcattcagtcgtatttttttatccatagaaaaaggactacattaggtgtaaaagtgtacaatatatttttatactgtgacttaatttgtcat

SEQ ID NO: 46067 - DNA, 1025 bp, Homo sapiens
tttaaatagaaatcacaaatagcaagtgtggaagcactactttattctgtttaaaatgtacttaagaagtcatcaaattagtgaactgagacattggccttagtaggctgtattcactgctaatttaaaaaagggagtaccaggatttattaagtaaagcattttggaaatggggaatagcgccatatatgtatgtatgtgtatgtgtgtgtgtgtgtgtgtatatatacacacacacacacatacttaaatcttgccctgcatgaaattcaaatacatggaggcacatcttcagggcaccagtgttaaaattttggagtcttaattttcatgtgtacacctctttgcctgttcccacccccagacttgaaataacacttcagagtaagagggaattcagctaatttgtttttaaaattgactgtagtggtcactaaaccctttttgagagaatttctattaaagatgaggcagactcgcttatttgaattgcacaatgttctaacaaggatgtaacacagaattggcttttttttccctagaaaaagattgtttgtttctatgtcaactagatatgattaaaaataagtattgccaatgctgttttcattctctagtggccagaatcattatccttgaaatttctggtagtgccttagcttggttaaaaaaaaaaaaaaaaaaaaaaaaaagggattaacattaaataaaagtagtttagaatttgggcctcagacaagatattgaacctcattcagtttcacttccacatgtatgtacaagttaggtcaccaaacacggaagtgtgagtgtggaaggatcttggcactgtaagcaatgctatccattgatgtatacaagtacctttatagttatcgatcactgttaaaactttcattttaaaatcctattaccaagttcagttttttaaaacttcaattgtcctggctgattatgcatcactctgtgtgcaacttttttatttcatttagtgtttctttcaagctgtgtatttttgcctattt

SEQ ID NO: 46068 - DNA, 1027 bp, Homo sapiens
ggaaggattggattccactctcttccacgaagagtcaatgggactggctaagatcaaagtctgaggctttttccatcagtaatcaggtatgcattgaactaaaaatcactataattctatgcatgcacctttaaagtatttgactgatatgcatattatgaatgtggtcttttattagattttgagctcacaaccttatcctatagtttgaaatgcacctatgataattaatttgagttttgtaatatactaaaataaaaaggtattatcagccatgaaaaaatttcagctggtcttagaaaagtgtaatatttgaaatcagtgcaatcttcattgctcagtatgtacatccaaagataacagaattcatttgttactccatattgattatcaccaattttagtaacaatcaaatgtttgtatattgcatattggtgcacttctaataattttttttaataacttagaagttgtttttcttaactggaattctttgcccattatggttggattttataacacaatggcaaatatgaccagtctttgaagtattttcagatattagttatatacagggatttagatacttgcattccatgtagattctgcaattgggaaatgttcaatttgtttcccacgatgttctaaataggtgcataaaagtatcaggttaggaaatcaaataatgaaaattaaggtttgtttcctgccttggtagaatgctttataccagtttatagtgtcattactggtcacagcagagtagctgtttagatatttccaagggaagcagaggagctagcttttgaatgagaatataacagaaatagagcaagaagcccttgagatccagaaaatctaaaacaaaaagaacatatgttaccattggtaatgtcagttgcattgtgttaatgtcacttttaaacagcaaggcggatttttagaccgtttgaatagcacaaaggccttgcctgtatctacctaataaagaaagacacctgaagcaagtactgatgaacttacccat

SEQ ID NO: 46069 - DNA, 1117 bp, Homo sapiens
agtttctgtgatgatcaggcacaccaaacaggagttagtgacattttatgtttttctttatcttgcttcataaaacgtgagcattctcagggctactgtcatacaaacaaataactgatttaactatgctgtatgttaagcacatctatcaggtctagcttttaatgtaatttgctcagtttatttttaagaaaaaggtgtaagacattttttcagcaataatttggcatatattacgttttgaaagatgctgtattaaaatatattgtcatatttgcttacccaaatcaaaatgaaagtaaactatcaagtaacaggcttaattagacatagaatgaaagctttaaatattaaactgaataacttgatttactgctgaaatatacataattttaattcagatagttgtttttgtatctgaatctactttttatgcctagaaatttgtaaacaaagtacaaaatacacatataaaattctgtagacgttcctaagcagctagcctttaacagttaataaatttattagttttttttcaaatatgtggtcaaaattacttaaagatcgtgatatattcaattattttcattattcttcaaagaaaagtagtgacaaataggtcagtacttggttgaatgtctgttgtatttaaattcttaattatcaagcatttaatacttttaatggtatttcaattttttaagtacagttacagatgtttttcttaaaagcccttcttttgggaaagtataaactaatgtctgtacttcctatctcacaatattgctgctgagagattggtgacagacagttattttaaaactttacttctgtaactgcttttatttaatatgttctcaagatcatgttattcttaaattcctatctaggagcacttttaatcatagcctgggttatcttttcagctgtataccagagatacagttgctctacttaaacattagatctcatgtggtgcttgaatttaattattcttagttcaccttttatccctcagtgcagggaaaagtagagaaagcagtttgttgtgggagaagtgcaattgatcacattcagaggctgactcataatagcttttgtacaatgcatgatactc

SEQ ID NO: 46070 - DNA, 1051 bp, Homo sapiens
gtttttacgaagtatttctttctacccattgttcaagaatgtaaatgtaaaaaaaaatacaagagagttgggtagatatgcatgcttgaggaaacttgcttttactgttttcctacttgtatccccagttcagttgaatttacaaggacctacaagatggtcatgtttgtcttggtatgtgctaccccaattttagtgtttctttctttattttaaatcagtaattattcagttgattgtttatactatataatgaagtaacaaaaacattttggtttgtatgttttaagtaacagttgtgcaaattcctcttgtttgttaggtgctccctttgaatattttgtgaactgtgtcagagggagaggggtggtggctaggaagagggtcagaaagaagctagagggaggtcaggagaagggtaacagggaggatgcaaagcagacatctaccctggtcaccccaggatcaggatatctgtccttgtttcatgttgaattcaaaaattggatctcacttaggctttgaaggtgacagccatctctgatagctgagcataagtaaagaaaggtggagtgccgatgcagaaaggaaaatattcagctttcctctcttagatcgcactttgaagatggccttttggagacaatctgacaggttaaaacaggaactgttggaattattctagctgtaactacctattggctatgtgttgattgatcctagaaagaaaaaataatttttcattttagatcttgattgaatttaagatgtatttatatgcctacaaaaggtctgtcttgtaactgttgtataaaataaacctaatctatggtttcatttttaatctaaaaaaagttgtgccttaacaatagggcattgtatgttaataagggaaaacaacctttttagtagatgggggaaaataggaactttttgccattaaaacttaagttcttttgatgtttttaatattatagttgggggagattcattaaaattaaattgaaataaaattatttttgcataacctagcatttacaactaaagtatg

SEQ ID NO: 46071 - DNA, 1048 bp, Homo sapiens
cacgggcggagcgcccactcgagccgggtagcgcgtctcggcccgtcgactcttaacagtatgggatgtggagcttctggttccattttgtagatgtggaaattgagacgcagaagttaacgtgcacaaggtcagacagacagcagaggagctgggtgaggttgcacgtagtctgactcagggcccgtgcccttttggctcgtcctgggtcgggtgtgcgccgtgtgtacctgggatcagaaggccttgaaacgaaaaggctgacaaagttaattgcacccgcagcttcaggctcctctgtagaattaaggggttggctaaaatccaccaagactctctatccttccttgatttcatccctagaagggtcgaaactggagtacacattttctgggtggcctgccagtagccagctgaaagaccgagtcttgttgcagagctgttagtgtgcggggcatttgtgtgtgcgtgtgtgcgctcgcgggagtcggggtgggggggtgggggatgagtatgctcatttcgctgtctttttgtcaggacgctctaaagtttatagtttgcgggccctttaaggaggtacttagaaatataccagctgttggtcctacctggcccttgattaaagatccatatttactccagagaataagaattaaataacatttggcttttctttgggtaggtttctgggaagggagttgacattttcttaaggaaatccagacattttggatttgttattaatactttttgaattcatcatttcactggagctgctattgagttgaataaagcatatttaaaatttgcagttccagaaactgcaaattttgttgaggaagagctcagcatagcgtagcagcaccttattaacgtatatcttaactcacctaactgtagttttggctactgggaagaaaaattgtcttcactggaattttattagataaacagtgatgtgcaaacccaggcttctttggaaggtgactgaccttttactgctgatcttgaaagagttaggagaatattgtcattgtttagttat

SEQ ID NO: 46072 - DNA, 1023 bp, Homo sapiens
ttgatcctttatcatatttactatagttatcttaaagtcttcctctgattgatccaatgtctgacacaccttctatagagtcttttctctcttgagcatgagtcatattttcttgcttctttgttatgcattataattttattgtattgtaatttttttattgagcagtttgttaaaaaggaagtgttgagaccgaactaaataatatttacctccagaagtggtcaagccacctcttattctgtcaggctacttgtacagggaggctctgtcaatcaaatctgtcactgagctgcattaagactttgttgcacctgtggttaaatttaagccaacactgcctacaactctattgagggagtgataaagactttctcttccacaggacttgggatctcagcacttgaaggattctagagatatctttgtgctttataactgagccatcgggtttctgaactgtgggagatttcccttgttttgcacctcagtcgacagcatttttggatctctggggagctttctttgctctccagtctcaactctggctttccatttccctgaagatctctcttcattctgcagcccttactcacttctatcataggttgctcctcctcctgccactcacctgttgatctcttctttcctttttgcaatcatgttcatttaggttgctttacatgctcaacattccagtcggttttaaaaagctatgaagattgttcagtatatccagctcattttggttgttagggtgaaagcttcaacagtctcttacagctttcccatcctaacttgaggtggagatcttcctctgtatctttttgtcctgtcacttataaagagatttatttttaacccagttatttcagtaattgccttaaaatgttgatgatttggttgttttcccttattttttcttaaatcagttaaagcagaatgagaagggactttgttgattaaatattttaggagtgagtagtgaagagatcatttttcagaggttttctgcagtaaatt

SEQ ID NO: 46073 - DNA, 1028 bp, Homo sapiens
catgatataccaaaacttaggtgatgcagcaaaagcagtataaacagggaagtttatagaattaaatgtctacgttaaaaaagaagaaatacctcaaataaaaatcctaactctaggccaggtgtggtggttcacacctgtaatcccagcactgtgggaggccgaggcgggtggatcacctgaggtcaggagtttgagatcagcctggccaacatggtgaaaccccgccctgtctctactaaaaatacaaaaattagccgggtgcggtggtgcacacctctagccccagctactcgggaggctgaggcaggagaatcacttgaacccaggagacggaggttgcagtgagccgagatcgtgccactgcacgccagcctgggcgacagaacaagactctgtctcaaaaaaaaaaaaaaaaaaaaaaaatcctaactctataccttaagggtttggaacaagaagggcaaactaaacccaaagttagaagaaggaaggaaataataaatagagcagcaaattatgtagacttgctcccctagaactctcattccagtggggaagttacactaggtaaaacatgcagattttatcatagcaggttctgtacacatgttcttaaagtagcatagtttggcacacttcttctcttcctgtattttgatatcttcccctttttgttagggcaaaatggaatatgtttttgaattggatgttcccgggaaagtggaagatgttgtggagacgttgcttcaggtaagcacttgctgggtagaaaattcaaagcaaactgaggcaaaaactgtttttataaatttcgtatttatataccttacccaaatcatcatctgttttctaaatatgtagcagattgacttaaaatgttgagtttaaaaactatatattaggaagaagccataggtatatcagaagtaatcttgactgttaacagaatgattgctgtttctcattgcttctaaagaaatacttcatatcatctgagagaaaaaataaattcatgtctgtttatg

SEQ ID NO: 46074 - DNA, 1009 bp, Homo sapiens
ccaagttccattcttctattgcttttcttacacattcctctcaggccttcctattggtccatgactttgctagttactaaaacctgtcctctaagatgccagcagcactctgaagtaggtcatcacagtgacatgggaccatggaccgtcctagaaagaggacagatccaaagtgtacacggttattgtgcagtttcaatattgactccactggggctcatttagtgtgttcaatgaatgactgaaagaaaaaaaaaacataaaattaagtgaaacaaatctagaacccgtcaatgcccttgaatgagcgcagatagagcatataaacttggtctcatttttttgccactcttgaaacttgcacctcgataaagctgtagtcctgtgtgtttacactcacgtggtgcattgcttacaaccagttcaattctattcagtcaccctttttgagtactgactccaagactggaactccgttagttctggaggtagaatcagagtgaggcaaggtcctggtccttgatgagtcccctacatggggaaggcagtcctatgaacactggatgctgcttcagtatgagaagtgcagtgacaatgatgaggatgaaattggaggggaatgcaggtaagcgaaccatctgcctggggaaacaggagctggagagccattgagaaggtgacctctgagttgggccttgaagaagaaagtcaccaggccgattgagagactagggggagaaggcagagaggtgggaagatcactggatgttcgccagcggtgtgatcagtaggtgtgtttaaaatgtggcatttatcaggttagaatggctatagagaaggctagaagtgtaggttgggatccctttatgcttgaaggtcctatgtgcctggctaagaacgtaaactttgctgcttactttatgtgtagtcctaccttcccgattggataatggtgagcctccgtggagggtggactggcctcagtctcatattggatgtacagtaggta

SEQ ID NO: 46075 - DNA, 1051 bp, Homo sapiens
ctaaagcataattacatgatattttatacaattgctctttaagagaaggaagaaatgcatttatactgtctttcataattacataattacatttaccagtgcccttttttttttggaatggattcaaattagtatctggggtcacttcattccaggcagaagtcctttttttaatatatttttatataaggcaaatctgatagggacaaatctttagtttttgtttatatgggctatctttattttaccttctttgagatagttttgctaaatataaaactcctggtgaaaagtttctgtttctgtttttgttttctcagcatctgctgagatgccagctataaagcttaatgaggtttccttctacaagacaaatcgtttttctgtttctgctttcaaaaacaaatggtttcccccctgccccagatttcgtactatgatgtatctgggtgtgagtctgtatttattctgcttggaatttgttgagcttcttgggtatgtagatgaatgattttttttaagaaaaatattaaatttgggatgtttgagccattatttccttgactattcatttccacttctttttctctctccttttcttctggtactcccattatgcatgtattaatgcacttaatagagtctcatatttctctgatcttctgttcatttttgccccatcttacaccacccctctggggcttttgttgtttttgattgtttatttgttcagtgacttggctgtactattttattttatttatttatttatttatttatttatttattcatttttgagatggagtctcactttgttgcccaggctggagtgcagtggcaggatctcagctcactgcaacctcctctacctgggttttctcctgcctcagcctcccaagtagctggcattacaggtgcctgccatcgcgcccagctaatatttttgtatttttagtagagacatggtttcaccatgttggccagactggtcttgaactcctgacctcgtgatccacccacctcggcctcccaaagtgctgggattgcaggc

SEQ ID NO: 46076 - DNA, 1048 bp, Homo sapiens
actagtgtaattcttgataataaaataagagttttgattaagaacagcatagagcttcaaaatgcaaagtgaatgattagtaaaattatgtctcattttattttttcagcacccataccacaattaatattaggctggattgccatgggaaacattttttggcattaatgcagcaacataatactcactttaggtattactacatagttgaaggatttaactgaatgtatggatcaaatttatttatttgacatattcgaagctgtggtttaataggaatttgagaaaggtgtaagaaataggataaaaagaaggtcagcaccatgtaccaggaatagctttactttccatacatagaaatataaatttagtggtatcctatattactttagtgtcgtacgctttgtaagacttaaatattttattctattgattccactactttggtatgttaagacatttctttaaagatgaccaacaatatccttattttaggtgccactagcagatgtaagcgtatacttagttgccgttagatgtgacagaatgagataatttatgtaaagcagtagagtacctggcacaaagcaaacaataaatattattgttattgttgttataattgtaaaatgaatgacttcaaaaacatagtcccagtttggagggattttgtgatgcagaatatctaagtcatagaaatagaagacaggtggaataagtatatgttcagagtttttagatgtgttgagtagagacggtaataatggaagcattaaatacaaatgaaaatcacaccagatatccctgaaattcaagcaaagaaagttcatcatgtattcttgggcagcaagagaaaggactagggttatggcaatgtgtggaaaagttgaggcttgctaagggttgagatctgttggtagccctggatcacatggggtcagcaccaggcagtgcctctgaaagcggagagaggtcctggacttcccttgtgtataacagttcctagtgtccaacaatgaggaaacggtgaagcatggttacaaaactg

SEQ ID NO: 46077 - DNA, 1133 bp, Homo sapiens
gtcccttctcttgctgactttgtatttctgaagcagagaaggggtctggggttagcaggcatgtgagggccatgctcactgccggccgccccatccaggtcagactcagggactgcaacacgagcaggggccgtgggtcgtatagtcactgttgttctatgaatgatacatgtaaaacatcaaactttcctctgcatttacttttcctacaatttgtctcgaggatacatacacatttttttgttgttgttgcagatagccaaagtcttagatgcccaaatttcaaagccccaaggcttaacatacagcatgttttatgatactcgaatgcattcatttgcttttacttgtcattgaccctgttaatacaagcagtgtattgatgtagtaaggtaattatgtcatagtcctagcttccttttttttatccttttcataggcagtttttagcatgtgaaattgctcctttgagactgatgtggagtctgaaggaatgcatgcattcattcattcatttatttggcaattattcgacatttgctatgtgccagttactggaatcagtactgacaaggggagataaaaaagacactctcaaagaattcaccatctaggaggaaaggccagctgatacataggtgtacataaaaaaaaaaaacccagtcatttgctgtgtccagcgctatgggatggtatggacgtagtcttgaggtagcacataggaaaggtacctggatgagagctagttatctagaaggccttccccaagccaggtcaagaggtgttgtctgagtattcgtgggaattgccaacaggggaaaagtgtctgtatgcttgtgtctggcagggaggccagagagcagagtgtatttggggaacgcttgcggtaagtgtggagagcctgcgacatgagggggttggagagggaagcaggagacttcctcattgagcctcagggctgtgccatggaggttgggttttctcctgaaggtagcaaagaatcacagaaatgttgtaaggaggagagagatatgaccgaatttgaattcaagaaacatgctctgtagctgcagtatgaagatgtgggtcacatggcaatgagatggagggaagggagtaactttagaaataat

SEQ ID NO: 46078 - DNA, 1962 bp, Homo sapiens
agagtgaaggatgcgtgggagagctgctgttgctgctttcatttcgtgttattttgctggacatgtgggggtcatagcaaccttctgttatccttgttagcttgggttggctgaagtgccagcatttctcttaatttttgtcttttgttaaaaagaatattttttagaacagtttaacatttatagaaaaattataaagacagtacagaaaattcccatataccccaaacccagtttcttctattagtaacattttacattagcatggttacatttgttacaattaatggaccaatactgatatgttactaatccacattttatttggatttccttagtatttacctaatgtccttcttctgttctgggatctcacctatggcaccatacaccatattacatttagttctcatgtcttcttaggcttcttttggctgtgacatttttctcaggctttccttgtttctgatgaccttgaccgttttgaggagtacttactggtgaagtattttgtggagtgtctctcactgagatttgtctgatgtttttcttgtggctagattgggttatgggtcattgagagaaaacacagcagtaaagtgctcatcacatatagggatacatacaccctatcaacatgactaatcactgttgatgttgaccttgatcagatagtgtttgttaggtttatccactgtaaagtcactatttttatccctgttccatactttactctttgaaacaaagtcaccacccacagtgcacacttaaggagtggggaccctcagctttttaaacacacaaaaaatgtgcagcagcttttgaagggcagctgtgagtgatgatgttgctgaattgtggggagtagggaaaaagaaaaacccatgcttttgtggtttattaatgttttgtttaaaaaaatgccccaaaatattgctgtgagaagtaagaaaaatgccagttggaattttgtaatttgtggaataaaaatttattttaaccttgggcctagaccttctttgttggtggtttaattaaggcaatcagttcttacctctaccactaggactcctatgctgttgttgcagctggagaagggaagattaaaattgtcttttattattgagagattataggacatcattttcttaaaagcagtgcctttcagttgcatttactgggtagtcacagtctctgtgagtttttcacagcctcacagcctgacctggctgagtgggccatgggtacagtgttttcctagttatctgttctattattggtagaggacttcattagctccccctagtggtcagttttataatatcagattctacctgggtaaattcagcagtggaaaaatccaatttgtggccatccttatgataattttcctgaatattttaatataaatgctaaaataaatagtggttgaattttagctatgtcttttggtgttagaactaattttaaaataaggcgacgttgtaaggcggtaagtaattataacgatgaaaagctatagtgatgaaggtaatattctaggcagaaggtttacctacctactattatactaggaacctcagtggacatttggtttttaatcaggaattgagcttggcttcttgcaagtgttttatcagtgctgtaggagcaagtgcatattctagataaacttgaaagctgcaaagctttatgaggctaggagtgagggaggcctctgagcattgtttgtcatttcttcacagataaaattttatcgccagtgcaggaaatcgccttcttttagagatttacatcagcatttattattttaccgtggctttaaatatgcagcttttttttttccaggatgctatctctgaatattcttagaaagttgaaataatttactggaactggaaactggctttgtacatctcctgatggaagtactgggtgatgcagtatttgattatgcaggta

SEQ ID NO: 46079 - DNA, 1051 bp, Homo sapiens
ttgttcattttagccgtctgggattttgtacatccctttttgtttgctccattgttatctaagagtaacatagttttctactttctaaaataatttagcagtagggtttggtaaacagggattttgaatcatccagggcttgcttatttgttttttcttttctaatttacttgggtgggtttttgtgcaatttaccatcttggcctgagctgatcaccatttgaaccatggatataactaagggtggtttatggatgattcacttttcaaagactgtgaccctggtccagggcttaactcactaatcctctttcaaatttgtgttgtacagcactggaaatattttgcagtgatttttaaaaacaaatatcacttatccaacttgttgcggagaacaaatattacagatttttatcagtgggcattgttcctaattaacttaccagcgctgacgtggtttgtttaactgtgttcccaatcttgctgttttctattctaactgatctagagactgactatattaaaggggtctacatacaggcagtggtgtgggtcatagtggaatcaaggctgtaccgttggccatggtctgtcaccttctcctcagctgagctgcaatgggatgttctgtggttgctctttctcttccacaggctgtttactgagttttgagtctgttagggagggagatggtagagtggcatataccattcagcaaacaagttttaagtgtctatgtttaaagccaaaccctgtgataaatatagaatgtaaaaaaacaacatttgtgtttaatgattctacagtctggtttaaagaggtggaagtaagacagaaacatgtgaaaagataacgattaaagggttaagtgacaatgtaaatcagttcaaaacacactcaggaagccactgctgtgtgtttgccactgtggctggtgctgagggtatgaccgtgagagataatctaggccacagttcacattcccatggtgtggcaggcctattcaaaagctactgtggctactatatatgaaaaaagccctagggaatgg

SEQ ID NO: 46080 - DNA, 1030 bp, Homo sapiens
catggcgctggccccatgggttgtaccatttagtctccacagcgtctttcttgctgcctgtgagctcctgaggaccgaagctccctctcaccccctttttactcccatcatttgcccactgccaggcacagtggagatagacagttcacactggtgaaagtgaggggatgttggattcagtccacgtcttgatgttatttctagaaggaacctcagtttaccccagaaaatagccctttggtgtcatgtaagagtatgttctgggggctgctggtcttccagtctttttttttgacattcacaactgtgcatgtgcttaatattaaatataaaattgctcatgaccagatgcaatatccagtaccacttcagtggctggaaatcatggctgtataattctatgtcagtgatacatgtattttagagtattctgttgaagtgtttgacagcattactgtaattataataaaaaaatctctggaagctcaggatatctctttcattaaaaataaaagacgtgaaccttagaagtgaaatgttcatgttttaaggctggagagaagaaaaccaaaccagcatgttgaagagtggaggaggtgtgcagtggtgtggacagtaaggagaagcactttctcaaaggccttgatggggaaggcccccagagcttacctgtctaggagctgtttgctcagtgcctatagacatcctctcctttctactgcctgtgacacttctgtgtcacctctctctcctgtcccatcctcagccaacctgacaaggaaaaattcataccagaatgcatcaaaaaggaaagaagacacaaaataatccaagacagttaaccccactgggtcgcgggtcacaaagtgaggggcaggaccaccctggactgtcagcgcctttgccctgcctccctctttgggtttgaaaggccatttcatcatttcatctcagcccccaaagacagactctagtaacaaaagttctagggaaaggtagctgtaaatggggaggcgagaacttctggatg

SEQ ID NO: 46081 - DNA, 1048 bp, Homo sapiens
ttttggctttatcgtaggaaagaggaaatcagatttttaaaaaatgtagcattaatagcatgcatttcatagtgaataataactgtctttttcttttgggaaaaattaaagtatgttgaaatattaggacgtacttgataaatagagactgtgctcgaaaattaattccaagttgataaagttgatacctcaaactataaaatctttaggtttgttattaatcaaggcagctgttgatttccagctatggatttattttattcattgtaaatgtttctaagctttaatttagaatccatgagatagtcatagattcatgtagtctccttcgctgttctgagtttagtcagcatgtgagcattgcccaaaagagttactgggctttatatgtacttagtcagagtcagtttaagatggaaatttcgacttgaatttttttgggggtgtgggtttagctttgatgggacattacttactgttttttaaaggatattgtaaaattattgaatgctgactgttctggcatataaaaagcaatttaaagaagtacatgtgtgttgatgtgttgagatgctttgaacttccggaaataaatgtttatatatccacaaaacaaaaatacatttcatgtcaggtgccatgatcaatattggttgcatataaatttataagacagttcttgaggattcatagcctagtgaaaagccagttctttaaagtactagtgtacacttgatgtggcaagtgttacaaagggttgtgggagcagagagcaatgactaagcacatatactccactgcatctgtgtgtgcctagtcctgctctgagataaaatttacttcatcaatttgaacttaccattttcttctgctaccttctcaaacacaattttctttaatcttctgcctcactctaaaacagagactatggaccaacatctgggccctctcaccatgaagtgtgtttcttcctcacctagcattttgtgcttttctcttcctccttcttccacccctgcccactgaagaagaagtgtctgcacttctg

SEQ ID NO: 46082 - DNA, 1027 bp, Homo sapiens
ggaggctgaggcaggtggatcacctaaggtcaggagttcaagacagcctgaccaatatggtgaaaccttgtttctactaaaaatacaaaaattaactgggcatggcagcaggtgcctgtaatcccagctactcgggaagctgaggcaggagaattgcttgagcccaggagatggaggttgcagtgagtcgcgattgcgccactgcactccagcctaggtgacagagcaagactctgtctcaaaaaaaaaaaaaaatgtgtggcccctgctcttttacccccggtacttcagtgtgtcttctccaaaaacaagatcattctcctctataatgataaaatcaggaaattgatgcatttaatctatagatcttatttgaattgtattaactgtttctcttatgtactttttaggaaaagaaaatggttcttttcctggtccaggagccaatatccaacctggggtttcacatttcattttgctgtcatgtctctctgtctttcttctgtctggaacagttcatcagcctttttgtttttaacttttatgaccttgacttttagagtacaggacatttactttgtggactgccattcaatttgacaacagatttgtttttaatgtgcactttctggaaacaagatattgttcctcaaagaaatgaaaaaaatgttgggaatacataagacatcataacagacaccaggtaggaatttttgaggttgggtaggtctgaataacattcaaattggactataaaatggatatcatgattgaccctgctatgaaagttgttcgtggtttgtcttggtaattcagttgccttatataaaattatgggtttgatgtatgtggtctctaatattttgtcaagctctggcattattctaatgtgaaattctgacatattgttaatgatgctatttacatgctttcttttttgtttgttttattttatttatttattttttgagacagagtctctgtcgcctgggctggagtgcagtggcacgattttggttcactgcac

SEQ ID NO: 46083 - DNA, 1027 bp, Homo sapiens
aattaaatggcacactagtaaatatctatctgttgtaaaggaaggcagtaatggaggaacagaggaacaacaacagcaacaaaaaggacattaaaaatgaataacaagatggcagactttatcagcaattacattaaatgtaaggacatgaaatactgcaatcaaaaagtacagattaacaaaatagatttttaaaaagtgatccaattcaggtccacatgaaacattaaccaggaaagactatacactaggccataaaacaagccccaacaaatttagaagcactgaaatcatacaaagcatgtttactgaccacaaaggaatgaaattaggaaccatcaactaaaagctctccttgtcctcaaaatctgtttgcttgccagtaccccactactgctgtcaaagttactgacttctgcttatatatcttgtgtccttttcctttttgatatcaagtattttattaaaattcttatttccttgggcttttttctttcagccctgcctgtcttaaactctgctttatttaagaagaaaagcaagatcagagtgtgaatcatagaattctcagtgcatggaatctcagtgtgtgtggcatctcatggttacaactccatgctgtgtgattgtactttgagaactatatttgcaggaatgttaatttatgacttaaaaaaaaagtaacgtcaggatgaccacttgacagtagtgactgtgacattaagagagctgctgtgtgcagaaacccagagttcattgaccgtttagttgacagaccctggaacatcaagatattcttctattgtaattttcaaattacagaattgaatattatgagtcatggaacatcacccaagtattgacgtcttaaagtggaaaccctctagatttagtagctgcaacatttggccaaaatacttttagaataattacccagattttggcccttgagtgacttttaactaccatgaatagggcatttccctttttttttagacggagtctcactctgttgcccaggctggag

SEQ ID NO: 46084 - DNA, 1039 bp, Homo sapiens
gatgctgtttttattcccaagtgtttctcatactattacacctacacagtaagagtcttcactgagaatcatggagcttatctctgccttgtaactttttttgttaaaagtcaggttcattaagaaggaatttacatacagtaaaatttaccttttatagtgtgtattctatgatgcatatacatctagatacagcttttatccaccacaactaacttacagaactttgcaaccccctaaattattttgtgcccttgtagtcatccccttttcccaccacagcctctgaagccacttacctgttttctgtagctgcagttttcagttttccagaatgctatctaaatggaattagtcagtagccttttggactaggccactttcacttaacataatgcatttaaaattcatccatattgttgcaggtactggtgttattgctgagtagtatttcattttttggatataccacagattgttttcattcaccagttgatggacatcgggttttctctacgttggggctgttgtgaacaaccctgtggtgaatatttgcatgcaagtctttgtgtacgtcttcatgatttatgttttcatttttcttgggtccgtaattaggagcaggattgctaggagggcatcccagtgaatttaatttctattttttatgttctggggatctatgggtgtattttcagcaatgtaatgacatgaataaatagtgtttcaaaaataacctgagaacaaggtagaacatgggaacagactcgagtcagggagactagttaggaaattgttgcttttcaaaatataccttgtaggagaaattgctgttttcttcactgtcttcagtggaatgggtataggacatagagtaatgtgaagattctgtgtctgtttttattgatgatcaacttctccccatggactgtagtataaaaacatcttccatgaactaagtggaaatgaaaaggagtcaacgtaatttttataatctacaaatgcatcactagtgttttcctcctgccttcagctatcc

SEQ ID NO: 46085 - DNA, 1062 bp, Homo sapiens
cagaaaggcaatggctttgtttttcaatatatcaaataatagatttacatccctgttactgatctataatctcatttgtctgtaatgagaaacctcccattgaaacatgtattttctctattgggtaatacatcagaaatagtttgtcacttcatcatcctgctattgctcaagtaaacttaactatttcttactccccagagaccaggatcttcacagttgggtatttgttgaaagtttgtggtcatcctgtcatgcctaccacctctactataaagcaagattaatcaattttgtaatgtcaggttttcattcttatagcatatggagaaactctaaagacactcttggggtttctctcattgtgattttcaagttgtgtttaaagatatccactctgttttggtgaaatctcagatgatatctaaaaaatatgaattccatgtaatttatttcttaaaagttataatagtgaaaaccagtcaatatcagttctgaacaaacatcggtcaaacatagatcctgctgacatctaaacaatcaaatgaaaaataagatagttcagacataggattaaaaatactgaaattattcattcatataatatatacaatagtccttccttgtccatatgggatactttccaagaacccttggtggatacctaaaactatgaatagtaccaaacctatatatactatattttttcctatacatacacactatgacaaaacttaatctataaattagtcacagtaagagattaacaacaatcactgataataaaatagaaacattataacaatatactgtaataaaagttatatgaatgtggtctccctctcaaaataccttattgtattgtattcagctattttgggactattgtagaccatctgtaactgacactgtgaaaagcaaaaccgtggataaaaggggattcctgtactaatctttacatgtagctgagatgttgcagagcaaaatcacctgtagcaatttttttggtattggggtttgggaacatctgttttgtttcaggtccttcaggagacactgatg

SEQ ID NO: 46086 - DNA, 1052 bp, Homo sapiens
gaataagagagcttttggcctggggcctggaatgatctggtccaggctttaggtcagactgccaacccccttttagatacagcatgggaagttgaagaaagatggtggcccttgtttctgggcatatgtccaaccacactcaccctccacgttcctgggaggacgtgagtctaaaggacatgaggagacccggccagggccctcccacatcgggatcagcaccttccacttctatatggaatgtgaccagttcaaaccactcctccttccttatttccctcccaagagtgggaagatctgtggagagccctaaactccccttcatgaccagcacccacctgttctatctagtccagttagaaacttgcattttacgcttgatttttctaatcacattagccttatgcaatgactgggggatgtggagggttgcagtgttcctgcaggtactgctgatcccactaggaagagctccttcaggactggaattttttatgcttttcttcattgctgtatctccgatgactacaaatgtgccagacattagtaggtgctcagttaatatttgctgaatgaatggtattgaatagtctagttcagctacctaactttataataaggaggctatagttaaagagatcggaaattctagaacattctaccaagacctacatgtccttaaaaaaaaaaaaaagtcctgcattattcttgcagcactgcgcaggaggtatgtgctgtaaaccctataaaatcaatcaactctttgcaaaagtcaagactggcacttctctttgaagaaaggtacacagtggttcagtggaaaaaaagtatgctttggaattatgtaaactgctggccttgatagctttggggactctaatttctcagccatctattttctcctatgcacaaagagggaggtaagaccttctccacagggtgtgagaagacaagagaattcataaatgatgtgcttagcacttagcctggcacgctagatttcaaagttagttttcctttcttcctcttatgtagagtctcaaaggagcaag

SEQ ID NO: 46087 - DNA, 2146 bp, Homo sapiens
aaaaaaaaaaattactttgttggtgggttttttaaaaagtagaatgaaaatgaagcagtttcacagtctgtgtctggttggtcctttaatttagatttccccttatttttgcagatacttaaagcttcaaaaagactgcccctaccaccacaggaggaccagcctaaccatacgctccaaaagatggctgtgatagatcttgtgaagcaattactgagcagatcaagatctttgggaaggaacactaaagatgttttgaatgaattatagtccactggcattttagtgtatttttttttctttttagaaacacacatttctaaaaatgtcatgttacattcctgcatgtcccttttgatagcattagtggatccattggatttcttttttctttttgtgagacagcttttagtcttacctgaatttatgtgtgtttttccgacagtggttaataattatattggtgatgtagcagcaattgtgttggcagggttttcatatattattagtaattaacactaactgttggactgacttgtgtacactgtgttaaacatgatttaaaagctattaagagtactttgtgttagcactcttaaaaacgctaacagagatcatcattagctgtgaagatttgagttgtatatacctgcactgatattcttatcaaaaatttctacattagctttaagtgttcagattaacacttttgaaatttttgtagcttttagctgattaattagaaaaatttaatatttcagtgaaagttttaaattatcatttatttatttttttaaatgagaggggaaagctgaaattccttgttaagacacaaggaaaaagaatggccctactattatcatgcaaaaatgctttgttggcacctcagattaatcatataatagctatagtctcttcagcatttgtttaaattttagaaaacctgtataaattactggtgcataacttaaagattattctgcctttggctaattgagtaattcccctccagcactagagaccgctcagtgctcttactagatgaactcagtaacgccttgagctgggttgattgaggatgtgtgaaaagctcacagagcccgatgcctgctgctatttcacggcaatgagcctttttctttctacactgaagattttcttcttatttaatgtggtttattttgggctcagaaataattgctctgttgaaaataatcctttgtcagaaaagaaggtagctaccacatcattttgaaaggaccatgagcaactataagcaaagccataagaagtggtttgatcgatatattaggggtagctcttgattttgttaacattaagataaggtgactttttccccctgcttttaggattaaaatcaaagatacttctatatttttatcactatagatcatagttattatacaatgtagtgagtcctgcatgggtactcgatgtgtaatgaaacctgaaataataagataataagaaaagcaataattttctaaagctgtgctgtcggtgatacagagatgatactcaaattataataaaactcttcattttgtgaattatagaagctactttttataaagccatatttttttagggaaactaaggagtgacatagaactgatgaatgagtaaaagtaagttttgctggatttttgtagaactctggacgttgaggattcattatgctgtggttaactttaaatatttttgaattccaaatatctgaattaatgagccttgtctttacaaatatgtgccattgtgcaacatcggtggattttctaaaaataatgtaaatgtcttctattaaatgttgagtgcaataaaatacagaagaattctctatattgtcattatttttgaagtataaggtatttttaatttgttacataataaaatcagttcattttatccttactagtattttagaagattatagcatttttgataactaaaatcacaaaggaataccttcagccagttaacgtatttctaacagataatgcttattttgcatttactatcatgctacattgccaggaagcaagattaaaattaaatagcccctgcagccatcctttgtagattttgtcctgcacctagaagttttgattattccctggacagcctg

SEQ ID NO: 46088 - DNA, 1020 bp, Homo sapiens
gtatttttgcacagtctaattttgcatctgattgtaggaacactaattatagggcctacctccttgccatttttcaatctttaaaattcttttattcagtggaagactcaaattgaggacttctgcaaagtgctgaatattagttcactttttcttttcccttggaacctaattgacgattgatttgccttctctgattatcctaatactaagttatacagtcttaatatagcttattaaagttcataataatgtaactatcaatgtgctaatcccaagtggcattatcaccattgcctccatctaaagtagggaacagtgaatttcatgtttattaagcattatgtaggcgctctgctaagcacgttctgtggattgacctttaatagttctaagaccccaagaggtagatatgccattacctccattttacagatgagaacactgaggcacagcaaggccaagtaaccttccccaggtcacagagctgacaagtggtagaaatcggattgatccttgcattctggctccagagtccacactgtcagctgccgtttttcaaaggattttaaataaatgaagacgtgacagctgagagatttgagagcagttttggtgtggtaaaatcagatgtgttatatattcttcagcatctttctcttaatctgcattagttcatcacataggcctcaggaatgtcaaaggttgagttatgatgtatagtagaaaagtaagttgtccagtagtttgcattctgccttctttcttgcatatttataaatttgtaagtgctgtgcacgtggattcttggcaagcatgtggaagcttaagcttaagatttgatttttctgatattataggccaatcactttggatattagatttttaagattgattttggaatttctcatccattagcaggttttcacctttctccttaaactcatagttttccttgaaatcatacagcatatttgtagcaatctgacagcataaatatacacaacacaaatggaacga

SEQ ID NO: 46089 - DNA, 1028 bp, Homo sapiens
aagaatgttatatgttttcatagggcagagtatcataataaatgtaatttaaaatgttagcaaaaggcagtaaatataacctaagagattgacatgatttggtaagctactttggatttctttgttatatagaacataaactgtttcaaacaaatagatctaattgaacagtgtattattcactatatgctaaaacaatacctttgtgaaaattcaggaatcagagcagagaaaccaagtaactgacatgtaagtgaagctgtaagtagggtgaaaacaaaaccacatttcaatgggagaatagaatatattctgtatgaaacttgcaaaccccagaacatacacttcgatagaactatagtaggaaccagcttctacatcaaagataacctagaaatcatcatgcctacattggacaaacctgggaagtgacagtatggccttaccatgtaattgacttatttattcatacactgtttagtgtcttcggtctgaaacacaggacactggagcagttctagtgaagaacacccatggttcctgttctcatggatcttatattttagtagggtagtagaaattaaacaagcaatttcactgtagttttcatttccagttgtgataagtgctaggaagaacaagtacagtggtaacaagaatatgtaatcaagagaccttacctagtttgtggatgaggcagggccttcctgaagtttgagctgaaggtgagaacaattgacaaggcaaggagaaaggtgactggagagtcgtatgaggtctctgacgtgaacttgcaagagtaaggctgaggtggtgaaatgggctgggttcagaggatgcctgtgagcaagatcaaggacgttcatcttcacctttgagcactgccaagtcagatctgcattttgaaaagattgatcggtctggcatgcaacaaacagactggagagacaagagtcaatacagggagaacagttaagttagctgtaatcatccaaattgggtctttccgtgcatcacatctctctctg

SEQ ID NO: 46090 - DNA, 1682 bp, Homo sapiens
cccagttgaggaatttcgtacagtcacatgcctcatgctatcattttggttaaggatggactgcatgtatgatagtggtcccataagatcatagtgtcatatttatactgtaccttttctgtgtttagatacacaaacactttgtgttacaattgtctacagtattcggtacagtacgtgctgtacagttttgtagcctgggaacaataggatgttgcatacagtctaggtttgtggcaggctataccttctaagtttgcctgggcacactgcaatgttcccacagtggtaaaatttcctaatggcacatttcaacatgtatttccacacattcctcagaatgtatcgctgttgttaagcaacacatgactgaacttgcagttccctacccgaaacacacgtgtaacttacatagccacatccctgatttccttcagggtctgttcacatgttatcagtgagtccttttgccaaagtattatgaatagtccccacccccacttttccctaatgtgctccctgttctgtgtcttccccgtactatctgtccccatccaatatactctaaatagttcatgtttcttattttttaagtttctctctcccccggaaggtaggtgtgttgttttcatttactgtagaataatgccttgaattaataggtgctaaatatttgttgaacgattaaatacaacatacaatttagtaagtttacaactactgcatatttatggaaagaaatatattgattctttctcattatgggcagcagtgaataaagtaagctaatcctgggcttgggtatttgtgtcactcatatttgctatgagtggttgatttaaagtgctgatttcatttgcatttcatagcttcatctaattttaattaaaattggaggggcaattatatagtgattaaatgcaaatgttttataatttccaaatttatctgattaacctaaagaactaaaaccaaggtatgttttaagggaattaatgtgttttccaaatcatgttgtggccattgctgtggactggcagtatctattcaccatacataatgactggaaggcggctgtggacaccctgttcctcttggcagcacaggaatggaagtgggtcccagtcctgatgattaacactgaaaagggagactgctggtagcttctggaaaaaatttcctcaagcctaagaaagaagcagagcaagagatgctccttttgcttctggacatcgccttgtctgaaaaagaagcttgcagctggggagctctgattgccagcctgagggtgaagcttgacctgcgatgcagtcagccgcctccgcacttcttgtttagttagatgataaatttccttcctacccaaccattataagctggcagtttggtaactgcagccccaggaacatcgaaaccgacacatctcatgtcataacctaattttgaatatttatttcattgctacttcattgccacttgtacctcataataaatccatttttgaaaacctttcctatgactgaattgagcttatatgcatttacttttcttgattcattttcgcttgctttttccctcaaattttagaactaaaatgagcttgggtggcaaaaagttttttggaaacactgaaataaaatcttgtacggcaaattcttccatatgggttgttaaagcaatta

SEQ ID NO: 46091 - DNA, 1052 bp, Homo sapiens
tggaattttaagttatactgtatttactttaccttttcagagttgagaaactctgtggaacaggcttcgtgttgagatatagtgttgtctcctcagagtcactgttctggcttattcggatgtgctgacatttgtccgattgcaaagacgctgggttctccggagtttggcacgaaaacaagacagcagcactctggggattcttttcagccctttagcttccttcagcctgccttgctttgggacatgagtggtgggtataagtcagtaggggaagtgtcttctgggtgccaattttacccagtcctgaggcctggctgtcagcctgctgccctggggatcctgcagacgcctcggtgctgaggacatatggaatagtgggctgtcctgcattttcatcttgtccttgattctttctttattctagaaattacctccctgtcttatagagctgtatccagacatgaaagagggactattttctgtttgaattatttttatttagttagatagaacagattgtctaccttgatgtttgtgactttggataattatcaaaaaattagatctagcacagccagttattcttaatttggtcacttgacagttaactttttgggaattgatgctccatgaccctttctaaataatccgctgggctagctccttaagtctataaaacatacaagaaattttctgtgatttggctgtggaatctttgatcacaatgcatatttggaatgcttaaagaaactcagtgacccagactttattttcataagttaaatgatggaaccagtattcagaattcactgcctttgttatttgttgagatgaccctgtaatacttaggagttagatattaagtagtttgtggactccttgaaactaggaaccagatcttcggttttatttgaattctccttcaatgctaagccttgcatgtgatattcattaatatcatatgaataatgtcatatgctggtgtgggtcctgaaggatgaggagttactccttgcataataaaatactgagttttttttttttaaaaa

SEQ ID NO: 46092 - DNA, 1028 bp, Homo sapiens
ttctctaggattttgcttagtgttagtttgtcagagagctaaaaatttgaaaatgcttgcacttcctcacgttttatttaactataatttctacttttcaaatatttcttgtcttctatatctaatcaaattactttcaataagtgtatcattcatccatttattctgaggggactatgacaaatttaaattgttatgaattactcttgtaggctgtcataataacagcctgaaagtagcagcctcaagtcagcatgggacatccattccctctgcccaccatttacctgtgtcagcaaatactgtccaatttgctaatcttattaaaaagcaaacattctgtagctacttttggatgtggatatacacactggacaataatctcttaaagtttaaatgactattaaagtgactattaaagctcttgtttgtcttgcctgcactaatgggcaaatatgttttattctgttaatgcagaagatagtctgttaaagcttctgtttccaaatattcaaggacttcagttaagctgtcacttagtagcatgttctgcaacaaatgagtatcattcagtaatgttccttctgaaaatttattcaatctttgtatttattgtgtcttctgctttcatacttgggtactatgaaatatcaaagtttattaggtttaaattctaaaggaatcttcagccccactcaatgaaattcacccagcctaatttccgggatatactttttaaaggaatcttatttgttaacgtgttgttactactaacactagaagatattcgattaattgataagaagtaaatgattaaattttgtgttaaaaatatttgaaattactaatttttcatcaggctttatttgccctactaatgcatattttatgtacagaaattaattatgctttatttttgtaagtgaaaaacaagaatgtgggataaaaatttgctacttattttgtaccacctctcattagttcctctgaaagcctctgatgaaggtgacacccaggtagctgacgaa

SEQ ID NO: 46093 - DNA, 1030 bp, Homo sapiens
tcttaagtggggtggtggtggggggaggggagaagtttgaggaaataaacctttctagtttgaatgaacaaatgaacgaatgtgtgtataatcaactctcgataaaatctggttggtaaatgagcaaatctggaggttgtcagagtatatatctttttttccctgatactgcttttactcactcttccttttactgtcaactgatttttccattactgtccattgatttttgatgataaaattttgtctttcaactcaacactctaatgagagaaaggtaaacctgggtaggggctggtaggagtggtgaggcttggtcaaattgtggctttcttttgacatttgattgagagttgattgtaaggtgtgcattttaatggacttctttattttccaaataccgtttctgtaaacctctctgaccttgatgcacctcgcttttgagatcacccttcctccacttcttttttccacctaactgctctccttattttctctctctcttcctttattcttatgtaggcctgaccaaagatggcagtaatgaaaatattgattctcttgaggaagtccttaatattttagcagaggaaagttcagattggttttatggtttcctctcatttctctatgatataatgactccttttgaaatgctagaagaagaagaagaagaaagcgaaaccgcagatggtgttgatggtacgtcacagaatgaaggggttcagggaaagacttgtgtcatattggatttacataaccagtaaccttgattcagggactgaagtcattggctaatgaacacctgaagcagcctcctttttcttttctttccttggcttatgcagggcttaatgtgcagtggggtggttgtgatcttaccgtgcaagtcaaccatgtgatcttgcccagtacagctactagctagtcccttgctcgctcagctcccccaacttctattgaagaaaatggtactcctcattcttgtagtcagctacaaagtacactgaaaatgatgttcttggtggta

SEQ ID NO: 46094 - DNA, 1022 bp, Homo sapiens
tctatgttaatctatttacatttggtctttatttgaggcttggttgtttcttttggttcagatattgatagtgtgatgaaatttcatgctttagaaacattaaatttcaagtgacttaggaatgcatcaatattatttcatatatgctaaaaactttaccaagaatatttttagcagtataataaaaattattctgaactaattagatcaggatgttgttcaatctttaaagataatgctgtgtcagttttatttcatagcatttattagctgaacatttcctgactctcttaactgaattgctcgctatttttaggtaagatattcatttgacactgctttgcaggattaaaagagcaaagaattgtattaattggtaacatttatgactgagttgcatgacttcactaagttataataccttattaaatttcttttcttttttattcccatatccatcatttctgccctattataggaaaactaggaatctatgatgctgatggtgatggagattttgatgtggatgatgccaaagttttattaggcaagtacacattttatgttttttgttagtggtgataaaatgctggaaacaattatttttgctttaataatatctatctcaatagtatatatcttacaggagacttttctcccttaaatcatatatttcattactgttaaaattttaaatggcttatttttccacactctttcatgtcaatttacttttatcaatgaataagtgtatatctcttacacatatatcttttgataagtataataatttcatgtgtgtttccagatttaaagtacttcttattctgaacttagaatttgaatagataatatcctagtctgtttttagatatggtaattatagccatttttcattaacattacacattcacttccatttcaaaatgtaaatttctacaggcttacataaattaatgatgaaataaaagtgataataaacatcttaaaatgtcccatgcatattttaacggtagcattaa

SEQ ID NO: 46095 - DNA, 1050 bp, Homo sapiens
agtggtgtatttttaaaaaatgcatatatccttttaacacaaagaatttcattttttcttccagaagaatatattggcaatatattcttgacttgagccgctggaaattactaatagtattctgtaattagaactggacttagaagtcaaagggcaagttctagattagagctagtggggttttttgaaatcgtgtaatttggcccactgattagagattaaggaactcagagctgtagagatgagagtatgttcttagttctacccaacttgtactggtgactttgggagaatcatttcatgtttcacttataaaacagataattattcctgtccttcttcctgttggttctcacccaggaactgcccctgaagggaacatgtggaaatgtctggggatgttttttttgtcataagccttgacagctccttgcctttgagtccaggggaaaccagggatgccagaaatcttgcaatgtgaggaacaggtgcacaggatgaaacattgtcctgcataaacatccagaaatgccctctgtagaaatagtggcaggacaccgtgaggatcaccggcagcaaagcacatgaaagcactttgatggcgactctacctgccacacaaatgggagacaccgccctggccttccatcatctgtttgataaacttttcctcttctcagaaggcattttgggatattatttattctttttatttattaatattgatatatgtattatattcctttttatgggaaatttgaatattgtatatctttttaagggcagtgttgactattttctgttaatatcaaatcatttttgtttatttttggctgtaagaagaatatttacaaaagaatataaggtatattaagcatatcaaatgcgataaatgacactttaggtggacagcagtttacaaagctgtttcctgcagtgagaccaattgtgaatgagccttttcctgtttccttaggcctcaacggatcttgtaaaggagtaggaatggattgtgctgtttcacttttctgtccttttctctctggctaa

SEQ ID NO: 46096 - DNA, 1045 bp, Homo sapiens
ttcatgtagccatgaagaagaatatgagatatgtatctgacttttagttcttttggaagacatttctctcctcttgtggattaggtaatccatgtagttaggaaaaatcagctgttgcatctgatgcacttttaacagtttttgattcccaaagggtgacattttatagcatggaaaaataatcagtttgatgagttgcttgacagtttttgtgtttttcaaaaaactttaaatgtgtagagtttatgtgtaaatatgaaattcccaacataatgctaactaaaacttataaatgatctataattcagttagtagtaggccagtgaagtagctggtgactgttcaagtgctggggttcatcttcttgtctccctttcctcaaccaaataaataaaactacacattgcccttcccccggcttttgttttggagagtcttcattttggactgttgcttgccatagtaatttctgtgtttggtggtatgtgggaacattttctgatttggaggtcatgtacttttgatggaataacatgggaaaaaatgaatcgcatcgttcttgcagtattcttaaaccccagtaaaaatccgctttgactgatcccagaactacaggttgaacatgaagccagaaaatgaaatgaagacttagatttattctgatcttagaaaatagggacatctactagatgttcttcccaaatacctttggaacaagatactggtttcagatttgcttagggagttgtaaaccctcttaagggtttgtcttaccatgcgttcatcagtttcattggacagaaactgatctgccctttgggactaggcacagcatatttaccaaatgacatatcaagagtatattgtttgctgtcgataaaaactgcccctaaaaaaggtgtcttaaaaaagaatcccttccataacttagtattttgttcctttgtggaactagtaaatatcaacagtaataaggttaataatactagagtaacagctcatttatttgatattaaaaagggatatataaaatattgctgataat

SEQ ID NO: 46097 - DNA, 1031 bp, Homo sapiens
aaattctttataaaatacatgggatattctaacatctgtgagaaggtaagccatttaatactggtaatttggtttaattgacttgatatgctgctcattttcctccttaaatggtaataactagcaataggtacattggtttgttaaaaattgaactttcttcatgactaaaatataatgcttattttcttgaatcttaagatttatttgattatttggtggtttctagctggtccatctgtttagttgtaaccagtaaatatacctggagacctagggagcctggcatggatccaaacatagcccaatgtttcaatcacatatttgctttgtaacattattaaaatgaaattaacttatatgaaggtggaaaactcttaagccccttgtatttattttatagtttttttctagaagtagtacactatttgtgttaataagtacccaagctaatttttagaattaccttgttatcagtgagacatttaagatgactgggtaggatagagtaacattgagtaagagcacagttcactagcttaagtacttttactgatttggagtaaacttgaaataaactatgtatgttcaacaccttcctgctcagctggtccttcaccagtgccttgtggtcttagtgtgcttttagcttatgcttattcgtattttcaatgccagctatttcacatcttcaccaacttcagccaatatcttactatttatctttcagttgtggcagacggcaaactacagtgagaaaaaaagcagaacagtggggccacctctgaggctggggatggggtgcaatggaaatggccatgagggaatttaagcagaaatattgatgttctagatcttgatagggatctgggttacatgttgtatacacttgttaaatctcagggaatgtatacttaaaatttatgcatttcattttgtgtaaatttcactttaaataactataaagaaatgtgtaactatagtttatgatactcatgccgaattatttaggagatgtgtgctgatgtcta

SEQ ID NO: 46098 - DNA, 1032 bp, Homo sapiens
ccctaccacacctggctgaattttgtatttttagtagggacaaggtttcaccatattggccaggctggtctcaaactcctgacctcaggtgatccacccaccttggccttccaaagtgctgggattagatgatctaccgggaagcgctatatttactcagcaaccaggaactccagtgagttttggtgtctagagtttttactggaacgttattatgaaataattgattgaatctttgcctgtgtgattgaactcaatctccagcccctctttcatacttggagattgattgggctggctcgaagtttcaactttctaatcatgaagttagtttttctgatgattagtcttcatcctgaaataattgagggacccaccttgaattaccacattagcataacaaaaatacttatatcattccgggaattccaagggttttagaagcttcctgtcaggaacccaggacaaagaccagatagattcttagtgatatcactctgtataaatagataatgattattgtgggttacttgatctccgaatgcttagaattgaagccaccagctatttctgttctcatagggattttgcaaggaaggtagcagtcatacttaaaacttgtagaatgctttgtgcttttgaaagctctttcttccattgtctcacttaataattgcaaaaacctggtgggaagtacatgtattaggtcagagtactttggttgtgtgttgccagaactcagtttatacagaaaaggaatgtttcaaggtgctgtggttttcatggaagtctctagtaagaataaggggcctggtttgaaacagctggcactatcgccttgaaaacgtcagtttcttttttttcaaaatctgtttgttggtgtttgagtctgtgcagaaccttcagggttgaccactaagatatattgctttttgatctgtttactgagtcaaaatttcttggcttggttcatgttcttttctacattgtttgtatttttatttgtttgtcccagatacctctgaaaatatg

SEQ ID NO: 46099 - DNA, 1045 bp, Homo sapiens
ggcccgtgctgataatccaggacaatgttctcatctcaagatccttaatttaaatcacatctgtaaagtcccttttgacatgtatagcaccaaattcataggcttcaagaattaggacatggacatttgagggccattattctccctaccataccttttgatatcaataatgaccttattaaagcttttgcttgatagtcacctgtaatagtttgttagggctgctctaacaaaataccacacacaaactgagtggtctaaacaatagaaatttattgtctcatatcctagaggctagaagtctaagatcaaggtgtttactgggttgctttcttctgtgggttgagagagagattctgttccatgcctcttgcccagtttttggtgattttctggactctatgttatatcatggcttgtggaagcttaaccctgaactctgcttttatcttcacacagaattctccctgtgtttgtgtctgtgtctacatttcccctctttgtatggatactagttatattgttttaggggcccaccctactgcagtaggaccacatcttaactaattatatctgtaatgatgctatttccaattacaataacattctgaggtactagaggttaggatttcaacatatgagttttgaggggtcatgattcaacccataacagcatcatttgaaaaaatagattcttcttatgtgagtctaagatttttatttctactaatcagatattgtaaacactcttgggcacattggaggaataggagtgatggttagttaaacgttttgattaattcatgatttaggcaggcattgtgaccttatggaaagttgaaaatagataacttatggcttaaagaataaaaagcatattgtatttcaaagcacccctctctcatacagctaagcatgtccttcctttagctttaggctttgattcctactaaaacacattgatcttggggcaaggagctttcgacttttctcactggacactcacaccacagagtaaatgagtttcagattttttccttttagt

SEQ ID NO: 46100 - DNA, 1114 bp, Homo sapiens
acctcctacgtcagcctctcaagtagctggctaatttttgtattttttatagttacggggtttcaccatgttgctcaagctgatctcgaactcctgggctcaagtgatctgcccaccttggcctcccaaagtgctgggattacaggcatgagccactgcccctggccctgacatatcttaaaaataaatatttttgcttataaatttgcctgggcttatcttttatttgtaatctgagcatgtcagtgacagaatttggtaccaagaatgggatataataaactattttaagatctttattttgttactagtttctttatgatcatagtcccatctgaggcatatttgaggttttggaatccaactatatgtgctggggctgagagaaagagagagaaaggttgagactttaagttgtgcagtcacttctgcctgcctatctctctgaagagtatttcccagcgtaaatgttaaaagggagacattaatctgctgttccctcaattggtcatagattctttgtggcgtgcagtgtgagcttctcactgtgcagagtgtgattctagtgtttaaagataaggattttttgtacaagatggcctcaaaagcaagccaactacttcatctggtgctcacccaaagaatgagccatctgtttgaacactgaaagaaaaactggctgtgttggacatattgagaatctgcctccaacatagtctgtaaatgttgtatactgtattttaaaggtgacttagattttcaagcataatttggactccatgagattttttttcttgtgtgtacaactctatgagatgcaaccactataataaatgctgcatccttccaattttcctttgttaccggttaacatagacaatcaaaaaagctctttatcttccaaggtgagtggatacctctttaaaaaatcttttcataggctgggcgcggtgactcatgcctgtaatcccagcactttgggaggccaaggcggatggatcatgaggtcaggagttcgagaccagcctggacaatatggtgaaatcccatctctactaaaaatacaaaaattagctgggcgtggtggtgcgcacctgtagtcctagctgctcgg

SEQ ID NO: 46101 - DNA, 1028 bp, Homo sapiens
catgcttatttctgatttatcaatatttaacaaatttcagccaggcacagtggctcatgcctgtaatcccagcattttgggaggccaaggtgggaggattgcttgagcctaggagtttgagaccagcctggggaacatgtgaaaccctgactgtacaaaaaaaaaaaaaaaattagctagctgtggtggcaagtgcctgtagtcccagctacttgggaggctgaggtgggaggattgattgggcctggaagattgaggctgcagtgagctgagataatgccactgcactccagcctggatgacacagcgagatcctatctcaaaaaaaaaaagcaagtgtctcaaatgtcttcatttattttgtcatttggtttttatttttaaaaaatgggagggggcataatatttgctccattgaatggagctagaattatcctgattcttacagaatttttacaggagaatatgatatatataaaatagtggttttgattttctgttttataactcatgagctgtgtgattctaggcaatattttaatctctaaactggagatttatttaatctctaaattggagatttattaaaatggagatgattcctctgcctcatggggccgttaattaggatccagtgagagatgagtgctttgaaaactaaaaatttaccagtgtgcaatggatttattgttactagaagtttctcaagtggtaacctttttttttttttttttttccgagacagtcttgttctgtcgcccaggctggagtgcagtggtgcgattttggctcactgcaacctccgcctccagggttcaagcaattctcatggcttatcctccccagtagctgggattacaggcacctgccaccaagcctggctattttttgtgtttttagtagagacagggtttcaccgtgttggccaggctagtcttgaacttctgacctcaagtgatttgccctccttggccttccaaagtgctgggattacagatgtgcgctaccacgcctggccttcaagtgat

SEQ ID NO: 46102 - DNA, 1023 bp, Homo sapiens
tttcttggttaacagttaactgttttagaaatatagagagatcttttgtggatatcagagtctgctcttgctgattttacatggaaataaaggatatgtgtcttccttgcatttatttttaaatactttcttcctaatcttaactaatcctgacaatccaaaaaataaaggtgtaaccactgggcaagtaaatagggtgaaaatccttgtctgttgctactcttttcactagctttgtgatgggggaaacaaatataccttgagctcatttgggttcccatctcatagatgggaggttccatggctatccagtggctgcagtggctagacacttgctttagtcattattacacagagagcggttgctcatttactcctagaatttcagcagatcaacttctgagttcttatttgtactctgcttactcctttctgtattgacacagtgctcagcaattgggcctactgtcatgtaagaggaaaatttaccctgagaataaccacggtaattagaataaggagtaaagttgattttgtaataactctcaatattttctgtatcagatgttggtcccattccaagatactcctgtggaagttgaacagaacacagagctacctgactacctgcctgaggatgagagtcccacaaaggaacaggacaaagcggtgtcccgggtcggctcacacccagaaggtggagctagctggcttagcacagctgcaaactttttatccagatcattttattggtgacttcacttttgggctcaaggactgtgtgaaccaacaaggggccagttttccattgttgtggtgaactgtcaagtgcaatttgcaataagttatcatgaaaagtttttagattacacgatcgcatatgctgcatttcacgttttattggacattttaccccactgagtggtaaaaaggacagaggctacagatggagttgctttgtttatgaaagtattttggtttgttttctttcatttaattgcctcatatttaaaaaccatgggt

SEQ ID NO: 46103 - DNA, 1033 bp, Homo sapiens
aaggaaccactcaaacaaatttaaagatcaaactttagactgcagctctttccccctggtttgcctttttcttctttggatgccaccaaagcctcccatttgctatagttttatttcatgcactggaaactgagcatttatcgtagagtaccgccaagctttcactccagtgccgtttggcaatgcaattttttttagcaattagtttttaatttggggtgggaggggaagaacaccaatgtcctagctgtattatgattctgcagtgaagacattgcatgttgttttcactactgtacacttgacctgcacatgcgagaaaaaggtggaatgtttaaaacaccataatcagctcagggtatttgccaatctgaaataaaagtgggatgggagagtgtgtccttcagatcaagggtactaaagtccctttcgctgcagtgagtgagaggtatgttgtgtgtgaatgtacggatgtgtgtttgcgtgcatgtttgtgcatgtgtgactgtgcatgttatgtttctccatgtgggcaaagatttgaaatgtaagcttttatttattattttagaatgtgacataatgagcagccacactcgggggaggggaaggttggtaggtaagctgtaacagattgctccagttgccttaaactatgcacatagctaagtgaccaaacttcttgttttgatttgaaaaaagtgcattgttttcttgtccctccctttgatgaaacgttaccctttgacgggccttttgatgtgaacagatgttttctaggacaaactataaggactaattttaaacttcaaacattccacttttgtaatttgttttaaattgttttatgtatagtaagcacaactgtaatctagttttaagagaaaccggtgctttcttttagttcatttgtatttcccttgttactgtaaaagactgtttattaattgtttacagtttgttgcaacagccattttcttgggagaaagcttgagtgtaaagccatttgtaaaaggctttgccatactcattt

SEQ ID NO: 46104 - DNA, 1021 bp, Homo sapiens
gtttaaattagctattttacttaataactatacttaaactaagtctggataagaattacgcttacatgtcccagagataaacccactctagcactgaacctttaaaccttgctctacttgtccctggcagttgacaaaagagcctggccctgcacgtccctccctggcccccgcatccttccctttgatgtcagcaagactgatggttgagttgcctttcttgcagatgtacacttattcatgctctgagtagatgctaattgctagtgacaaaaatatgagtaagataggaattttggcccccagaatcttacttgtaaaacatatgggaacctgacatggaaaccacaggaatgtcaggcctccagggcaggaatttttgtctgtctattccctaatatttacctgtcccctaaaacagcaccagcacatggtaggtacttggtcaatatgagctgttaatgaatgatattgtatatgggctttatcattggctgggtttactctaactgttctctgtttttatgtttttattttgttctgttttgtttttcagatggagtctcactctgtcgcccaggctggagtgcagtggcacaatcttagctcactgcaacctccacctcctgggttcaagcgattctcttgtctcagcctcccaagtagctgataggcatgtgccaccatgcccaactaatttttgtgtttttagtagagatggggttttgccatgatggccaggctagtctcgaactcctgacttcaagtgatctgcctgccttggccctgcaaagtgctggaattacaggcatgagccaccatgcccagcctagttctctgtttttagacctctagagcagtggccgccaacctttttggcatcagggaccagtttcacggaagacaatatttccttggatggggagggggatggtttcaggatgaaactgttacacttcagatcatcaggcattagattcttataagaagtgtgctggctgggcttggtggctcacacctg

SEQ ID NO: 46105 - DNA, 1050 bp, Homo sapiens
aggtggataggagaacttctgagaaagtcctctcctgcatttgctgctctgagtttgaagtccaaagcagcatattttggggtctcattttctgaccctcattgtgatatttcatatagtgcccagatcaagagatagcttaatttgtaatttatttggttatatacaattttgcttatatacagcaaaaagattacaacttaatgaaggttcacataatgattagcattttatagcaataaagtcttttaaattaaggtgtatacatcgtttttttttaaagacataatgctattgtacacttaatagactatagtgtaaacatagcttttgtatgcactgggaaacccaaaattttgacttgctatattgcaatattcactttattttagtagtctggaacttaacactaaatatctcactggtatgtctatacttaatagtgagagaccatcacattgatttgatatcctttttaaaatctttcaattttaagtagagagaaattacaaattattcaggaagtaatttattactgtaggaaaatggtaaaactgtggaactataaaataagttaagatgttgctggtggggacatttaatatttcatacatgctgggcatggtggctcacgcctgtaatcccagcactttgggaggctgaggcaggtggatcacttgaggccaggagttcaaaaccatcctggccaacatggtgaaaccccgtctctactaaaaatacaaaaattagtcgggtgtggaggcatgtgcctgtaatcctacctactcgggaggctgaggcaggagaattacttgaacccaggaggcagaggtgagattgagagagagagagtgagccgagatcgcgccactgtactccagcctgggcaacagaatgagactctgtctcaaaaataataataataattaatataaccatttttgctaatctgcaactgctttatctaggtaaacagaagcctgtgtgactctacagatacaattttgcagtaaattctcaagtttataattaatatagtgtgagtagccc

SEQ ID NO: 46106 - DNA, 1049 bp, Homo sapiens
aaccttatgataatctaaatatacagagaatgaataaacattctaaaatatttatatactcgaagatggttgttacagcaatagcaacagacacgttgttcacttcttcagaaatggctccacaccacatggactcgtgtttgtaccaatagagcatatcaggacctgaacacattttaacatttaatttatttaaaatgtaagatttgaaatgcttttttctttccacatgaaggtgatacgtcaggtagtttttaaaaatagtctcttttggcctgccacatcttttctgtcattgcttatgcaaataatgctccaattaatgtactttttcatcagctgtggtcttttgttggcagttggttaggcagttttagataacaaggttaaccaaacagtcctttattatccttcataaatattattattataaattttcaatttgggactagtatgtcttttatacatttttgtaagagtcatcatagacgagagaatactagaatcgtgtattttattgcattatctgaatgttggcagtaatttatgagtctatgtgaaggatgtagtctacttaaaatagactttttaatatgtagcctatttaaaacgtggtctatttaattgttaaaataatatagtatatgtgtcctatggaagtttacaaaactgagaagtataataggaggtataaaaaatggagagttacaccatggaagggaaaacgaaacatcataaaaatggtagtttttccaaatttaatttctattcttggtgtgactccacttgttagtgacaaaggagtggacgttgaggacgaaaacagtccccattgcgtgtagcagctctttccaaaaactcggctctgtagggggatggagcaggtgaaactggagggggccaggagaggctgtgattctttattgtttcagagatgagagaatctagaacatgtctgaatgctgatgcttgttgagacaatatagaaaagagagagagattggtggggtggggtggggatagttgtacctgatagaacaaggaatatc

SEQ ID NO: 46107 - DNA, 1077 bp, Homo sapiens
cgtggactgttaaagcaagtagtggtcgggtctcaagagccagaggcttttctgttaaaggcctcttttgtgacatcggttgtgggaaaacatgcgatttgggtgatagaaaagaatctgtggaagagttagagtaatactgctccagttgtgttggttcttcagcgcttgtttccttgacctggggcttgtatttcctgtctactttctaatatgaggaggggaaagcaacagaaaaacatgtcttttacattcgtctgctatcccactttttgtgatttggcttagagaagctaagaatcattaactggaagtaatacccgtgatcactaagtcacagtgttcatttaggtttggtggaggctggtagtttgttcttggtcacatagtgaagtaatgtgatattttagaaaagagccagcaaagccaactgctctttaatagtaacttgattaattcactgagccctgttggctttctaagctggattggaatgtaggtaaccatgtaaactagcacaagcctgggacttaaaataaatagtccaggcttgatggaagtggagctttaataaaggcaagtttaatctgttgtgcattatgctgtgaaataaataatttgtctcatgtcacagtgagctcatgagaatattggtaagagggccaggcgtggtggctcatgcctgtaatcctagcactttgggaggccaaggcaggtggatcacgaggtcaggagttcaagaccagcctggccaacatggtgaaaccccatctctactaaaaatacaaacattagctgggcatggtggtgcgtgcctgtaatcccagctactcgggaggctgaggcaggagaattgcttgaatcaggacctgggaggcggaggttgcagtgagctgagattgcgccactgcactctagcctacgccacagggcgagactccgtctaaaaaaaaaaaaaagaaaaaacaatattggtaagaaggtcagatattgtgtaatacagccagagggtgagctttttagtaattgttcggatgaaagtactagttaaattctcatagtcactcttgttcccag

SEQ ID NO: 46108 - DNA, 1032 bp, Homo sapiens
tttccatttttcatatcccttttagcccatagtatagtgctaggcacagagtcggctcttaataaatatgttgcttctttctgcagctttctaaagttttgtgctgaggattttcaacctcctgtaaaacagatattgcttcccaatggcctttttttaaaaaaaaaaaaatgttgcccatgtgaataatatattaggtcatcttatcatacacttgaatcctctttcagaaggctaacttattaaaatatagattataataattattataggggtagatttaaaaaaaatcctcctcattcagccttacaattaattactgagattttgtgaacccttttgaataaatcagctcttaactacctgttccacatatatgatcagtgggctgttacttatgaatatgataccacacggacctttgttgcatatggaagcttcttcccgaatgacaaccttctaaacttatgttttattcttgattctgtccaggagatgtacgtgtaaggagccgagcaggatttgaatcagaaagaagaggttctcacccatatattgattttcgtattttccactgtaagtgttggtagacatgaagtttctcggattttcactacaaattttaataaaattacacagttttccaagggaaaaagaataccagaaaaaaaactctattatgtttggaatgtttttaaaacctaggtcatgtaaatgacactatttctaggtaatcttagtaaatacttagagacaattagaagaggaagatactaaaatatgaaagttgatatagcttttctcttctcctctaatttattacttttttttctttaaaaagatttttttaagttgttttattccaaatggttagtcttcactacttcaactgaaatgtttttgtgcaaatgatattttataaaggtatttcagtagtttaacttatcttttaggtttatttgaaaatgtatatcacctttaaagatgcttggtagaatgcctatttcaaaaacaagcattctttgtggattt

SEQ ID NO: 46109 - DNA, 1049 bp, Homo sapiens
tttaatacctgctatgtaattttccacgtttaaacataatgttttaagcataattatctcttggtcttcttttcttagtgaatatgattgaagaaatctcttaaagaaaaataatgtatttaaattttaaaatctttgtgttttaaaagttaagaattaattttgttgcagtgacagctattttcttgtttttaaaggattggcttgccaagttattgaatgaaggtcaagttaatgttaataatgcattagttgtcttgtgggtgttttcagagactttactttttttttttcccccccctgtagagatgaggtcttactatgttgcccaggctggtctcaaactcctgggctcaagcaatcctcctacctcaactttccaaagaactgagatgtgagacaatgcacctggcctctagactttactcttttaattgccaccaaaaaattaaattgtttttaaacaaaaacaatgctaatattttatttttaaaaaaactgttgaaaaaaggaagaagaatgggaaggatactgtttggtagatcagtgcaatatttgaatactttaggcactcaagtacaagcatgtttttctagcatatgtaagatgactactctgaaaaagctcattttgctatgtcagaggaaattgacttcacaactttggctgggcttcatcttttgctatattattattttttcggtaatgttgccaaaaattttgttcagtgctcccgtgtttaagccctttaaccatcagtttatgaatctgcaaaatggaactaataaagcctaccttatagagatcttgtgtgggttgaatgagattttgtgcgaaaacacttggaacatttttttggcacaaggagcacagcaagtgttagttaatatattatcactcttaccgtgtaatggaaatggcacttgcttttgctaataaatcatttagtggaaaacttggaacaaaataaaaacaatgacacttaaaatatctttgctgggttttaaaacatgtctgtctttaaaagttatgtattaactaatattggg

SEQ ID NO: 46110 - DNA, 1028 bp, Homo sapiens
gccctaaaaggagtttctgtttgatgttcgttgagcaagggccttcttgtcactttatttttatattgtattcaaagtggcgtctttctggttttaaccttactgaggtgtgagagggagaggaatgttactggtatgtatgtgtgtgagagagaatgttatagaaccaaactagggcctactcacctggcacagtaaaaccaaatacccacacagaggaacacagcaataggtgtttactgcagagtgctaagcagggaggacaggcagctaaatgctcaaatcctggcctccccagtgacttgcaggcaaggatttttaaacacaggggtgagtttcaggaaagcagaagctacaggcaaaatcatacttcaatacagggagattacacattggtttaagtttaaaaggttgagatatcttgaagcaggggcttacatgttgcaggtagattcaaagatcttcagatttgccattagttaaggaagagcagctttgtttaaaaatttagggtcagtagaaaaatgttaactggctagggggtgtgactttctccaagcactgcaggaagaaacttagaacaaaaagcagttataaagtttagttttcactgtctccttatctggactccaggtgccagtggatctgttaggtggggggtccgagcctctgaaagacaattcagggacatatgttcagatgttatttttagtttctataaggaaagcaaacatctctggagctttaacttctttggctgttgttttaggctactattaccttcttgttctagttagtagttacctctggggctagctagatgcctggaatttcccttgaaggaacttaaggattttcctttgtgagtccctaaaaaagggagtccctgctctgtctcaaaaaacagctatcttcaggggctgctatttagtttgaatagttaccaattgtgagttttggcctttggccctcccagtccttttctgtctgtgagcctaaaggttttgattttagctgtcttcacttct

SEQ ID NO: 46111 - DNA, 1043 bp, Homo sapiens
gtatactgaatgatgcatattttttctagaatgtgtatgtgtgtctgtgtgtaggagaggtgcaaggagagatgcatatacacacaccttgcctctgctggtttgttctcccaatcgtatcctctgtcctatggttcccaactgctggtggcaaatcccaagagaatttgggaattgacaggagcttcatgaattcatgtatatttcagaaagtaaacttaaaaactctcatacatatatataagcatatttcaaatataaatactgttgtgatgaattaaatccatttaaacataaattcacaataatgttatgctattttgtacttttctcagtggataccagaagaaaaaggcctatcttgtgggtgtgtgcaaactattttgccattaaaaggggtttgtcattcttcaaaagattaaacaccacctattccagccatgtcttgtctcctgaaagtaaatttgtgatttagactgtcaaacacttgggaaaatttctgactggtttaacattgttaaatgcacacctgattactgatgcagctgactgaaaattgactattacgttgagtaccaagagtgctggctagccagaacttgaaaaggggagcactatggtcaaacttttacttgataatgaatcttcagtttatttctttttaaagtaccatgtctgtctgttgctgtaacttagagaagctggccatttaaatgggagcaatgggaacaaggttgagtaatgtctgctctgtagagaggcagaaatcattttaaagaattgaatcaagtcatcgatatgcctgaatatattatcagagcactgtgtattaggctgttcttgctttgctacaaagaaatacctgagtctgagtaatttataaagaaaagaggtgtacttggctcacggttcagcaagctttataggaagcatggtgctggcatctgtttggcttctggtgaagcctcagggagctttcaatcatggcagaaggcaaagcaggaacaggcacattatgtggcaaaagcaggagcaagtgagag

SEQ ID NO: 46112 - DNA, 1029 bp, Homo sapiens
attaagtgtactacagatgtgtaatgagaatctcaaaaggagaaagggtcagaaaaatgaccttttggacaacttctcatatttgatgaaaaacattaaactacacatccagaaggtcagtgaatgtgactaggattaatacaaagagacccatgcctagacatagtcaaactcctgaaagataaagagagtatcttgaaagcagcaagagaaaatcaactcactacacaagagggaagcatcagcaatgactaagggctgctttctcatcagtattggtggaggcccaaggcagtggggtgacatattcaaagtgctggaagaagaaaactgtctgtgaagaagtctatatttagcaaaactaacctttaaaaatgaaggtgaaataaatacattcctacagaaagacagaatttgtagctatcagacctaccttataagaaatactaaaagattaagttctttaggttgataggaaatgacaccagatggaaactcaaatccacaggaagaaatgaagagcactggaaatgtcaatatgtaggttaatatagaagactataaatatattttttctcatctcttctttaaaaagcattgaattctatctaaaaaacaaatttagtatctaacattaccttctgcacattcgtcctagttgtaagcaaattgctttcacctctttgccttttgattcatagaatagactgtgataatgatactcaaaattttttgtttcaggattcttttccacttttattattctgagaactctaaagagcttttgtttatgtgggttttatgtactgatatttattgtattagaaattaaaactgagaaaagagctaaatattattcatttacaagaaataccaattacatgttaacataaataacatgtgttaaatgaaaatagatattttccaaaatgaagtaggagagtggcattgctttacattctcaaatctcattaacgtctaccttaatagaagacaactggatttcactttaggctttgcactgaattt

SEQ ID NO: 46113 - DNA, 1088 bp, Homo sapiens
ctgtcatgtagtaggttggagatattctattctgctccatgaagtaatacagggatccacttgtcatggttgtacaatttcacacttcagtctgtggggaggagaaggaggaaattcaggacagtttgccattgaggaggtgagcaggaagttctgctatttcttttactcacattgcatcattggtgagaacttagtgacacggctatgcctacctataagggaggctgggaaatggagcctatgtgactgattgtatgctcaggaagaacatgagaatagatgttttgggagacaactagtagtgtgccacaatttgaataaaattaatcttactaacttttgtcaatgggaagaattaagaagtttacaatggaataatttttgtaattttaacttttaaggattatgtaatgtatcagttgtgtgtaccatggttttattaatatctagctctgctaaatacttacattgctttaatttttttgctgttaacaataactttgtaaggacatgctaattacagctttctccatattttggtgttatttctttaaggatggtttttatagaagtggaattattggtccaaacaatttgaacattttaatagaatttttatttcttaaacaagttttcttttctttgagacagggtctcgctatgtcacccaggctggagtgcagtggtgtggtccgggctcactgcaaccctgaacgtccgtgcttaagtgatcctccctcctcagcctcagagcagctgggatcacaggcatgtgccaccacacccagctaacttaacatatatttttttgtagagacagtgtctcactatgttgcccaggctggtcttgaactcctggcctccagtcctttcaccttggcctcccaaagtgcctgcataacagacatgagcccttacacccacccttacattacttttgtaaagcagccatttcagtgctctggaggttgactaaaggccaattgtataaaactttgaaaaatgttatgctcttgaatttggagtgagaacagtgggagtcagtggccattctagcttgaggctactcacattcccccaattct

SEQ ID NO: 46114 - DNA, 1049 bp, Homo sapiens
ctttaatacattgaagccatctgtttatggcccagtaatcgtttgaaaaagttaagagtacaaacacactcagttctgaaaatatctgagttacttttaattaacatataatcagagataaagcaaagccattatcagaagtataatgggtcatttgggaagatagcatttgatttgttgaaatgtgatttatgtgcaacttaaccttttataaagaaagacatatcttacttgcctttaaaaattaacttatgaatgaagccattttcaccttggggaacaaaagttaatatcataacatacagcgagctcactctctagcactgttatgtatgaaatggtgagtagtggaattttttagtaatttaaatttttttaaaattttactttttgtgtaaattcttcatagtgaatatatattttaagaaaaacaatgaagttattctaaaaagtaaaatgaaaagattctttacttttaacaaggataatacaatcaaatacccaagaatgtaaagactactcagtagaaaattagcaaaatactcgaatataagactactcggtagaaaattagcaaaagtctcaagcagttccaagaagaaatataaatgtagcaaaacatgtatagcttatctagtaataaaggaaatgcaaataaaaggtggtttggctttgttttgttttggcagaagagtactttcatattggtgaagactgacaaaatccactgttgggaaggatataagaaaatgagtaatcttatatgtggagttggagtatcatttgagtcaaccttttgagaggacagaaggtctatgctatacagatgaaaattttaaatgtagatactaccatttctgcagtcctggaatttgtccaaaggggcaattgcaaaactttgctaagatatatgtatacaggtttttggtaacaatttgcaacattggtaatgatagatattttaattcatttcagtgtttatcagtgggggattggataaattatgggtattttaattcaacagaaaactctgtatccaataaaatgat

SEQ ID NO: 46115 - DNA, 1032 bp, Homo sapiens
cctggccaacatgatgaaaccccgtctctactaaaatacaaaaattagcctggtatggtggcgcatgtctgtaatcctaatcctacttgggaggctgaggcaggaggatcacttgaacctgggaggcagagggttgcagtgagccgagattgcaccactgcactccagcctgggtgacagagcgagactccatctcaaaaacaaaaaaaaaatgctgctatagttatgaaagatatttaaaaacaaaatatgagaaaagatatgcatcaaattaactgtacgttctttttcttcaaccagagacatgaataactgatgacattggaacttagagaaacagtataataaatggaagaatttgtattatagtgggtggctttagttattctatggttaccagatattccttaatagaattggagagttatctatatttaggggtagaggaaaaggacggggggaaagctttctaatttttgtactgttttaataggatgataaattaaagaagttggttgaacaacatggaactgatgattggactctaattgctagtcatcttcaagtaagtgaaatattaaattatatttctaacatggctggtttaaggcattgggttaaatttgctatttttcaaaaatgtgtctacatattttaattttaggtttccttcctaaaaacatccctgttggtttggtctgcctctagttggttgctaatggcttggagagtctggtttagagtctggttttctagtaatgcgtttatccaggggcctaaaaagattattaacttaaaacaaaaatgataataaatgtatgtgggaccttataaatatttgctaatacacgttaaaacattctgtgagaaatatattgagatatttgatagctaaccaaaaaatccagaaaagccctattaaaaaaagcttatcatctgaggcttaccttttaaaatgttgattttaaaaactattatgcctattgtttaccatactactattcacctgctgttcgttatataactttataa

SEQ ID NO: 46116 - DNA, 1048 bp, Homo sapiens
agtgattctcctgcctcagcctcccgagtagctggcattacaggcacccaccatcatgctccgctaatttttgtatttttagtaggggtttcaccatgttggccaggctggtcttgaactcctgacttcaggtgatccgcctgcctcagcctcccaaagtgctgggattacaggtgggagccactgcgcctggccttgtatttcagtttatcattaaggcttgcccttttttatggggctttattctttaaaattgctttttctttttttactccatcaaaactcaggttctgactttggccccttcctcactttattaattttccttgggtcatcctgtgccctcagctattctttgtatgctggccaaaactgcatctctaccctagaccttgtatttgagcaggtccacatgctcatttgccttctagatttgctctgccctgtaggatagccattagccacatgtggctattgagctcttgaactgtggctagtctgaattgtaatgaactctaactacaaaacacacaccagattttgaagactttagtaagaaaaaaatatgtaaaacatttcatttatacttttttatgttgattacatgttgaaatgattatatttttgatatattaagctaaggaatattgactattgaagtacatttcacttatttctctttttttaaaaaatgtggctactagaaaattacatatgtggcttgtattatgtctctgttgggaagtgctgttccagacatccacctgtgtatttttcaagtaccttgaaaacagctagtcccaaactatacatactctccccattttcttctctctcccaaagttctgtttctccttctatcattttccatagtaaatagctctacttatgttttcaaagccagaaactttggagtcatccttaattcctccttcttccatgtccctcatctatcagttgcaaaatcctttcttttctactttttaaatatctctcagtttaatatatttctttcaattcctaatatcattaccttggttgatctatt

SEQ ID NO: 46117 - DNA, 1048 bp, Homo sapiens
tctgaatttctataaattagctgttagatctgctgagatgactttcttccatatatgtggttcattggaagttctttgtaattttaattccatgaaagtcttaatgtttccaacatgaaaattctcttacttaaatacgtttgatttctgaaaagcctacaaatggaggggaaatgagattgtgctaatgttgatgtcatcaaggtaaccatctcatatactagtgtcaaaaggtttatgtaaacttgaattttatctgaactaaattgtatcttaaaattcatacaattatttattagacagtggaatgcaaatgtttctatgaacgtaaacacattcatagagatttcttggcgaaaatatcttgagaatagaatgtaacgatataacattttgctgatttgtgcaagattggggaaaaatttcttctagattgatgaggtcaatgtgattcagttgtgttgctgtctgagccacagccaattgtgtgtgctctattaatatgttaccattatttttgattcctggcttggtcaagaacaacctgatttttttttttttaatcttgcagaaaagttgattgcaaagtgtggtagaaaaagaaataatggtagcagtagagaatttataaataagagtttatctttatgaatgagttaattgttctacaattttgatcagtggtatttaagcctgtatatgctaagtgtatttatgcccctttgagccaaaatttttttttttttttcagaatccataagagtttatttgttggcttcacttgggtttagatgcaaattttactgcatcacaccctgatcagctgggtatttgcttagtgtattcatcaaatcttcagtgccagtttccttgagaagcagctttcatgcttattccttaaaaacaacagaagagtgtttatcctgagattggtattgcactattttattttattctgcaaatctgtatcctgaagtgtacatttcaacccatattcttctctgttcactgaaattaagttgaatttgaatggctgaaagacaaaata

SEQ ID NO: 46118 - DNA, 1047 bp, Homo sapiens
cctcctccccctgaggctccacagactccgtcgtccttggcgtcggcggctgcttcgggggggcttttgaagcggagagaccggagaatcctttccgggagctgcccggatccgaagtgtcaggcgcgtctatttttcccggcctccggttctgtcagcatcgagtgtaccgagtgcggccagcggcacgagcagcaacagctgctgggggttgaggaggtgaccgacccggacgtagtgctacacaacctgctgcggaacgcgctgctcggggttacgggggcacccaagaagaacacggaactggtaaaggtgatgggcctttccaactatcactgcaaattgttgtcgcccatattagctcgctatggaatggacaaacagacaggccgggccaagcttctccgggacatgaaccagggcgaactgttcgattgcgccttactgggtgaccgcgccttcctcatagaaccagagcatgttaacactgtgggctatggcaaggaccgctccggaagcctcctgtatttgcatgacactctggaggacattaagcgggccaataaaagccaggaatgtctcattccagtgcatgtggacggggatggacactgcttggtgcatgctgtgtctcgggctctagtaggccgagagctcttctggcatgccttaagagagaatcttaaacagcactttcagcagcacctggcccgatatcaagctctgttccatgacttcattgatgctgctgagtgggaggacattatcaatgagtgtgaccctctgtttgtaccacctgagggtgttcccttgggcctgaggaatatccacatatttggtcttgccaatgtgctacatcgtcctattattctgttagattccctcagtggcatgagaagctctggtgattattcagccacctttctacctgggctcatccctgcagagaagtgcactgggaaagatggtcatttgaacaaaccaatctgtattgcatggagcagctccggtagaaaccattatatccccttggtaggcataaaaggg

SEQ ID NO: 46119 - DNA, 1023 bp, Homo sapiens
aagctcatttgtggaaatactaggtactaatgagacaaacatactcagttacagaggtttgggtttgtcagtactgactatcaaaaaagcagaaacaggtaatagaataatagtacttttttattaaaaagtggtttgggagtctgaaaggtaggttgcaagtacagttcctaaaggaatgagattctcttcttggaccattcctacatataagatgcccaacaaaatgcaaataaaaatgggaattcgaaatgtaatatttaatttccaggtgcaagaaagcctttgaggtgaaggtgtatgaaagtcatcataacagatgttttccaaaaacttgtagaaggttgtgaaaaaactactaggatcacgcggcatgtattgaggtacctaaatttaattaatgttagttatgtgatgtattcttgacagataggtttaatagctggcacaatgatgacttaaattactttttgccgtttacccagctgaggttgtctttgaagaaataattttaagactgagatgccagtactgtacattgattaattactgacatgtatgtaaggcaataatttaattaagggtgaatattctttgtttttagcatataggttgctgtagatgaatgttcttagctgtcatgtttaaaaatacttctgcttcgttacctcaagtaagtgatttgtcaagcaactatgtctgctgacagttcagaaagtatctgataaacttaagggtgggggcagattcttgttgaagttgcttttgcatgtgtggtattctcaacattagttttttgaggggcacttgtgaatattgaggttatatgagaactttgagtatggaatgattttcactgtggtttctgactttgttttggaggtgtggcatgcagcattttggaaggaaaattgaagacgtgttcaagaaaacatgaacagaagcaaatgatgaaaatgagcattttacttgatgttgataacatcacaataaattatggagaaaaatacatatttggctaac

SEQ ID NO: 46120 - DNA, 1049 bp, Homo sapiens
agaacagaagtagtaatcaaaagtagagaattttcctttttggggtagctttacaagaattgcatctcttctgagtattggtggggttttgtcatttcttttgccttatactttttatcatttctaaaatctaaggccttcacccgctaacctaagtttgacttctgattgttggaggatgcttgtgattatttcagaaaaaagcatagtattctttaaaattatttgtcaaattatcctaagtaataaacaaggaataacagattttaatataatataatattagaatcaatctctaattacaggtttgtataattttactcaccttctaaaacagaacaattgtatcaaattttacgttgtcattctcttgtgaaagttctagtaagtaatgaaatggtcaaaaagacatggggaagactaataaaatcacaagggaaaacttcagattggggtggtttgagaagtatgaataaaactaaactcattggagttacatggatggattggggctgatcttgtgtgtttgaaatagttttcaatttatgacatcatgtgatgtgtgtttttttttccagctgtaaaactaccatagaagctatccatggattgatgtctcaggttattaaggataaactgtttaatcaaattaacatctcttaaacagtctctgagaagtactttacctgaaagacagtatgagaaaaatattcaagtaacactttaaaaccagttacccaaaatctgattagaagtataaggtgctctgaagtgtcctaaatattaatatcctgtaataaagctctttaaaatgaaattgtcctttgatttttttgtgggaagattcgcaatatttttctagtatccattacggttcttgaatatgagagaaaatatatttattagaactttctatttttaagtttagactatctaaattagtcaatttcagcatttcacttgccatactgattgtcagaaccacttttcaatttgtcccttcttttgactgtctgtaagtaaaatataatttaacagttcattatttt

SEQ ID NO: 46121 - DNA, 1079 bp, Homo sapiens
cacagaccagcctcaattctttctgcaccactgctctgtcgagttgattcagtacctgtagtcccacatagttaaaatctgcttagctttgctctctgttgtgtggacaatgaaatggttgactaatataaccctggcagtgtcagaccttgtcatgactgaaatttgtccaaatagatattgtcatcaaatgtgcttctggtccttgctagtgagactgtagttaggatccctgtccaggtctcaaagggcacgagaaactatgaagaggcttggcatccctgttcagagtacagcctcatctgccaaattcttggggtcactagaactgtttgggtccctgctggaagctcttaacacccctgagcaactcacgttggaactgatgaaaataggtctcctaagacctccatctactgctaagtccattctggagtccaggtgctactaggagtcttttgcccctgggactgagatgtttttctgacttgaatgagggagtgaatggatgactgcccatgccgctgtcactgtaataaaggactaagaagacaagatttaagaggaagagataaccgtaggacttacaggtttctttgttttgtttttttaacttgtgatctagtactaagaactaaacgttaaatagaatagcatttatgaacagtatctggaaaggagccttcattaatgatctcaataagaataaatgaaagtaagttatttttctgccccccaaaatccctaaaacatgaatttgtcttccacacattagtgccagaaaagggaatttgtagtaaaatgtttttcatagtagaaagaaacagggattgtaagtcgcccagcattgaagccattgccccaagactgtctagtaggcagctccctttgggcagttgtctgcctcctggaaagcttcctgccaaagctgcccctgagaatctgagatggaggcgtggccgtgtggtctgggtcccctgggctgcgtggcagcagcatctcaggagttgagtcctcttttctaaccttgcgctgctgcattggcttagctacttagctggcatggtcagacaagggga

SEQ ID NO: 46122 - DNA, 1058 bp, Homo sapiens
actgtgataccttatttctcaccatattccatgttcagattatgggtagattccagttgttaaagaggttgtgtgtgttctagttagtaaaggagagagaaaagatcagtaaactttgttcagtgatggcctttgattttcctacctcatcccaggatatgtatgggttgctatttagcttccatcttaaaatgtgggccggatgccatggctcacatctgtaatcccagcactttgggatgtcaaggtgggaggattgtttgaaaccaacctaggcaacatagtgagaccccatctctttgaacaaaaagttaactaggcatggtggtcatgcctctagttcctgctgctcatgaggctgaggcgggattgcctaagcacaggaggttggggctatggtgagccctgatcacaccactgtactccagcctaggcaacaaattgagactctctgtctttaacaacaacaaatagtgcagcactataattggtataacactgtgtagaaagaatttcttgtgtgcattcttacttaattcttccaaaattctctagatttggggataaataccgaaaattaaagtcccaaatatagtcaggcatcatttaatgacaggagtatgttctctgcaatgcattagtaggcaatttcagcattgtgtgaacatcatagcatgtacttacacaaatctagatggcatagcctattgctccttgggtacaacctgcacagcatgttactgtactgtaggcagctgttaatacggtggtgtttgtgtatctaaacatatctaaacaggctgggtgcagtggctcacgcctgtaatctcagcattttgggaggccaaggtgggcagatcacctgatgtcaggagtttgagaccagcctggccaacctggtgaaaccccatctctactaaaaatacaaaaatttggccaggcatggtggccatacctataatcccagcactttgggaggcccaggtgggcggatcatctgaggtcaggagttcaagaccatcctggacaacgtggtgaaaccccttctctactaaaaa

SEQ ID NO: 46123 - DNA, 1096 bp, Homo sapiens
aaatgtatttaatacacctaacctacagaacattatagcttagccttgcctgccttgaacatgcccaggatacttaccttagcctacaggtgggcaaaatcatctaacacaaagcctgttttatgctacagtactgaatatctcatgtaatttattgaatactatactgaaaatgaaaaacaatagttgtatgaatatattgtaaagtcaaaaaatggtaagttgaaccattgtaagttgggaactgtctatatatacattatttatatacatgtacgagataaggaactacatctcttcacttgtcccaacatcaaccatagttcctggcttgtgttaagtactcaatgaataaacattggctgggtggaaggaatgaatgatatattcctggaatgcaatgtataatattaagggatataaactttttaagataaagcaaagacaaaaaaaagtttatcttattagaaacaagatacagtgtcacttatagtcttcaaacattattgcactttgtcataatttgacaaagcattcatgaaacaatctgtagactagtttcaacagacaacacctgtaagcaggcatgaccgtcctaaattgtttactaggtatgaattttacaaacattatttatagtaatggtaatggtggagctggagagtattgcaccttctctgagctgcacaatgagaaccactattctgtgggatgtttcttcactttgttgattgtttcctttgctttgcagaagctttttaacttgatgtgtccatttgtccatttttactttggttacctgtgattgtggggtattctcaagaaatctttgcccagcttaatgtcctagagaatcctcaatgttttcttacggtagtttcatagtttgaggtcttagatgtaagtttttaatccattttgatctgatttttgtatatggcaagataaaggagtctagtttcattcttttgtatatggatatccagttttcccagcactgtttattgaagagactgtcctttctcccaatgtatgttcttggttcctttgtcaaaaatgaattcactagatgtatggattcatttttgggttctct

SEQ ID NO: 46124 - DNA, 1026 bp, Homo sapiens
atctcaagtattgttactcttatacccactgtatataaagtcagctttaaattcattaacagcacatttatgttcttctaaactaagatttgaatgtttttgatatctttatttccaataattgtcatggcccttttgagagactgcaaaagctcttaaaccttgagcaaaaacaaatattttcattgttcaacttccctcctttctggttgcacattactcatgtccacctcagagcatgaattagtttatgccagaatggatcttttctgtattgccttcattttctgtgatttttttcatttttatctatattttgttgaatactttccagtttctatcctcaaaagtatttacaaaatctcttatgtaaatattcatatccttaaaatacaagtgtaacctttatgttaatttttaggaattataatggtttttcatatctaggtgaaaaataaaatgacaaaggaacaatacattaagatgaatagaggtatcaatgacagtaaagaccttcctgaagagtatctatcagccatctataatgaaatagctgggaaaaagatatcaatgaaagaaacaaaagaactaacaatccctacaaaatcaagtaaacagagtaagtatctaaattaattgaattctgattgttcaaggggaaaaatatgggttcctaagagtttttcacttatggtcaggtgtggtggtttgcatttatagtccccagctactcagggaggctgaagcagaaggatcacttgaacccaggagttcgagaccagcatatgcaatatagcaaggttcttgtctctaaaaaagaaaaaactttttaatttaaaagagagtttttcacttgatttagaataaagtaaccttagaaatattgtttagaaccatgttttgatgagaaatattataatagagtttggtgatatgattgtattttttccccacattctgaagaaagataacactgaccagtgattaatggaaaatggtatacattatatgcatgtgtcagtgtgc

SEQ ID NO: 46125 - DNA, 1024 bp, Homo sapiens
attttaaaatacaaataactttaaaggaatttcttaaaactaattctcattcttagttcttttcaaacttaaaaaataggtggattttaacaagctgtttatgttcccttttcacccagaatatttatagttaggctactttttatgtagtgtgtggtgagtcagtgattaaaaaaaaattttaggcatatttagaacacaatttttgtgtatacaataatcatcagtagtaacaactggctttaagtgatttaaacactaaataaggcacagcttaatacaagcacacgaggataaaagtcaagagtagaatgttccataaaagatggcaggagaagaaaagtaggattttgttttatacagcttcagaatcccactatggcagaagtgttctgtgtgaagcagtgcacttattttggggacctcaaagcaaagtattctgtacgcccacgtatgggatccctaacccagatccacaggcaattaactgctacttcagattttctgtcaagacttttctctgcctctgattggcataatgctaaaacattttgccatgcttaaaatttccaggtgattttaatcttcctttacttcttattggcagcagtgtgtagtcttttattttgttattcctggtgtgttttttaagcattcacctgaactttaggtaaaaaagcttctttctttcattttttttttttagtgccatgacttgagtttttaaagttataagatagtagggttttattccattaaatgatacgttaaacacttgaaaactttcatggtaatatttttacatatttgtagggaaagcactcctgcctccctttctgacatgttagaaaaatctgtttgcagaataatctgaagtaaataagtgtatatatcccagttacattttctgaaagttttggttcctctgtacttttgtttttgtttgagacaggattttgctatgttgcctaggctggacttgaattcctggtcttgtgccatcctccttccccagcctcctgaa

SEQ ID NO: 46126 - DNA, 1055 bp, Homo sapiens
cctgggaggccgaggttgcagtgagctaagatcgcgccattgcactccagcctggtcaacaagagcgaaactccatctcaaaaaaaaaaaaaaaaaaagctgaacgtggagaaagcccagctatgaaaacctaaatttgcaaaacaaaattaagattgtttttacatgaagattcattttatgagaatattcacttcagagtttctgtgatgtgattttttcatgggtcttaaattatatatctattccagaagatacagtttatgtacaacttttcaggagaacatatgtgaagacagcatacttaagatatagctgttgttccacatacatacattataggtcctcgataaattattaaaaggttgatttttttagagcccctattatgataggcataatatcttatattacagcaatagacttttgcttattagtgcaatttgataaaccattgatagtagctaaaattttttcttccctctctcttccagtctatattatttattttgtcaatcagaggatcccaaaagtttttgattcacaagtctgacttttcatgaaagttgcactttggccagaggaatacctccagttctatgttctatttattaagcaggcagggccaaacaacttaatggatatttgtcttcacagcctactatgtatttcaaagacaatagtatgcataaagtaaaagaaaaataatgtttttattttattctttaccgcaattacttaccactgggatgcgtgtgcctattagaaactgcacacagcttcttagatcttggaattgaatactgtccccctcattcctgtacttcattgattttcattcagtacttggttttttatcatagcaactaccaaaacccagctttgcggagataattatgtcattgaagggaatgtagtgtgatttatttgaaaccatgagcaatcttttgaggtatccaacagatgtatctccctctgaattttgcctcagaattttttcagggcaccctcatgagtttgctacagcattctggggtactttgatgcagtttttg

SEQ ID NO: 46127 - DNA, 1029 bp, Homo sapiens
atttgttgaaatgttgttttggttgtgatgttgtatggttttgaaatactcatttttatgttgtcagtttttaccttcatattatgtttgatatacaggttatattttaatttttgttaattttatatttaatcctaactcaagactcataattcactagcttgttagaaaggataaattatttttccagaatttcgaaatggctaaaatagtcatattatcctttaatgttaatgttctgtaatagctatcaagattgatttagagcattgttatgagaatgaaacagaattaggccttggtattttaagtgaaaagctttttaatttgggccatatttttggacaggaaaccatttttggtgcctatatgatgtatgatgtcaagttttaagagtttgccatatgtctgttaagataatacaaggcgtttaactaggaagagttgccgtttttagatagtttttccccattatctgtaggaactataaataaaagacagttaaaaaaacttttagaacttttgcttttgtaaaaaaccagaagtctttcatctgatgatgagacatttaagttggcattagaaaattttgtaatactttatgtaaccaattacagatttttttggacactgagattctgcttctgtaggtactgtttaccgacagtaaaatataaattcttagatctagatatcaaaaattatttaagttgagattactatttttgcacagcaaattcaactttgcaaaaatgaatttgaaaggaaaaactttaagaaatttcttgtcaatttgtagatgtcagattctcattacaaaattattataatattctaatttttaaaaattaggtttatttcactccttattgtccctcagggggcgataatgagggtaaaatgagataaatatagatatactttcaaaaatgttatacacactcaaattataaatgagttgagcaccgggcacagtggctcacacctgtaatcccagcactttgggaggccgaggcgggtggatcacct

SEQ ID NO: 46128 - DNA, 1051 bp, Homo sapiens
actctcagtaattgtatatgttttttctatttcttgtgaggccttcctttccaaaattcatgaggtgtctgtggtccaaaggcagacctcatttctaagctgagatcaaagaagcaggtacctcccttgagcagggtatggctctagtggcccttgggctgtgtagccccttatcattcaccatgttgtcaacacaaaccaaagtcaagcttggggtgaatgctgtacactttttatatattctacactgaggaagatcttcacacttgttgatttgttctcactctcccaacccttgccagggaatcttaagctggcatcattcagtaatggctttaattggaaataattaagtagaaagagagtaggagcctagaaccttagttggttttccttctgtgtttattgcagcattcccagttagctgagatgctgctctctcctttcctggcctacttgttatgttaggagacctactaaacaaataatctactttaattagcaggcagtgatcaaatacagtctagatgatcatggctgtggtcagctctattgatagacattggcatggttccccaagctctttgatttgcatcttccctcttacctcatagcaccttgccattctaggctttgaagtcttttagaacccaagtggtaaaacaatcatatctctcaggttggcctattctttgcatgtgttcagtcataggcaataaattaaataggttttcctttgatttcaacctactttctaggattcctcaaagtttatgatccagtgatatgctccttagtttatcagcatcattaaaagtacatctcttgtttattttttttttgtaatttcagtgggatttgtcaaaggagaaagtaaattggtaggctcaattcaccaccttgaaagtagaagtttgcatctatgtttaaaggataattagaggagaaaacatgagacagttaataatactaactgtattaagtgcttcctgtatatctcaaatgattttatgtgcttgtatttattcatttactcttccctcaaacactg

SEQ ID NO: 46129 - DNA, 1034 bp, Homo sapiens
tcaatgtctttaatagttataggactattcaaatgatctatttcatattggaagaattgtggtagcttgtgcttcttgaggaattggtctattcatctcagttctcaggtctttgtatgtagaattgtttgcacctagtccctcttaatgtctgcggtgtttgtagtgataccctgctttattttttctttcctcttgttggagtttcaattttattgatcttatcaaacaatcagctttttaaattgatttttcctatttttctattttcagttttgttgatttctgctcttgtatttattatttttccttttttttctgcttgctttgggtttattctgtgctgcttttcctagtttcttaaggtgggagcttagatttgggacttttttctaatgaagtattaagtgctgtaagtctccctttaagctgtatcccatacaattttagctgtatcccataaaatttgttatatttttatttttattgagttccatgtattttttaaaaatttcccttaagacttcctctgacccatggattatttagaagtgtgttgtttaatttccaagtgtttggaaatattagtttttctccatgattcctatttttatttcattttggtagagaacacactctgggctgctctgcctgtggagtaaccattcttttattccttactttcttaataaacttgctttcactttactcggaaaaaaagaacacactctgtatgatctcagttcttctaactttgttgagatttgttttatggcccaaaatatggactgtcttggtgaatgttccatggacattttaaaataatgtgtgtctgttactgagtggagtattctataaatttataccctgccgattgatggtggtgttcagttctgtatccttagtgattttttttgtctagtagttgtattgttgtaagagggatgtttacttcttcagctaaaatagcagatttgtctgtttctccttttagttctatccatttcaatttcatgttattttgaagctctttg

SEQ ID NO: 46130 - DNA, 1161 bp, Homo sapiens
caaaatctattatattatctgggtttgtgacttgagctactgagctgaaacttctccaggggtgattcttgagctaccaaatgaccaggaagagttttctcagttttctgctcttggccgagactgttggacaggatgattcactcagttccacccagctccgaaatatttccctaaagtatcttctctgaatatagctttattgccccatcgtattcagactatagaaattaaataaatacagtctgttaattcagacctttgccacatgcacaactcagcttcctcttcaccacacttgattttaccgtaggacaacatggtgtctttagatagttgaccagccctcccagttgactggcatttctggccatgtcattcctaaatccttcaattatatcattcaaaccattcatctccttgcctgtgtctcatgggtagcttaatctacttaagagttttttctccattgtttaaatattttagcaccattccacaaaggcccgcggcgggtgttgacgcgatgtgatttctgcccagtgctctgaatgtcaaattgaagaaattcaatgaagcacaggtaaatggtgggagtaactatgactctcttaaggtagccaaatgcctcgtcatctaattagtgacgcgcatgaatggatgaacgagattcccactgtccctacctactatccagcgaaaccacagccaagggaacgggcttggcggaatcagcggggaaagaagaccctgttgagcttgactctagtctggcatggtgaagagacatgagaggtgtagaataagtgggaggcccctggcgcccccccgtacccgcaaaggggcggggcggggtccaccggccttgctgaaataaaagaggatacaaacaaatggaagaacattccatgctcatgagtaggaagaatcaatatcgtgaaaatggccatactgcccaaggtaatttatagattcaatgccatccccatcaagctaccaatgactttcttcacagaattggaaaaaactactttaaagttcatatagaaccaaaaaagagcccgcatcaccaagtcaatcctaagccaaaagaacaaagctggaggcatcacactacctgacttcaaactatactacaagcctacagtaaccaaaacagcatgg

SEQ ID NO: 46131 - DNA, 1069 bp, Homo sapiens
cttgctgaaaggcaaatagtaagtgttagaactggatgctagagtcttgtactccttggagtatataaatatttctatgtgatttttttttttttagacggagtctcgctctgtcgccaggctggagtgctgtgccgtgaactcggctcactgcaacctctgcctcttgggttcaagtgattctcctccctcagcctcccaagtagctgggactacaggcatgcgccaccatgcctagctaatttttgtatttttagtagagatgggatttcaccatgttggccaggctggtctcaatctcttgaccttgtgatctgcccgcctctccctgctcatggtctttctgctgacccacttggggtcacagtgctgagattacagatgtgagccactgtactcggcctcgctatgtgatttttactgaaatattataatacgtatatgctgttgtcatcatttcgatttatttttttcactatttccaaaaagacaatattccaaaggatttaggattccacttccatccactcagccatggtccacaacgtctgttttcagagcactgtgatctttcagcattgcctttgcttgggctcttgccctttgatgtgtacaattatagagttagagctattggtttgtctttacaagggaagtagccttggaaaattccattttgtttttcactgtagaataattgagatacttacttctgcggtaaaagaattaggttggggtgtaatttttaaaattactgtaatttttattgttgtctaaataaccaaatatttgccatccatcttcagccactgaattgggatttggttgaagtgatttacagcagtgccactgaacttaaattgcagcctttgggaatcacttcatctttagatgcaagagatatatgaatgggctttgatttgtttcattcttctaagggcatcaacagcttttatataagtttatgagcagtttttaaaatttttgtactagttttgtaaatgtatacacagatttttctctttaatgttgagattaagcatttaaatacaaatctaagtgttttagg

SEQ ID NO: 46132 - DNA, 1027 bp, Homo sapiens
tagatcatagaatcagagaagtattgaatatatggatggaggagacttaggaaaaagatctttgtaagtaaggaagtcttctaacaagcaagggataggaagtagaaattaactgtgtgttactcattgctacattgttgctcagtagatactgtagtatctataatatactgtgctgttaatagtttagagaagttactatggtgtgctccagtggattatttttagtgggtgcaaaaatattagggctttcatggtttctttagttaatttagttcccatcagcttaaaaaatttaaccatgggaatttcctggaccatattattggaattgggaatactgtaatccttgaagagggaatgatgtaattttgtgtgtgtgtgtgtgtgtgtgtgtgtgtgtgtgtgtgtgtgttgatattttacctctcttttagttgtggtgcctttaggaaaagaaaacatcaagacaaggaattgtggaaaattagaaagcagttaatcagcattctaaagcagagctcatcaatgaagtaactggacatcaagaggagctgtaggatagatttaatgaggagttataagacctagagtttttcttaaaaacaaatgagagcttaactaaaataaacaaatggacaaaaaaacccaacaactgtgatatggtttcataggtggaggtctaacaaggactatttttacagaaaatatttttgagtgtttaaaatatgccaggcattgtactaaacactttatttaatttttaaaattgtaatttgataatttataacagcataaatttatgggtacaaagtgatgttatgatttatgaatacaatgcagactaattaactcaggctaatgaacatatctatcatttcaaatacttaacctttttatggtgaaaacctttgaaatttacttttaacaattgtgaaatgtaccacactctattaactatattcaccatactgtggaatagaaattaaaaacatttctcctccctgaaattttgtacccttttaat

SEQ ID NO: 46133 - DNA, 1061 bp, Homo sapiens
atatatttgaaattactattgggagccagacacggtggctcatgcctgtaatcccagcactttggggggccaaggcaggaggatcacttgaggcaagaagtttgagaccaccttaggcaatatagtgagacactgtctcaacaaaaaaattttaaaattagccagacctggtggtacttacctgtagtcctagctactcagaaagctgaggcaagaggatctcttaaccttttcttaagcccaggagttaaaagctgcagttaactacaattgtgctgctacactccagctggcacaacagagtgagaccctgtattaaaaaaaaaaaaaaagggctgggcacagtggctcaggcctgtaatcccagcactttgggaggccgaggcaggcgggtcacacggtcaagagatcgagaccatcctggccaacatggtgaaaccccgtctctactaaaaatacaaaaattagctgggcatggtggcacagctgtagtcccagctactcgggaggctgaggcaagagaatcacttgaaccctagaggcagaggttgcagtgagccgagatcgggccactacactccagcctcgcaacagagcgagactccgtctcaaaaaaaaaaaagaaaaaattagccgggcatggtagtgcacgcctataatcccagctacttgggaggctgaagcaggagaatctcttgaacctcggaggcagaggttgtaatgagccgagatcgtgccattgcactctagcttgggcaacaagagcgaaactctgtctcagaataaaaaaagagagagagagaatgaatgaatgaatgaatgaatgaaattactattggtgaggaaggtatatggtaaataatatacatgtgtttgttttgttttgcaagatcgtcaagaattagagaccagttgattagatcacacatctatgctttggggtgctgcatgtgttttttgtctgtgattttgtcttttatctaggtagttggtccctgacatacatacctttgtcattttacagacattgtccctaaacactactgttaatattattttcc

SEQ ID NO: 46134 - DNA, 1029 bp, Homo sapiens
tgactcagtgcccattacttagttctaggcactgtccttggaggacaatctatgtttatactgagaataacagtttataccttatgcattcagcaaaacatgataaagaagattacagtggagtcaactttacatatgtattttaagtacataaagtcagttttatgttcctggaagaacagatggttattaaatggttatttcagtagtatgagcagttttgcccaccattgaactcaatgaatacctgccgtagtggagtgatcatgaggtgggtgacatgactttgctgggttttggttcccttgtggctctaatagtgtgaacatgtacctatgggctttttaaatgcagtatggcccctacataaactacttcacttaggactcagccaaagaaatagtaatttgctgccactctggaggaaagactgttgctgttggaggagatagtcagtgcggtgccttcctacagagctttaaggataatttgacctgtctgtgactgttggtactttaggatgctaactttggaacccagctcttaattcataactgactctcctgtattagatacctccctcttttgttacaattgagtggctaaactagctaaaaaatggtcttgtaattgctctaacaatgcgttaggaaaatggatctcccaatcattgctaagctagttgtctctgagaagaaccaaataaaatctcacttcattctattcttcctaacttgagaaatatttccaatcaaaaaacatctcatatggatgttaaatttgctgtaagttgcaaaaatcttagcatatccaacctctgcatggggaggaattgtatgtcggataaaaatgtaagccatcctactttcagtgtaactcattattagatgtatgccatgtatttcatttgatttgccagtgtagatgaaaggaatagttgtggtcaaggattcaaagtccaatgactgaggaaactaacttacgttttccacttacacatcaagaaaatcgttcgtactactttctgca

SEQ ID NO: 46135 - DNA, 1073 bp, Homo sapiens
acaggagtcatggaaacagatagcaaataaccattttccctaactgggaggctaatattgcttctattccacagaaaaatagtaagcacaggcatacctcagagatactgcaggttcagttccagatccgcaccataaagcgaatataaaataaagcaagtgacatgaattttttgtttttccagggtgtataaaagttatacttcactgtactgtagtctattaagcgtacaatggtattacttctttaaaaaattaatacattttaacttaaaaataccttaatgctagaaagtgctataacaagcatatgagcctcgtcaacaagttctaatctctttgctggtgggagggtcttgcctcaatgttgatggctgctgactgatcagggtgggagttgctaaaggctggggtggctataacgatttcttaaagtaagataacagtgaagtttgtcatactgatggactcttactttcatgaaagatttctctgtaccatgcaatgctgtttgatggcattatacccacagtagaactttcaaaattggaatcagtcctctcaaaccctgttcctgccttatcaactaagtttatggaatattctaaatcctttgttgtcatttcaacagtgttcacagcatctttaccaggagttgattccatctcaagaaaccattttctttgtttatccgcaaaaagcaactcctcgtttgttcaagtttgatcatgagattgcagcaattcagtcacatcttggacttcacttctaattccagttctcttgttatttccactgcatctagagttacttcctccactgaagtcaggaatccctccaagtcatccatgagggttagaatcagcttcttccaaattcctgttaatgttgatattttgacctcctcccatggaatcatgaatgttcttcatggcatctagaatggtgattcctttccagaatatttttctttgtactttgcccagatctatcagaagaatcactgcctgtggcagatacacccttacaaagtgtatttcttaagtacaccttgaaacatggctatagcatag

SEQ ID NO: 46136 - DNA, 1034 bp, Homo sapiens
tgctgatatgtgttcaagatgagtgggatgggagaaaatacctctgacccctccagggcagagacaagaaagcgcaaggaatgtcctgaccaacttggacccaggttagattcttgctgagaaaaggaatcagtattgtctgttaaagccacatgagtgcttctttgttattttagcattgattttactgctgattcaaatattgagttggtttttctccttaacagttaaatctctgaatatgtacttgcttacattttgaatatgcaaatcagttacagattgtattctttacaaaaagaggaaagctgtaaacttctgatatcttttgactcttagaatcaatttatttaataatattgagtttgattacacaatattataacaagaagatcctatagtaaaaaggatttgccgttaattttataatgggttttatttttgttgttttatttttaaagacataaaatgttaaacccatgtacttctgagttgagaacaaagattgtggctctttagtgaataaaacaaagaattttaaagcaaatttcatctcatatattatgggtggaagtatgagttgttataatgcccatgtagggtaatttggcagtatcaaaattataaatgcatatcctgtttgaactagccattccacttttaggaattttcctattatatactttaacacatgcaaaatgacgtgtatatgaggttactcaaattgcaaaagattcggaaaaacctaaatgtctgttaaacagctgtggtacatctagaacctggaacacagttcagctaggataaagatgaggatgctctttatgggttaatatgaaaaaaaaatctcttaagaatattgttacagacaaaaagcaaggtttagaaaatgtttttggaatattgccatctgtataaacaaggaagaaaaaagaatgtgtattgttttaggataatcaagaaacaataattgttgctacctgtttcggtggatgagaactgggcaaatagttaccaaaagtagaagagagact

SEQ ID NO: 46137 - DNA, 1055 bp, Homo sapiens
aagcattatttacactgccaaaacagcctataactgtgtcccttatttcttatcaaaccacaagcctttattaaatttgggtcctgtacttttttcatgcaacatgcttgaaagttttgcagaggcaaaactgtgcttttctgtttgattgaggtaaagaacccacaggaaagtttggagttaaatgagtgacagtggacaaaagggaagaaggagtgagtttcttaaggcccatccctgacagagacactcgagtgggaggcagcagcatgagcctgcctggagcccacaaagggctgcctcatggtgacagtgggtgccaacaaaaccgtggaccctctcctgggaaagaggcagctgatcaggaggcatttaaaaaagtgttactttcactttaacataccatgggcttggaaaaagtaaaagggaacctttaattcttcctggtggaatctgtgaagcctgcgtaaagggagtatgctttgagctgctttggaaggatagaccagatttttctgagatagaagggcaattttagtaacctttactggaaagctcttgtgatttagatatatttcttgctctgaaagagttggtagaagaaaaaacatgagaagtccatatagttaaagaacatatgatatgctaatgactctaaaatatctaagtatctgtctatattatacagaagaacttaggataaatataagtttaccctaagttttaagtatagttttatatatatatatatatataaataattaaaacataagttttaagtatagttatacagatttagtaggttggaaattgttatagaattatcctttggtttaccaaagaaaataatttttacttgaaatttcattgctaataccagtaaaatgagatttgatttctcatttcattcattgtaggcagtctttgtgccacttagtacagtataggtttccctcagttgttgcaagattttttctgaaaataagcatgtaaacaattcatacacttacagtttatattccaaagagcaggttactttaaaaattccgtttggt

SEQ ID NO: 46138 - DNA, 1103 bp, Homo sapiens
cttaattctatgcagatctatgcctaatggaaacaataaattcaaatgggcagtattactttttcccttactatcttactatttatgaaatgtatttctcactgcatttaaaaatgtatttaacatataaattatttcatgatattttatcaggttttaaaaatctgatatttagctgtagtatggaattacaatgctaatgggtttacaaattaatattacaaatgactgaaaagttcacactctgcaacttgttaaacatgtcaccttcagagcttatctcatttttaattaataaatatgtggtcatagtgtgtaaagaagaaatctttatagattaaagatttgtcaccttttggaacagtggactctgttttttaacatttgtattatagaaatttagaatagtatagtaaacttccatgtacccttcatacccagcttcagaagttatataaacatttttgccttctttttgaaatggggtctcgccgatgcccaggctggagtgcagtggcacaatctcagctcactgcatcctctgcctcctgggctcaaatgatcctcttgcctcagcctcctgaacagctgggaccacaggcgtgccaccacgctcggctgactttttttttttttttttttttttttttttgagacagggtctcactctgtcaaccaggctggagtgtagtggcacaatcatggctcactgcagaccttggccttccaggttcagatgatcctcccacctcagcctcctgagtagctggagctacaagtgtgtgccaccacacctgcctaatttttgtatttttttgtagagatgggtttcaccatgttgcccaggctggtctcaaactcctgagctcaagtgatccacctgcctctgcctcccaaagtgctgggattacagggcatgagccaccgtgcctggtctttgccatgtttttaaatgatgaaaacgacattactaaaagtttggaaattaggatgaaaatgacctctggtctcacccagtttaactctcatcatcattttttggtcttcttcttcttcttcttcttcttttttttttttttttggaggcagattctctctctgtt

SEQ ID NO: 46139 - DNA, 1050 bp, Homo sapiens
acattatgggtttttttttggtgataatatctatgtagttgcaagtcagtcaaatgttgtgcagtattccattttgtgaacatatacaatttatcagtttttctcttgatctgcatttaggttgtttctaattttttccaatttcaagtattccggcagtgaacatttttgttcatgataccttacatagatatgacagtttctttagagtattacctatgagggtaatatccctagactgggttgtatgtgatttttagcttcattaaatattttcaatttattccaatttacattggagcctgaagtatataggttgacatttggtataagactttgttgttgttgttgttgttaagagatggagtctcattctgttgcccaggctggaatgcagtggcactatcacacctctctgcagcctctaactcctgggatcaggggatccacccacctcagcctcccaaggagctgattctacaggtgtgtactaccatgttcagctaattattttattatattgcccagactggtctgaaactcttggcctcaggcgatcctcctgcctcagcctcccaaagtggcggggttagaagcatgagccactgcactcagtcaatcccccttttttttttttgagacagagtttcactcttgttgcccaggctggatgagtgcaatggcgtgatctcggctcaccgcatcctctgcctcccgggttcaagtgattctcctgcctcagcctcccaagtagctgggattacaggcagaagccaccacgtctggctaattttgtatttttagtagagaagagatttctccatgttggtcgggctggtctcaaactcccaatctcaagtgatatgcccgccttggcttcccaaagtgctgggattataggcatgagccaccacgcctggcccactgttttttttaagacttaatttttaataacatgaggggtatgaaatggtatttcactattcagtttcattatgcgttttctgattactgttgagattacacagtgcacagtggccattctgattc

SEQ ID NO: 46140 - DNA, 1045 bp, Homo sapiens
gtgggaagccctcaacgatgttatgcaaagtcattcttttggaaaaagagcctggaagtaaggggtagaatggatttctatgaggcataactaactagtaggaaaaagccccaaagctgcttggtgtagatcctatgcttgactccaattttctgattattcttggtcatatcgttctttctactgtactataccagtcactgaggacacagatgatgtctcaatttcagtatcttctcctgtcaccaagaaatctagtttagattaacactcaattttgtaacatttcatgaacactatattcagaaaaactggttctatcctatttactccacccatagggaagtagttggtatattgtgtatgggtcagtatttctatatcttacatgaaatttggaagaattctatacaaccaaacctgacccttcaatttcagcaaattgatttctgagaaaacagatgaattttgatttatcttacgtctctaaggatgaaagcaacagaattgcgatcgcccctcagttggtccaattctgtgctgtcttttatcattttccccattataggttgaaagcttcagatgtcacaatttcccagggtcttaggattctaccctggctctggcagcctaccttcattgttttacccaccaaaggaaatggtagaaactcagctctgaggcaaggggttatggcttctactaaggtatccctaagaatagggcatatgctttgtctgagctttaaactatataaatggtgatgcagaatggcagatgcttgaaaggtaggtatagtctcttaatgcctaaggtagactaacacaagaagatagattcttgatgtgtgtagtcatggactccttggctgcaagtgtagaaatgcaactcaaaccagtataagcaaacctggaacttattaccttttgtaagtgggaagtccaaagctacaactggctcagggcaagtctggatggaaggaattaagtgatgtcatcaggaccttctctttttctctactttcttgtgttggcttttttcaatt

SEQ ID NO: 46141 - DNA, 1035 bp, Homo sapiens
ccttcatttgtgaggtgatgaggttagagatgatgaagctttggccagaaagatcagaatggcagaccaagtaaatgggccacccatgtgaaagattctgggggatagctagatcccattttagcctcgataaagaacagacaagattcttaaatgaaaagtataagtgaaaacttgcagttaagatgttattttcagccaggcacgatagctcacgcctgtaatcccagaactttgggaggccaaagtgggcagattacttgagtccaggagttcaagaccagcctgggtgacacggcgaaatcccatctttacaaaaattagctgagtgtggtgatgtgcacctgtagtcccagctacttaggaggatcacctgagccagaggaggttgaggctgcagtgtgccgagattacgccactgtactccagcctgggcgacagagtgtttaaaaaaaaaaaaagatgttatgttctactttctatttattaaattagtagaatgagtgaatgagtgagagactgccctttgttaattagattgtgattgaaagagcattttcaggaactagtctttggtataaattgttactacttttctgaaaaaccactttggctttgtatagcagaagccttaccagttgagcatatcttttgaccaaggaatgcctaggaaataattatataaccagacgaagatttgtgttcaaagatttctgtcatacagtttctgtaaacagtgaaacaatggaaacagcactgtttaacaggaaagaaatggttaggtacatgatgccatattcttaagataggaataacagtaatggtaagggcaaatagctaagtagtaaattattatgtttaaagatatggatagtaaaaacatctgaaagaaataaattaaaaaatattagctaaaatactaagagaagttacttcatgggggtagagatagtggtgaatatttcttcctctcttttatgctttttttctatttttcaaaatttccaaagtaaacataaaaaggaaaatttaaaa

SEQ ID NO: 46142 - DNA, 1935 bp, Homo sapiens
aaagacaaaaagacaaaccagctcagttctgcttttgagatgacacacattgtggtacctgtgtgaatgtgtttgtatcaattcagaaaaggcctgttgtggaagttgaagaaagggaaaagccagtatggggggcagtgtgagcagagatcatggaagcagaaatgaatggaacatgtctagggtgactgagaaaatggtcatagggagagatctttttttttttttttttttttttttttttttgagatggagtctcatgctgttgcccaggctggagtgcagtggcacaatctcagctcactgcaacctccacctcccaggttcaagagattttcctgcctcagcttaccaagtagctgggattacaggcatgcaccaccacacctggctagtttttttatttttgtagagatagggtttcaccgtgtcggtcaggctggtctcaaactcctgacctcaggtgatccgccacctcggcctcccaaagtgctgagatcacaggcacatgccactgcgcccagccaaggagagagaatctgaccagagcaaaatgaatattactaagagctggtatcagtctccattttttcagtctctactttttgataattgaagtttggtcattttgtttatatttcatttctcaccacatctatcaggtagagtatttgatgccttttgccaaggatcatttcagggaatgctctgcgctgtgagttactaggattgatgtaaggataagtctacaacccccttcccttagaatttcatgctctaataggcaagataagaaacgtggaccagtataactaaaatgcaagacagagagtcgagtgatatgcagtatcaagaacgttgtacatagactagagagatggagttctcagagggaagaccagggaaggtcctaaagaagtaggagcggaactttgaaagagaggaaggatgttaataggtagagctaataaaggtatagatccagggtgagcacatgacacagaaagatacagggaaggcttaaagtgtgggaagacagtgcattgacaccatcagaaggtcaagccaacagatgctgtgttaggaagcatgagggttgatatatgggccattttgtgattgttcagtgatacggctgatttgattctttggtgtccatctgaagtaggaaattagcttggataaataaataaggaggatataaatttggccttaaaagttaggcataggggttaaaatttgattgagttcactatatagagctattgaaagagttctgagcagagttttatcaggtaggtagcagtatgtagagtgaattgtattgatgagaaagactgggtagttcaaaggctattgaagagtgaaaagcatgaagacctggactagggtagtagtagcaacagacaccaaaagaagagaggattaacctgaagtagaagaaatagtggaaggaaggaaggagggaaattaacaactaagatgcatattttatttgcaaagcatttattgcttgacattaactggccagtgttacccactcttagagaataggtatgtatattgctcaggcaaggggcattgtcatgtaacagtctgggtgaagaatctttgttagagcaagctgatggggagggtcttggatggcttttaggactggtgaattgacaagtgcaggtagtggtcaccattaacgtgtactgggtttgttggctgtgtccactggtgtgcctaggccagtggttctcacccttccatgccttgataaatggcaaattctgttaaattttgaaagtttgtgttaattttttgctgctgatgtgtattcatgtcgcccaacagagtgtgaaagagaatctaacccagcaggttattcatggcagtgttggagcaaggcaatgattgctcttaagaagcaagaggcttaatctctag

SEQ ID NO: 46143 - DNA, 1023 bp, Homo sapiens
gtctgtttctctagaatattacccatatataaattttcaaatattggcataaagttgttcataatttttttttattgtgacagctctgtatctatgggtgtaatgatgtcatttttcatgtgtgtatgtttttgtttgtttttgcttgattttcttgacgtcacattttaatagtagggactatactgttactcgtcattttacctcaaatataatactcacaggtaacaggctccagtgaacttccagtgaactgaataaccttgactttaattcttctgtttctggccagtcttctctgtgtccattgctaactttccttccccttttccctcccatcccccactgccatgccccccacattttcaattttttccctctcttctatgccagtatgcccttttaatttagtgatcttatgcaatccaagcttttgccttctcttatttacatagctcccaaatttataaccttaacctgacctttcttctaagctttaactgctggcttgacatttctccctgggtatctccttgcttccaccttcagtgcagcacaaccaaagtgaaactccttacttccctccacccaaaccagttctttgtccaaatttcctggtttctattaattggcactgccactcacccaggctcaaaatgtcagtcattctgagactcttctctcttatcttacatgtgctcatctgcaaagctgtacattctactgctacaacctccctatatgtatacatgacctcccttatcatcccttcagccaccacctttattcagaccctcactgctttgtacctggactactgtaacacctccctgtctgattgaatctagttcatctgttacactgaggtgagattaaatttgctaaacacagtaattttgtaccactctttagccccaaattacgtagttctcatagctgctaaaataagaacaaactctttagcttttccaggtcttccataataatgcccaaatatacccatcttggcttgtctttccctta

SEQ ID NO: 46144 - DNA, 1050 bp, Homo sapiens
tgggcacggtggttcacagctgtaatcccagctctttgggtgactgaggcaggtggattgcttgagcccaggagtttgagaccagctgggcaagatggcgagaccttgcccatacaaaaaaataaaaaagtagccctttgtggtggcacacccctgtggtctcagctcctctggaggctaaggttggaggattgcatgagcctagaaggttaaggctgcaccactgcactccagcctgggcgacagaatgaaaccctgtctcaaaaaataaaatactcagtttataatcctgaaaaaaaaaaaagattaatgaggcactattctgcctttagtactttgtagcttcttgtcttactccttaggcaagcacagaaggtataatgtgcctgggacagaaaaatctactatgtgcccagagcttgactcaggttgtcttgtgaaaacctgacagtattactaggaagtaggtaatagcatcccctgtcagccccccaaaacacatacattgactgtttggattgcttggtgatatctcaaattaatcattggcagaagtaggatctaaatcgaaggatgatgataaagattgtgtgccttctgctctatctttaaagctgcctcatgctgccagggagcaagacacagtgaaactcattgtggataattgggtccatgcctcactaatcagaaaactgagttgcaatatattacatttctctgttctattatgatgggagtaatttcattataagtgagtttttatagcaccatctaaaaagaatatacactttaagaaaatctaaaatccaaacttagaaagccagattaatcagggatatttattcactttacattggtgtctctcaattttataaaagaaccaattgtactacagccttccttaaatggacatcttccaaatgtttcgtatgtttaaactatttgagttaccaaaattgaatttgtgtggaattttttagactacgtcagtgtgtaaaatgaactgagtttcaagtgaagtctattcattttgataatggatagaaaatc

SEQ ID NO: 46145 - DNA, 1059 bp, Homo sapiens
cagtttgatgtgataaaggattttttttaaagctgttcaacctattttgcttagaaagatggctcagaattgccaaactgattaaagatagaatgttaaatgatttaatcctttgtaacatactttggatactaaaaaatgtaatgtactaaatactaaatttttatttattaaatttataaggtactattccttttctaattattttgaggaaatataaatgtgttagaattgttaagagttttttttttcttgtcaagttgacacggagatttctaatggataggaaatataagtttttaaaaaaagtttccatgtaatcaggattttaggagtatatatgatccatgatataagaattagtagagatatttcattcatttttttcattttggtttttgactcattaagggagctttgattaataggtcctacaaataaatacataaagcacttttgttttcctgtgttgatcatagtcttagtgtatagaaaaaaaaaaacacaacgtataagcacatttactacagaaaaagccatcatcgtcatctgtggaaaatcaatatatatttttcaaaatttagattgatgatcatgtgttagcagtgttagctaaagcttgggggctgctccaggggtcaagtacaggccagcggagctctggcatcatcagtgactatgagattgactttctcaggcagcttacctagcgccggccctgagcgccctggctgaagatgaaagatacacctgagtaagattttgacaggaaatagtaataaataagtgttgtgttggtctgtatctataacactgctacctttggctaagcccagtagattttgcctgtctatgaaaattgaattttgttggtctatttttatggaaattttagaataaagtaaaccattcaaccatagatctttaaaataatgttgcatttgcacttatttatctaacagaattctaagatgttaaatctattcacaccctggtctcttgattctgtaatagaatttttcaaactgaaggtcacaatcaactagtgtgtcctgaatc

SEQ ID NO: 46146 - DNA, 1066 bp, Homo sapiens
ctctactaaaaatacaaaattagccaggtgtggtggtgtatgcctgtaatcccagctactcgggaggctgaggcaggagaatcgcttgaacccaggaggcagaggttgcagtgagctgagatcatgccattgcactccagcctgggcagcaagagcgaaactctgtctcagaaaaacaaaaacaaaaacaaaaaaaactaggatgattttagtgtccctcttctgtaagaacataaccatttaaaatgttggatttcaagtattccaatttaaacatgatttataaatctcagtaacactgcataggttagaccaataacttctagtaaaacttctgacagtgtgtctgtcttaaatgagtaattataggtcaagggattaaacaaaaggaggtaattcctggtccagctcctccttggtgaggtgttttcctcttagatctggttgctgtacattcacacaggcgataacacagccccatccactatctagccctggccttcatatcccagcttcttggtgtcttgataggacttctctggaagcgcgtacctgtgtgcacgaacatctgaaggaaaggtgtgctctgggcgctctgtccagagttcaccctttcaggtagatgcctctgcagtgggtatgaaaattgactttctaccattttctgtaatttttcgtatttgtttttaatcttgaaataggaacatttattagtaagtcaaatgagctattcactcagagctgtggaaactgcagagtaccatctgtgtagtttgtgatgtgccatatcaactcatatttgagcttttagcaggaaaagtgacataaaattgcgaagtattattattaacacggctgatcctacagtgaatcagggtgaggaaagaatctctgtggtacagactgcttttccatatcggttgtattaacccttctggaacgcgtgcaagcatttggtaattttaccaattggtacccaccaattgatcatcttggttatgtcaagaaagaaatgcctccatgttctgacttggatcagattcatttttacaaattataattttca

SEQ ID NO: 46147 - DNA, 1027 bp, Homo sapiens
agggctatacagatatgttacgtgagcaaactgcattttgcaaggtgaaggaaggcctcagagctgctgtagtgtttgatttgagccttaaagaccggcctagatgagatttcatcagggaaaaggaatcctaaagaggcctatgcataggatgaagacagaaaatattatagtatgtttctatttttcctcattttacatatacctttaataagagctgcatgataatttgagagacttatcaataaagctagtgatctttagtgcacagaatgtggaatatttattttgaatatagggaaagcagccttaaattctttgcttccttttcagttttttccttgagttctgaatcagggagttctatttactattgctgcattatataccatcccaaacttggtggcgttatgctcacaaatgttgtggctcagaatcataaaaggtatgattgacacagcttatctgccccatgatgtctggcacctcagctaggaagacgcaaagccagggctgagtctatgactggggagctggaatcagctgaagccttgctcacctgcatgcctggcctttcctactggctgttggctgggatgtaggctaggttgcaggctagaatatctacaaattggactctccttgtacctgcttggacttcctcacagcatggcggcagaagttcagtggatgaaaattccaaggaagctgtgttccctttatgacttaacctcaaaagttacataggatcacatatgcccttagtcccaagctgcccccccgccctccccctctatcccccatccagattcatcagagaggaagccttgattccagctgtacttcagaggaattcagcagggaggaagcattgattccagctgtacttggaagacacattataagaggagcatgtgggataagagattgcagtcgtgttgggagccaccatctgtctgtcacaggctaatttgtagaaagttgaagcgttactgtcctttcctttaaaataagagaggaaagagga

SEQ ID NO: 46148 - DNA, 1033 bp, Homo sapiens
ctgcttataaaatcagtacatgatttaaatatgaaacaatttcccttgtctttggtattgtagtagcatttgtcagaatatttaatattaacttatcttaaaatttctaattgtactgttaatatgcttaaaaaggaaaagctttcagttattgtcgaaatgtttttagattcctaaataaggaatacggaaattccgtagtagaattgaatgtcgggagtatatgaatttctacaaatttaacctaatattacagcatttctggaaattacagaagcaggttgtagttatggagacaggcattgggggcttgccggtgcttgaggcggttctgctgtcctgcatctgccatcttgtgccagcagcctgttctggatgtagcatagggtgtgcctggcattaagaccagactccagtagctgaccacttactacgcagtgctttgacatcagggtggaatgataaataatgattcaaacttctgaccacttcactttgggtatgaacctttgcacatctttctcctctacctccttttatctttcttcttccctgactttaattttttcttcaagttgaagattaaatataagtggtagtgaaaagaatacaatcaagattacgggggaagtctgttactatcattaaggatttcatgtatgtagatcatgtctgatcatgatctacagtttcccctttaccaaacagatttactctgccaaaaacacttagtgaagaagtcagctgtttgttaagaaagcagttatgttgtgcctgtgttaagatcgcttaacccaagagtggtgaggtattggctgatttgttgttggagttagttgctggacaacattgtggttcagaagactggggctgagcttctattgtagtaggatcgagtattacattccttagcttttatatctgtattttattttttccctgtttaaggatattgttataaaccctacagtgttagatgtcatgaaaatggtgattaaagccatcaaaatggtgttagctgaaaatattaaga

SEQ ID NO: 46149 - DNA, 1058 bp, Homo sapiens
aagggggcggggtttctcctgaccagttagagcagagttgcatgcggggcgggggagtcatggagacgctgagagccagctactcttgtccatccccgagtcacccgctccttgatttctggggttgtgtcacttataggggctccgacccgcagaggctgccgaggcactcgaggtcctgtatgtctttcgtaccgaaatagacgttgtcttagacacgacgaagtctaaagccactttaggatgtggcagtaactcaccgaggccggtttctaaaatggcatatgctgtagtgatcatgtcctggacctcagcgtccggtttacatgctaagggtcacagaagacagaagttacccgtttacctcttatctcggtttcactcagctatgccagaatggggacaatgaaatttgaaagggaaccctgagaatgaaggcatgggagcagtatcacgtcaactgattattggtagtagaaagcatcattgttcataatggcttcactggtttcttgtttaattagagctccagttcccaaagtgtacttgaaacttcggcattggggatgtcattaaaaaaaaaagttgtggtttatggtatgcatttttttttctttttgcaaacaaaatgaagttgggaactaaagcatcactgattgaaacattaagtgtgggtatttaaggagcaaagctaatcaaagaatatttgtctacaggaaaaagtctgagtaaaatgtagtttgccagattactcccacacaaaagattcttaaaaataattttaattttcttaaacactgctgaattgtacagtgtgtgggtacttttctggtttatacaaggtttggagacatctttggttttaactgtttattgcgcgttcagtcaagtgactttctcaactcttgacttttaggaacagaggtctttgattctctgtaaagatcacaggttgctctgcaggaatagcagtcttttaaaaagaaagcagctgctacaaagcatgtgtgtgtgcgcgtgtgtgtgtgtgtatgtgtgtgtgtgttcctgttctttgt

SEQ ID NO: 46150 - DNA, 1046 bp, Homo sapiens
ttcttaatggggctcataataagtttaatatgcacagcatcttagaaaagtttaacctgcaaacacttttaaaacataatgcctacttgatttatatctataaaaagactgacaggtaattatatttggaaaacatttaatgcactaactttaaagaaattgaaaattcaggtggataaatagtcttacaaaagacaatgtgctttatgttatacctatagctttggtcccatctttaattgagaaacatttatctgtataaaacatatttttggataaatatatatatatatatttgtatctctacagaaaggctctaaaaagcatttgaggaaaatatttggttcccttttctataatcatcctttaagattcttatagctacatttggtttattcatcatatttacagtatatatattgttcttttcagtgttcacatcttgttccccatttctcacttgtgtcaccagctgtttgtgccatttttagtgtaaaagttgcagacctattagatctgcagtttaagttgccatgctgctaggaaattgtcctttttctttctagctgttaacctacttcctggaaaaagtagtagctctctgtagcattatggagtttcagtggaaccaaatttttgccattaaaaactggcattatactgaactatacattgagaaatcaatcaaaataaaaatttttactttcacaagttgtatcctggatgtttctgtcattgttggtgtttaggctattttggtatataacctcattaaaatgtaccatatttaaaacacttcatagacattcagaataacccttttcaaaattgtgttctgcaaataaacagatttgttccacagaatattggtgaggactactggggggatagatggtcataaccaaataaatctgggaatcactggattaaactaacctaaaggtgtctctttattatgggaccgttcagtccttaatatgcaaacgtgtttcctggtgcaccaagaatgttggatataatatgcagtgtttcccaccttatttgcc

SEQ ID NO: 46151 - DNA, 1011 bp, Homo sapiens
atccccaaggacttcgctgtcaaatgtgaaaagtttctttatttctacagaaggtatttctcttgaatactatttttaaattcttgtgactttatagttttctgtgctgtcacttttttctgcttttaatagtagttttcttttaatttgctactttcagttcattgtgttaaaaatgttaccaggttttgtgattggttaaatactggtaagtaaatttcacctgagtgaattggattttacattttcttttctgaaggtatctttacatataaagattataacttgcatttatttataaaagagagtaacatggattcttttctttttgcagaaaatggtgtgaatggaacattaacttcaaatgtagcagactctccccggaataaaaaagagaaatcttcataatgaattataaactaattgattaatgtccccaaagaaatctgctttctactatatctttcagcattagagatttttctgttcttgaaaatacagtctgtgctctttgatttttgctattgtacggtttcatgcatttttttaaagggcatttgaggggaggattattgctatgaatgaaaaaaatattttagcttagactaagctacctgccttcaaaatagtttagggaccaccaccatattttattttgtttttatttttgaacatttttctaatgatttggagagaaaactatttacaaaaattccacatatcagtgatacaatttcttgctgtcaccaattttttataatagcagagtggcctgttctaagaaggccatattttttaagttatctttcagggtaacatggaaatactataaagttggatgtcaaactttaatatgttttcagtgttctctaattttttggaatttttgtagactttacacctggaaaaaaagatttgtaaaatcaccggaacaattgtgtgctttattttataggtagtggttattagtattacatccccattttaaaaacaaaaacataataatcgtta

SEQ ID NO: 46152 - DNA, 1050 bp, Homo sapiens
ggaagacttctgactttaattctttcagtactgactgttggttttggccttgcaagagcagaaaatcagaagctggatttcagtactggaaacttcaatgtgttagctgttaggtacgatcaatttaacatttttttcactttatacagctagataatatatattatcagtttctctacattgaatcatctaaaaaaggatgaatatgaggttggggaaaatactcatttgattttatttcatacccgttgctattttacatgtctaaagtgaagtactaaagcatttaacttttaggataaattattaatgcaatgattattaatacaattttctcaactgagtgggaattattactaaatactatgaaagatgatagaatgtattcagtggcattgttttttatacactaactttttatgtcttaatatttcttagaatcgctgttctggcatccatttgcgttactcaggcatttatgatgtggaagttcattaattttcagcttcgaaggtggagggaacattctgcttttcaggcaccagctgtgaagaagaaaccaacagtaactaaaggcagatcttctaaaaaaggaacaggtttgtattcagtaagcaatgaaaaactcatggaagtagaaaacttttaaaaaatttgttgttggatcttatttattagttttaaggtgtcttataaagaaaatactattctgcttttcaacaaaattagaggcaaagtaatcttactgcattccacaattgggtgatcccttgggtgaggaaactcagttactcccctcaaaagctgtccatcacatttctctttaacaagttttccatgcttggttaccttgagctactttagaccaaactttatgggcaggtttaaactaaacctgaggatggtagtttgttttcaagcatcttattcacattttaaaaagctcttcacaacctcttcccatctgcccatttgtcccaagtggaatagctttttttttataacttctgattgcttgattctttgtctttaaagccttcatttaacctc

SEQ ID NO: 46153 - DNA, 1097 bp, Homo sapiens
agagtttctcccatcgccaccatcttttctcggggacctctttctctgcttactccttatgcttcatgcacactgatagtctctagttttgtaatcccagcacatcacttctttttcctggaacacctcttccctcggataaattaatcaagtactttcatttcccttttttctgggagttttttttttttttttaattctcatatatgaaatcctatgtgggattttacttcaaaataataccaggtgaaggaaagtgaagagggatatagatgaaacaagtttgatcgtttattaataatgattgagttacgggtatgtcagaatcttttctgtctgttgtgtatatgtttacatttttccgcatttaaaatttcttttttttttttttaatcccctttgagaaacctggagtgaaagtgtgacagccagtctggtgactagtttatctttgcctactcaaaagccataaaacactatttttatgtgtgctacaaatagttaattcatggactaggcacttgatttcctactgtttcgtgtctgtgttctgtgtatctgtcgttactcatgttgtctgctaggattagaaaacagcaccaaattaaaggccatatgctatggtacttaagttctttttatgctgatttcttttataaagtagattgtttctccagctatattgataaggaataggatgaagaccttttatttttaaacccttgatttagaactgtcttcagataaaattgttaggcccagattccagtagcccttccatgtttagtaagctcctaatgtgaatcatagatattgtggagctgtactgtccaaaatgctaactactagtcacatctacatgaacttaaaaaacaaaaacgaaattgacttttttagccccagtagccacatttcaagtgcttattagctactgtggctagtatgtaccattttgaacagaggagatatggaacatttccatgattgcagaaagttctattggacagcgctactgagagtatcatagtttcttgatgtcttagtagcatggctcagatatttaaagccttcttaaggtatttgtatactcatgaaca

SEQ ID NO: 46154 - DNA, 1076 bp, Homo sapiens
atcttaaaattaaggatgaattacacaattttacctaaaccgcagaagagtactctagtgaattacattagctccttggcaatcagtaatttccattgtgtctgtcaggattccacaggaacgaggaggcccttggtgcttcgatttagggacagattttataatgtttttgccccgatctgttatttgggagagggtcacaaattgacttgatctttgtttttccttctttgtagataacggcaaaagcttctatcatttttgttactcttcagtacaatgtcaccctcccagcaacaggtaggtaatttacgctaagaattttctacgtaaatagaagttcagttgaacaaacttggaaattttcatgaatgctaggtcctgcgttaattaatcgtcagagatctcatccatgatgtgactgaatgttattgtgatgattttataatacaagatctgatgtttttgattgactttaccctgtatatgttttctgtttactatatatttttgtgaatggacttgaaattccataaaataattttgttttgctttctctgctttctgattttttcctaagaaaattataagaaaagatctttttaaaattgtttaaatgtcattgttcattcaagacttctaaaagcacaatggcagatttagtttttctgtaagttacattttggacctgtaatagcaatcaatccttctaagattattttcactttttcctgtgctctacttttaacaattattttgattccagaaaatgtgttagtaagctctaggaattatctggtaatagcatccaaactattaggttttatttcaaaaatcttatttcttaatctatgtaaaaattaggtgtttcttggaagttgattgtaatttaatacagtgatataattaactagcatgggtgagggatggggtattttttggttgaggcagtaaacctgcacagttttttatttagaatgtaagataatatagtataccacatttagttggggttttttgttgttgttgctgttatttatatgtgtgtttttaagagatgacagggtcttgccaaa

SEQ ID NO: 46155 - DNA, 1028 bp, Homo sapiens
aatttataaaatttgaaaatctaaatagacaaaaatactaaatagaggtttttaagtcaattcaaaagtgagtgttaaagtgatacacaaaagtgaagtttgtgcgagttcttcctttttcttaccatatattaaggtgttaggatttcaaagcatgttatctatatataggactttgtagactaggttagttttgctattcgacttttaaaacaattgctgctgaatctcaaagttaacataattatagaattacagtacttgtgctagaataatagagaaattgatttttttttgcagaactgttaagcctgttgtgcagatacattgaggaaatgtcagaggatttatggtgacattgacaaagaaattcagaaagaaagaaatactgtattactagccaaaatgaagaagcaatggagatacactgtaaaagcatggattctggagctgaagggattcatgttcaagttagggctctgcagcttgctaactgggtgacctagggcagctcagaactgaagtttcctcatctgtaaaatggggcttattgggttactctgacaaattaaccaatttgtattatgcctagttcaatacttgacttccaaaaggtgtgcaataagtggtagctattattattctttaaaaactcaccaaaattgggaaatagaaagcatttttatgtgagagaagggcctggaatctctttagttagcatctaaagagattatacatactgaaaaggctaacaaagtagtctgtttggcagtaatgtaagagtttaatttccagggaacttcacattaatcaaaaattgcttgtaaattttggaatcatagttttattacagtaaatatctgtccacataattcaaatcatagtatacaatgaatggcttcatatttgagttaggaaaaattgaatggtcaaaaaatgttagggatgcttgggaagctttctgaaagtgagtatgtggaggaggggtgaagaattaggggttcacaagagaagtatttcttttaagg

SEQ ID NO: 46156 - DNA, 1034 bp, Homo sapiens
tggattcacagccaaattccaccagaggtacaaagaggagctggtaccattccttctgaaactattccaatcaatagaaaaagagggaatcctccctaactcattttataaggccagcatcatcctgataccaaagcctggcagagacacaataaaaacagagaattttagaccaatatccctgatgaacatcgatgcaaaaatccttaataaaatactggaaaactgaatccagcagcacatcaaaaagcttatccaccatgatcaggtcggcttcatccctgggatggaaggctagttcaacatatacaaatcaataaacataatccatcacataaacagaaccaacgacgaaaaccacatgattgtctcaatagatgcagaaaagaccttcaataaaattcaacagcccttcatgctaaaaactctcaataaactaggtattgagagaacatatgtcaaaataataagagctatttatgacaaacccacagccaatatcatactgaatgggcaaaaactggaagcattacctttgaaaaccggcacaagacaaggatgccctctctcaccacttctattcaacatagtgttggaagttctggccaaggcaatcaggcaagagaaagaaataaagggtattcagttagcaaaagaggaagtcaaattgtccctgtttgcagatgacatgattgtatatttagaaaaccccatcatctcagcccagaatctccttaagctgataagcaacttcagcaaagtttcaggatacaaaatttaatgtgcaaaaaacacaagcattcctatacatgagtaacagacagagagccaaatcatgggtgaactcccgttcacaatcactacaaagagaataaaatacctagcaatccaacttacaagggacgtgaaggacctcttcaaggagaactacaaaccactgctcaacaaaataaaagagaacatgaacaaatggaagaacattccatgctcatggataggaagaatcaatatagtgcaattggccatactgccca

SEQ ID NO: 46157 - DNA, 1024 bp, Homo sapiens
tccacaataagtgtaaggaatgccttctgcagaagctattgctgtgggggaaggaagaatatcctctacgagggatacaaagtgccaagatgtggtgctttggtagtcaggtatcaagggatgatgaatctctggtgtcttgggacttctgaagagagagaccaacctctgactgggaacagcgggctggatgcgttagcaatacccaagtttggtaattaattgtaaaatttttctagtggaggataatcgcaactttgcctcttgcactggccctagttcttccacataatctatctgtactatgtgactgttaccagtggcaaatacctgagtcacacggcaccaaatatgttaccagtggaaggtatccgagttaccagcagtgaatccctatggtctgcagcaacctcaattcttacctcctcagaagaaagaattcaactggggggcatgaggcagaaagagagactgaggcaaatttcagagcaggagtggaagttttctgaaaaaggctttagaacaagaaaaaaggaaactgcacttggaagagacccaagcaggcatcttggtcaagtgcggtgtttaaccttgatcctaggactttatatgctcgccccgttcccatgcatcttcccttagggtgggctgccggcatgtgcattgccccccttacccttgggaactgagcctgtgcagtgtgtttaggaagctgcacgcatgtctatctgaggctttcttcccttttccagtggagtgcccccagaaggtcatactctgccattaggtctcttaatgtgcatgcccagggaccctggtgcctgcattcagttaacatttagtgcaacaggtgtggaccatcaggaaatggcctctccctggcattggctgccaatttatcacttttagagagacaatgtgataattgccagaccatcacccgacattcctagtgggtggcgaagagccctctcctgccccggctcatggctaactacctgtatgtgaaaattggctaaataga

SEQ ID NO: 46158 - DNA, 1051 bp, Homo sapiens
tttgacacgtggatggccttattggtatagttgaggctgatagtgtgttaataaaggctaccaagccttcagttgttctcttcaaacagtggttttctgtttagtgaaatagaccaaccttaacaacatcgtagggaaaataatcattcctcatcttagatggagagattccaaactaaatctggtacagaaatctggaaaagagtttgtggggtgagccagctttttggacgtctggaatttgggagaagaggagatattctgatgtatgtattggatagactaaaaagtacaaaattggtgtgagtaaatggctttttgttcagtctgaacacaagataagcatcttccctcgctccacaatcactgcccgactcttcctttgagccttttgggggttgttctttattttgtggtttctatgtaattattttagtggcttctctgagttacccagatgagtaattttaatgtgctgcctggttttggatgtttggttcaaagggactaggaccgaggaagagccggtgatggacagtgtgtggagtacgggtattgtccatgtatctgcctctttatcttgtcacccgcttgttctcacataaaatgagggagaaaatggggaatgtaaaattttcaaagaaaaatctacctgatgactcagttttccctgccccagagagctggttttttcttttcacctctttgcatgcaccagaacctttttgtagctgagagagccacagctgaggcaaatgtgtgagcctctcagtatggccaggtgctgtgactggaatgaatgagagaagcggggaaaggcatggggagcgttctctaatcacagagaaccacatggaagatgcaggcaaccttgtacaacctgttgcctctcaccttcaattaaattttaattgttcctcatcacactttctttcaaaacaaatcttgtaatcagatatcttataaattatttaccagcgcaagtaaaagacgatgtaggatttcagcagaatgaaatgtgctttactattgaaactccccttgtgaatta

SEQ ID NO: 46159 - DNA, 1062 bp, Homo sapiens
tgtaaaggctttgcagtctttataacctgtgttaaaagttctctttggaaataaaaactattactgggacaaaaaggaaaacttggtcatttaaaatctatcttctaaggaagggggaaaatcctggttttaaatagcccatctggccttcgaaagcttttccccagggagctgcactaacttctgccacatagatcgtgcttgatgatggacatagcccatggcaaagaggccagagatggaaagcaaatggacttctgtgaaaatacacgagggacaaacagcatcctgcttgcccagtaagtgctagaaaatgctctaaaacatggcaagtacagacaggccccagcaggttccagcattcttatgttggctgggattctggtttttaatgtgagtccttgttctctgtgaagcagacctttgacctacttgttactccttttttttttttcttaaaaaaaaaaaaaagctttttgaagttataactgggcagtattatccaggttaaatcatacacagaactttgatttaatattttaagtaatgtttaaatcgacataggctgtgttcttaactacgaagaggtagtgaagatgtattaagagaagttttgagggatgggtttgttttaaaactaaaattgcttagcacttacagaactgcatgtcccatataggatcttcaagcaagactgtttcttgtttgttatggttgacaaggccaccactctttctctgtaggaagccaacattgataagaagaaagcaaagcaaaatctttgtgatgcactgtccctgggacactttatgtaatttacttttaaatttactagcctaaaacggagttacaatgaagaagtcctttaaaaatgggatcctttgattccaaatgtatttattaaatgtcttaggtatgattatttctgcccttagtgtgtctatgatttttgtgtagccaaaaattaataccacttaataccaatttgctttcaacattaccgattcagaaaatctaaaaggtagatttggcatgacagattagaaaaccataacctggcac

SEQ ID NO: 46160 - DNA, 1025 bp, Homo sapiens
gtgatgtggttgttaatcggtttgcatgtttccatctaatgcatgggctttctattttctgtcatttctgacaaatagcagaccatacccacatattctccctaccccttcctcacaaactatggctgcatatgggcaaacacagtttaccacaggaatgcaacaagctacagcctatgccacgtacccacagccaggacagccgtacggcatttcctcatatggtgagtaacctgcaactgtagtggtggcgttatcgcatgggcatgcgtgtattaacatgtttgagtggtacttaaagacccaatctttggccaatttagaacgtgttgtcaccttctgtgtctaaattcttagtatgattgtttctaaagagcattataagaactggtagctccttatcttgaggtcagaggtagcgaaaagattatgtggttcgtatgccttcttgctctcatttttctcgatttacatctcaaccctgaatttgccatttgagcactgggctctggaatccaaaatatttttgtgcatatttgtgataaaacgtctgtgaatgaagtcttttggggtacagattcatttcctatttatcagatgcctagctgtgattaggaacgtacaagtagaattcaacaaactcttgctttaaactcgagggtggtaatagtctcaaatttcagcattatcaaccattaggaaaagtgatctatatatcactgcctggagtgtactttgaagaggcaaatcgggaaacatttaaggctcacatggacatttgttccttcccacctggagattatctttatcttggtgtaatttaactcactttttatgggtcaatacctgtaaattaaaaataaatccaacaaaatcccaaagcttaattaaaaaaatttcagaatttcaaaataccttttcttccattaaattgtcattgcaattctaagtagattgaactgaatagaaacacttgaattattggcattttattaagaaaagaataaaaactagtgatcaaggaa

SEQ ID NO: 46161 - DNA, 1038 bp, Homo sapiens
agatcttggatccaaaactagataacattaatagtaagaaaaaataaatttgattaacacattgaaaatgagatatgattattcaattaatgttttctttttcaaaataattggcctcaatgatctcatctatgaaatctaatacctgatttaatacacgatggtttcgctgtatggatacactttgaccacaaaagtgagtatatattttattttttcattttcctagatttgagaattgtggaattttcattgttatattggaggtaatttttaaaactttgttgaggtctgcagttgtatttttcttccttcttttggcttttggactcagcttttacgtcctcctgaatttacaggtaaggcagttgtatcagtagttgattttatcactgtgaattatggaaatatacatttatatgtaaatctaaatagtctagaaaatttataattacataacaacagtattttaatactttagtttttttcatctgctatatctttcaaatgattttagaaaaatcattttccttttttgaattctacaaaaaagtagggtcttgttaagtaactttttccatcgtcaaaaagtttaggccaggcgtagtggctcatgcctgtaatcccagttacttgggaggctgaggcagaagaatcgcttgaacccgggaggcagaagttgcagtgagccaagatcgcaccattgcactccagcctgggcaaaaagaacaaaactccatctcaaaaaaaaaaaaaaaagtttatgtaaagtgcacgatgatttattctttatgcagaaaatatacttttgatgactttgccactgcttattaatattttatcactgcatacctctgaattttaaaaagtattctgaaacattttttcagaattctactctccaggaaacattttttcattgtatacacctcgcatttcaggatgcctttagttctccattgctgtctataatacagaccttcagcatgatacaaggaaatatcaattattgagagtccttcctagaaccatttctga

SEQ ID NO: 46162 - DNA, 1047 bp, Homo sapiens
atgccaaagcctttgcacttctgagccacaatgctgacatagtcctgaacaaggagcaggcaggcctcctttttgcaccttgcacttcacaataagaagaaggaggtggttcttatgaccatcaggagcaaaaggtacactgtctgcctgtccactgtcatttagtgttctctggtgtcagggatgattcgaagtctgagagaaaagaaatgagtttcagccattaatcacaattttaaaatatcagttgtttacctaaatttttaagaagtcttttatttttaatttgtgtgggtacatagtaagtgtatatgtttatcaggtacatgagatgttttgatacaggtgtgcaatgcataataatcatttcaaggagaatggggtatccatactctcaagcatttattctttgtgttacaagcaatcccattatactcctttagttatttttaaatgtttacagaatttttaaatgatttttcttagtgacaacaggcacattactttacctcgccgatcttcagtttatatttcttaacaaaataaaatatgggcacattaagaccaagcttcgcagcactcttacgagattccagggattcaggcatgtgtattgtctggcaccatgtcactgtcaagcaaacttcacactgccctccctgaacttgcctgacatgtgccagtagaaaccctgaaagtggatgctggcaaaaatattacccaaggtaaattcagattgttatccatgccctttaatgggatatcttttagcaaataatcttttgtggttgtgggtttctaatccatgttctaagagttttaattatgaagttagagggtactttgtctaatttctcataatatctcataatatcactttctgtataatcacagatagacatgcattagggaccagtgtcacccaatagtagacacagaatgaacaattccatattcaaggcagatcaagcccttgtttttgagcatggacagcctcaaaaatctcctgctgatagttcctttttaaagcactttttaatgaaagtg

SEQ ID NO: 46163 - DNA, 1061 bp, Homo sapiens
cagactttcagaagacaagctagctctggactgcaacctcattggagtcctgcgccaggtccagccagacaaatcactgaatttgtggcccacagaatgggtgcgagacaataaatgattactgttgttttaaatcactaagttttagaatgattggctatgcagtattggacaacaaatctatcctagaataaaataagactccatgagtttcccccacatgatgtaaataaataaatgggaggagcagggaagaaaagggcttacaatagattgccaagtaatacatgtaaaaggataatggagttagaaaatcaccatttttcaaccatcagagtgataattggattggtaaaatagttgtcagcagctgctaaaattagagggtgggaatctgatgagaagcaggatattacatagtctcaaagtatctgccacaagaggtttattaatgaggaaggggaaaatagtgacttcacctaggaacaacatggcagacaccaccttaactgaataaagttaacctcctctgtaatgggactgtcacagttcataatactcctttcaaaaatgcataatctaaattgaatgaggaggaaacaccagactaagcctaagctgagaggcattctataaaattatgaagtcataagattggaattctttcagattaaactagcctaaagaaacgtggtgactgcatgcaacacatgagtttctgtgcttatgtgccactttgtttgtgggtataacagcttcaaagaattaaccaaactgtcttgtttgcaaatgagcagaaaatataacatggggttggtaactctgggaactctctgggtgaagaacttgttaacactctaacttgtttgcattatatagacgttccttatgggcaatatttatgtaaaccagattatatttattgtaagcagattaatctccaggctatttgtttatcctatcccttttattcgccctgatacatgaaaggatatagctttggtttagttttatcccaccttcctctaccttgtaactttcctaccataatgtataaacag

SEQ ID NO: 46164 - DNA, 1049 bp, Homo sapiens
aagggatcagatgcttccaacagcctgagtgagcttggaagtggattttctcccagatcttacagaaaagaacccatcatgactgataccttgacttcagctttatgagattcacagaacttagtcaagcccctctggattccgtcaagtttctaaaactggtaatttgttatccggtgatataaaactaatatgtcaccatattagaggggcccatgtggcaaggaactaatggtagactcttgccaacagctggctaggaactgaggcccttggtccaacagtcctgtggaaactaaattctgccaaggatcccatgtccctgaaagcagctccttcctagtcacgtgtttggatgagactccacttttgattggcaccttgattgttgccttcagagaagccctaaagcaggggacccatgtgtgttaaattcgtgacccacatgtactgtgaaataatgaatgtgtgctgtgttaagctgttaggttttgagggtaagggggatcttgttatgaagcaacaaataatgaatacagatggaaattccctcgattccttttcactaaacttacaactgatcactgtgaaaatgcagtctgctacagcctggcttgctccttcaccaccaaaggtaccaatgaacttcacaccaaatccaatgggcatttgatatctaataaacgtttgtaattgctgcccattctttctttggcttccaccacactccaatttccttgttttcttcttactcacatcactgttaagaagactcatgaccaccatcctcctgtgggttttggtcatcatgggaaacatactttgtccttgcttttggtaggaaagcagcttcctctgactgtgtagtaagctctccttgctctgccttcagagtggttggcaagcccttccccattagacattttcaggtaggcatcaaataccggtcgctacctcctccaaatacttacgggcatatgccaagctctgtgagtggtgctcttgcagcttccctctcttgcagtacacccatctccactcacccatag

SEQ ID NO: 46165 - DNA, 1049 bp, Homo sapiens
agatacatgcaacaacttgggtaggccctaggagaattatgttgattgaaaaaagccagtttcgaaaggttatataacatcctggatgtaatgaaattatagaaaggatcacagattcctggttgccaggagttactatttgggggccaagaatgggacaggtatgactatgaaggaataacatgggcatatttgtggtgatggaacagttttgcatcttgatggtggaagtttcatgaagctacacaggataaaattacgcacacatgagtgtatataactggtgaaatctgaataagctctgtgaattgtagcaatgtcaatttcctggtttttatattctcctatagtcatgtaaggtgttaacagtggaggtggagaagtgaagggtgtatgggacctccacatataactttttacttttgtgaacctctaatcattttgaaataaagttttatttttaaaagtatgtatactctgtagctgtcacattgtgaataacagaaaaagtgatcaaatcgtagatatattgcagccatcattggctttggatttaagaaattggcaagagtcagtgaaagcattctttgagaattaattggctaaatgaaaattacagtaaagaatataatgtattttagttgtttaaagtggtatgctacatacatcttttatatcagtaaaattcatagtcaacttctatatatataatcatgtatatatgtgattcttaaaaaagggagggaggaggatcagaaacctcttctttattgtgtaatgcaagctaatatctgtaggagaaataatagaattttttttttgatttataaagaacagaagtttatttcttacaattctgaagctgggaagtaccagatcaagataccagtaggttcagtgtctggtgaaggcctcttccttatagatgacaccatctgtgtctcttcacatggcagaagggatggaggggcaaaaataggggtacaaataatatttcttcacatgggagaggagcaaaagagagtaaacccactcccttaagccctttt

SEQ ID NO: 46166 - DNA, 1027 bp, Homo sapiens
tgtgggtcaattaaacatctttcctttataaattacccagtctcgggtatgtctctattagcagcatgagaatggactaatacaaacaactagatataatagatgtaaataaatgactttattcataaatgcattgattcaaaaaccttttattaagaactgattctttcccaaggatggttctagtactagagaaaatagaggtgcagtccctgatgcagcagattttacatgctatgggacaatagatattaacccaataattactcttaaaattgagtgatgggaaagtactttgagaaagaaacctgtttgtgtgaaaaaatataacaaagaaatattctgtgtactggagttggacaaaagctcaggaagactttcctgtagaattgattaagctgagacccaaaagataagccaaaaagatagctggaatgaaagttgggggtttggaaaaggaatagtgtgtctgacatgattctgaagagttaggaaaggccaaattatgtagacccttgcaagaaagctacttaatgattctgagtggtgatgctagaggtgtagtagggtggtatacatgtgaagcataattaaaccttatttagattgttaatctgattacagaattgagaagtcaaatgagtggaagggacttacatgattaaaacaaaacagtgccctctccaagttgagttgaagacaggggattgctggagcccacacatgtacacttggaagaacagactgtgtgcatctcttcctaatgctgcattcagtgacatcacactggtagtttgaaatcaaccataatggaggtatttatggaaacaggcaaatgttacaaatgaaaacttttcttccctggaaagccagttgttaaacattcaccagcacatcactgattgaagaggaaggaagatgattgggtcaggggaagtggaggcggctaaggatggtggggtaatttgatttgcttggtaaatgacctttgcctttcaaacttaagttaatagttccggccatctat

SEQ ID NO: 46167 - DNA, 1033 bp, Homo sapiens
agcaaataaaaatgtaggccacctagttaaatttaattccaatgatatgacaaagtaaattttagtataagtatgtcccaaatattgcatgagacatcgttgtattttaaaaattatttgttgcttctctaaaattctattttaattgggtgtcctatattttctttggcaactctagaaatttgtttacgtgtgcacaggaaacatgtacaagattgcatactgtagcattgtttgtaatacaaaaacaaactaacaaactggaaacaactacacatttggtaactggaaatggtataaataaactgtgggatatttaaaagcaaacatgtctcaaatgttacaccgccttctagatgaatgtcatgaacttgacactgagaggaaaaaagcaagtcacggaagaaatatacatagactgattccacagatgtaacttcaaagttatataaaggaaataattcatttttaaagacttgtttaaatgtgggactacaatgtagctatgcaaggggaagatgaacacgaaattcaagatagctatcacttctggggaaggcaaagcatgagacatggtagggaggagcacatagggtactttgaaggtgtggctactattttttttctcctgggcacatgagtttatattttatctttataattttttaaacatattcaggtgtatgtgtctgtgtgtatacgcatatatttgtattcttctggatgtttgaaacaactttataggaaatgaaacatccaggccaggcgcggtggttcatgcctgtaatcccagcacttggggaggcggaagcgggcggatcatctgaggtcaggagttcgagaccagcctgaccaacatggagaagccctgtctctactaaaaatacaaaattagcctggcgtggtggcgcgtgtctgtaatcccagctactcgggaggctgaggtaggagatttgcttgaacccaggaggcggaggttgtggtgagccgaggtcgtgccattgcactccagcctgggcaacaaacgcaaaac

SEQ ID NO: 46168 - DNA, 1039 bp, Homo sapiens
ttactgtagctctatagtaaatcttaaagtttggtaatgtcagtcttctgattttgatcttctactttagtattgaattgtctgtgtcttttgccccactatgtaaactttaaaatcatttttggccgggtatggtggctcatggctgtaatcccagcactttgggaggccaaggtgggtagatcacctgaggtcaggatttcaagaccagcctggccaacatggtgaaaccccgtctctaccaaaaatacgaaagttagctgggcggggtggcaggcacctgtaatcccagctactcgggaggctgaggcacgagaatcgcttgaacctgggatgcagaggttgcagtgagctgagtttgtatgactgcattctagcctgggcaacagagctagactctgttgtaaaaaataaataaattaaaaaaattaaaaataaataaataaaaataaaatcatattttcaatatccacaaacaaaacttgtacagatttattgggattgcattgaatctatagaacaaattgggtagaactgacattttaacaatattaatattgaggtttcctaccattgacacaaaatatctcttcatttatttagttattttacaatttctttcatcaaagtgttgtggtttttctcatgtagatctcatacatattttgtcacattcatacctaaatatatcaattttagagaatgctaatgacaatgtgttttaatatcaaattcctcatattcattgcttatatatagcaatgtgattgactttgtatattaagcttgcatcctgtccccttactataatagcttatttgtttcagaagatttttcatcaattcttttggattttctacatggattatcatgtcatctctgaacattaacagttttatttctttcttcctaattctatactgtttatttcattttcttgtattttttgcattggctaggacttacagtgtgatattgagaagaagtagtgagaggaacatccttgtcttgtttttatcttatcaggaaaagcccctag

SEQ ID NO: 46169 - DNA, 1091 bp, Homo sapiens
attgtttctctgtaaaagattttgtttctccttcatttatgaaacttagtttggcagaatataaaagtctcaggtggcatttcttctctttaagaatactaaaaatgtttcttctgttctggctggtatgacttctgctgagaaatccaggctttcctttatagggaatatgacccttttctctagttacctttaagattttttcttttgcattgaccttggataatttgatgaatatgtgccttgtggacagtattttgcatcttgtatagtatcttgctggatttcttatatctgcatgtcaagctctctggcaaaattggggaaacctccatgaattatatcctcaaatatgttttccacattgcttactttctcttcttctctttcaggaatgccaataaattgtacatttgatagctttacataatcccatatttctcaagggctttgttcatttttttaaaattcttaaaaaaaattgtctgaccaggttgatttgaaggaccagtcttccagctctgtaattctttcttcttcttcttcttcgtttaatctgttgtgaagccttctgatttgtagtttggaattgtagtagtaacatttttaattccagaagttccgtttggtactttcttaatatagttacattgtctttcaaatcctagattgtttttctgtgttctttgtgttagatttcaactttgtcttggatctcattgagttttcttgccatccatattctgaattctatatctgtcatttcagtcatttcattctggttaggatccatccattgctagggagctagtgctatactttagatgtcattaaacattctggcttttgtattgcctgagttcttgtgctggttccttctcatctgagggagctgatgcttctttttttgcatatgctattgtttggataggactttttaattcttttttctctttagggtatggctgtggtgtatgttgtgtatgattgattggtttcaattctgagtgccttcagagggccaaggctctgcacaggttccttcattgcagatagattcatacaatggcttactcagacattgcttggtg

SEQ ID NO: 46170 - DNA, 1022 bp, Homo sapiens
aaactttttgaggcactagcacataaggaggcgccttattgggattgaggatgaggtgaatgttcttggcaagatttacttcctaactgtactgagtaattgcttagctacctaatgttacaatctgaaggtagtggggttttttggtgggggatgtaattgcatactgtggcaagaaaagatttaaaggaaacatgttgtagttttctttttaatgattggcattgctaattgtgattgagctaaaaattatgaataactgattattggttttcagcttcgaaaggcaaggaggaagcttatctatgaaaaagcaaagcactatcacaaggaatataggcagatgtacagaactgaaattcgaatggcgaggatggcaagaaaagctggcaacttctatgtacctgcagaacccaaattggcgtttgtcatcagaatcagagggtaagttcagttttactgcattcgggtttgaatgggaaaaaaaaaaaaaaccttcacattacttctgggagccctgattctgaaacaccggagtaacaatattttaggggaagctagaacaaggagggtgctgatcactaatggtttagttgcaagccatgttccccaagctcctatcccttctcttaatagaatacagaaattcagtgtgtaacatgagaggattcctatctgtttaggtaggattcgatattcaaaactataatggttagtattaataaaaatttcgatgaaaggcaaatgcatttctggtccgttttcaccacagtatcaatggagtgagcccaaaggttcgaaaggtgttgcagcttcttcgccttcgtcaaatcttcaatggaacctttgtgaagctcaacaaggcttcgattaacatgctgaggattgtagagccatatattgcatgggggtaagtctcttttctcctttgatttctatttgataaattggttatgtagcaacatgaattttagatgttttaacagtggtcaccttatttatgtttgctttttcacttcagg

SEQ ID NO: 46171 - DNA, 1028 bp, Homo sapiens
ccaagcatctgagagagaaagcggacaataaccaggcacccccgggctccatcgctcaggactgcaagaaatcaaactcggccgtctagcagctcccagaacccgcggctgccaccgcatccttataaacctgtcagcacgcatgagggtgtctgtgttcagggaaatgaatgactaataccattatttgagtcttatgtgaagacaacactattctaacacgagagataatatacatggtactgtttattcaactggggaaaaataaaactttgagcatttcccttggaactcgagatcagatcataactcatttgcctagaggcagcagaaatctgatcctgctactggagcttaaaataacaagtaaagaaaagtgttagaaacaaagctaaaattttaacatgattaataatagagaagttgggtttggttctgttgttatgattgttttgtcgtggtgcttgtgttcagttatattctctctctctctcatttcaaatactgcttgacaattcgaaaatgaaccaatgatgtgctgtggaatgtgatggttgtcttcatatagagtcacatggtttctctttttatgcagatatttataatcttcatcctatatcagtaggaataactataaggtgcactacaaaaagatgtatgcaaacaaacatgttttaaatcaggtcagatatctgatgaaaaatacgaactaatgttaagagcaagtagtttcaacatactccaggaactgagaaacaaaacaaagcaattgtgggttttgagctccatatactcttagcaagtaagggggcgtcttgcccctatatatcatcttcccggattccactccctgttgtgggaatcgcgcccacccccatccgtgtgttgtagccactcacggtttgcatcaagagtgttttttgtaactgcctctggacttgggacagtgagtaggatcaaaaataaataatgtacatgacggggaagggaaaaacctgttggagttgcttccagccagccacgctccg

SEQ ID NO: 46172 - DNA, 1082 bp, Homo sapiens
agaaatttgggacggagcaaaggtctgttctagctccgtctttgctgtcctcccaccactaggatggccaccaaatgtcccaagaaaaacgtcaggctcactgcatccctcacccactgagagaaactgcctttaccatcttttatgctggggcctctatttcaataaaaccaatattcagaattaaacagaacttcaaagcttatcttgtttgaccatcaccccctctccccagccctcccacatgcaatccaggaatatgctaagtgcagcaaaaatgatgaaataaccgtaatgtaaggttttatcaattgcttactcaaaccaaaatgaaattcctaagtagagctgtctgtgcccatgttcagcaggaatgcttcacatttttgttggagtcgaatatcaaaggaccaagaaatctcaaacagaccttccaagtggtgaggggtgaggggtggaggcagaactcagccatgattgccctacagacccaggctcctctcgggcgagaggtgcttccctcaggtccctctggttcaggatgtgccaccaccaaggttttaggcaaaaccccaattgtggagtcctcccagataaggtttcccaggcatctcctttgcagaccccagactggcctgaagagggcaaaacacttgtttcagacctcgaagatgagagaagattgagatctcagatgactgacatctcaaaaagacagtaactattatccatattccttggaggtaaattatggggcaggaacatttctctcggacaagatagatacaacccagtcctgcttcctaggactttttatccctttgcattttggccgcagagcccaagggtggggttgaggggtgtgttagaggcggagagaaatatggagtgctacctgctgagaggaaagccaaccagggcaagatgctggctctgagaacagacagaacagaataagacccctgtctgcgagcacctgtcttcctgggggaacttcagatggaagtggatgggtcatcagctgaggaatattttttgaggatgttctgtggacacactgtggagatttcaaagagggaagg

SEQ ID NO: 46173 - DNA, 1047 bp, Homo sapiens
aatatttattattatgggactgattaaatcaattatggcacagccatatgatgcaatgccatgcagctattaaaaagaatgagatcgagctgtttatggtgtcttgaaaagatgtccaagatgtattattattatgtgggaaaaaaaagttgcagaagagttagcatagtgattccatttgaggaaaaaaccaaaagtccatatatgtgtatataagaatataataattggctggttgcggtggctcatgcctgtaatcccagcactttgggaggccgaggcgggcagatcacgaggtcaggagttcgagaccagcctggccaatacggtgaaaccctgtctctactgaaaatacaaaaattagccggacgtggcagcacatgcctctgtgtagtcccagctacttgggaggctgaggcagaagaattgcttgaacccgggacgcggaggttgcagtgagccgagatcttgccactgcactccagcctgggtgacagagcaagactgtgtctcaaaaacacaaacaaacagaaaagaatataacaaataagatgcacaccacacttgactgttcatagtagttattctgtgacatgagattggagttgattgaagggtgagacagtatgggggactttcctttaacatttaaatagtcttaaacactttacaatgagagttattaattttaaaattaaaaataggcacaatggctcacgtctgtaatctcagcactttgggaggccaagacaggaggatcacttgaggcaaggagttcgagactagcctgggcaacacagtgagacccagtctttaaaaaaaattaaattaaattaaattaaaaatgtaaaatactgtttttccaaaagcacagttttaattttgttcttgttttaccttgcatttagatataattaaacattcacagaatgtagtagaaatagtacagagaggtcccacgtactctgcacacagtctcttccagtggttacatctcactgacctgtaggacagtaccaaaacctggagatccatattagtagaaca

SEQ ID NO: 46174 - DNA, 1035 bp, Homo sapiens
atcacctttacccactgtttaaaaagaaactaaggttcagagaagctgagtcacttgcccaagtcacagagcctgtacattttgagagacctaaatccagggcttctcgcttcagatggatcagtcaggcccctcccactgcttgtgctgccttttgtttacccttatataaaaacaaaaatatatctgcacatttaaaagccacatcaattagaaactcactcataaatctgctcagcggtttcccatatttcctgggtcacagtgttgtttgtcaaacaacctcgctctaattcgaggtttaatctgattctccccaggtgccctctgtctggatatttttttgtgagttcttatccagtagcagccacttgttaatctgcttttcacccttgtttttctcacccatattcttttcctttctcgaactgaccgtggatagaatccacgcagcagcattaacccccaacctgtcttctttagagacaacaagaagtggttgtgattcagtgacctctcttttgccgaataggcctcctaccacatctgtcccgtctccttactcagtccttctactcagtctccatccagacacactttctttttttttttttaaatatatatatatattttattatactttaagttctagggtacaggtgcacaacgtgcagctttgttacatatgtatacatatgccatgttggtgtgctgcacccattaactcgtcctttacattaggtatatctcctaatgctatccctccccactcccccaaccccacaacaggccctggtgtgtgatgttccccttcctgtgtccaagtgttctcattgttcaattcccacctatgagtgagaacatgcggtgtttgattttttgtccttgtgatagtttgctgagaatgacagtttctagcttcatctatgtccctacaaaggacatgaactcatccttttttatggctgcatagtattccatggtgtatgtgtgccacattttcttaatccagtctatcattgttggacatttggg

SEQ ID NO: 46175 - DNA, 1024 bp, Homo sapiens
aacctttgtacgtaatttgaactaacctctagtgtgctcacatctgagtttgtgattgccatggagtgccgagtgattgatttatcagggttttacagtgagctagtggcagaactgggaatcacaggctggtcatttcttctagggaaaagcaggagccataaacaggaaaatgggacccttttatgtaacttgggtattggtaagcaaggctgatatccaccttacaaactaagatatttttgttatactttttaaatatccttttattgtaagtaataggtgaatctgatagaacattatttaaccctcactatatagtaaatcgtatcatagaaagccattcattagccgagttctactctgcaagatttccagggcttcatttctattccagaaagaatgttttaaagactaagaatttccagatccaccaagctgacctctattccattatgtagtcacttgcgatagaaataatatattcagaagtaacctttgtcttttaacctttcaaggatgttacgttaacttgaactagattccaatcctctgtagcaattctagaagcagcctcagaacactgtcttcttccatactgccatactcataaatatcaaatttttgacattgtttttatatcatatcattatgttggcttctgaaatcttatcatttattagcaatatccaaggggacctactgataggaacacagggacttgatgacctcatggtcattgtcatccctgtgtttgtatgaaatgtagctttttaaatagttgttgacactaaaagtgaacactaattgcatcttaatgtgagactaactccggatatgactatatttttctttgcctcgtgaaaatgctcccttcctgacgctgtggctgaaacaaaatccttagcatttaaaagaaaagaactagcaagagcagtgactctgtaaacaccacttcagtcaaagtctgataccaaatatagcactatgttagatgcatgtaggcatggcctcagcaagtccc

SEQ ID NO: 46176 - DNA, 1066 bp, Homo sapiens
cccaattgcaaggcagagatgattctacttaacttttaaatttacaaatagatttgaagagcttctaaatatcaattgtgtaaatccattgataaggcttggcaccaaaatctcatctttaattgtagtttctataatccccacatgtcgtgggagggaccaggtggaaataactgaatcctgggggcagtttcccccatcctgttctcatgatgtgagtgagttctcaggagatctaatggatttattaggggcttcccccttcactgggcactcattcttctccttgctgctgctatgtgaagaaggatgtgtttgcttccccttccgccgtgattgaagtttcctgaggcctccccagtcatgctgaactgtgagccagttaaacctgtttcctttataaattacccagtcttgagtgtgtctttattagcagtgtgagaatggactaatacatccatatatgtatattttgaaattagttcttgtaaaaatacatagtttatagttagtgtgttacatctgaattgtactatttgtacaaatttgactatttgtccaaatattattaattttttactgtaaagaaatatactttctggccaggcgcggtggctcacgcctgtaatcccagcactttgggaggcagaggtgggcggatcacatgagattgggagttcgagaccagcctgaccaacatggagaaaccccatctctacttaaaaaaatacaaaattagctgggtgtggtggcacatgcctgtaatcccagctatttgggaggctgaggcaagagaatcgcttgaacccaggaggtggaggttgccatgagccgagatcacgccattgctctccagcctgggcaacaagagcgaaactcagtctcaaaaaaaaagaaaaagaaaaagaaatatactttccaattaaagatttatgcatatttttacatcaaaatgctgtatggaactagttgtagaggcctttattgttctaatgctttgcttactacctgagaattttgtgaaatttaaaaaataagcatttctaacagttttatgccaacagaa

SEQ ID NO: 46177 - DNA, 1051 bp, Homo sapiens
aacaaataaagaatctcaagataaattatttaaaaagtcaaatggaaattctggagttgaaaagtacaataaccgaaatgaaaaattcacttgagtaactcaataacagatttgagatggcagaagaacccacacccataaacttcaagatagatcagcgtgtagctttgaaaggaagaagcaaaatgttctttatttccagatgatgtgatcctgtatgtagaaaatcctgagaaatacccaccccccacacacatacacacacacaccctattagaactgataaacaagttcagttacagacaggatataatttatagatgaatatacaaaaatttgttgtatttctatatactggtaaaaaaaaaccaaaaatgaaattaagaccatttcattcacagtagcatcaaaaagaataaaatacttaggaatcagtttaaacacagagatgcaagatttgcacatggaaaactataaaatattgctaaaagaaattaaagatctaaaacaaatgagaggtattcaatgttcatggattagatgaacctttagtgttaagttcgcactttctcttaaattgacctatagatttaatacaatccctgtcaaaatcccagcaggcttttggggatagcagttgacaagctgatcttaaaatgtgtatggaaatgcaaagagaccagaatcgctaaaacagttttgaaaaggaagaacaaaattgaaacatttacactactgaattttaagttttactgtaaaactacagtactctacttagtggcattaaggatagacatgtagatcagtggaacagaattgagagtccagaaatgaacttttatatttatttttgatcaattttcaataaaaatgccaaggaaatttaatcaggaaagaataacattttcaacagagggtactgggaaaataaaacattcatatgaaaaagatgaatttggagccttacctcataccatatgcaaaaattcactcaaaatagataatagacttaaatgtaaaacccaaaactttaaaacttctcaaagaacca

SEQ ID NO: 46178 - DNA, 1351 bp, Homo sapiens
gcccttgaggtaattatggtctaatggagtgtatcagccaggatgcttttggctacaagtaacagaaaacctgactcatattggcttaaataataacgaacctcattatctcacataacaggaagttcaaaggaagggtgagctccagggttggttgataaagcagctcaatgatgtcagcaaggactcaggttattcccatttcttagctctgacatcctccacttcatcctctgactcagaaagatagccacaggagttctctgtgttgtgtgcagtataaccacatccagaaggagagagctgatcttcttgtgtcctgggcaaagacatctgtaccaggaacccctccagctatctttccctcaatttataagcctgggttgggttggtcatgtgcccatttctacaccagttgctggcaggagaagtaatcacttctggtttaaatgcttggggtgaagtagttgttgaggaatcaaccgcaaggactactacataagggatcaagtgtcacatatgcaattttaaattttctagtagccgtattttaaaaagtcaaacagttaaaattaattgtaataatacattttatttaacccaatatatctaaaatatcatctcaacatataatcaacttttaagattattgagatactattctttcatacttgaaatctggtatgtattttattcttataatacatctgatttaaaactattacatttcaggtgctcagtagccacatgggtgttggatgcacaagtctgtaggatgaaatctcaggagactgtgatttggttctttgcctatgtctccaatctcatcttttaccattcaccctgtacttatacccacgctttatgctctagcagtcctgagttaccatatttcatgctcttacatgtgtatctttgcatgtgtgttccctctgcctggcccattctctcattgctcatagggtaattttaattgttctgtcagattcagccaagatgtcactccagtcaataggccttccccaaaccaagagagagttaaaactctgcttcctttgagctctatctgtactttgtacattatcccattgttacacttatcaagctgtctcccaagatctcttcatgttggtctaccccactgggcagtgatctccttgagatacagggcagagtcttgctcacctcagtattctcagtgtttatgctcttgcacttacgaggcacttgatatgtgtttataggatggaattaaattgaatttctaagaaaattagaatgacttaggtttggtaaaattcatttggtaaaattagtgagagaaatagaatgtctggcctagtaagctttt

SEQ ID NO: 46179 - DNA, 1044 bp, Homo sapiens
gcagaaaggagactagtgtggctagagaagagtaagtgaagaggtgagtggtagaagaagccagagatgtgactgggagcctgatttatgtaaggccttgtaggccattgtaaagattctggctactatgaatgaaatgcaaaaccaatgtaggtttttttattttttgtttttttgagacggtgtctcactctgttgccaggctggagtgcagtggcgcaatctcagcttactatgtcttctgcctcccaggttcaaatgattctcctgcctcagcctcccaaggagctgggattacaggtgtgtgccaccacacccagctaatttttgtatttttagtggagatggggtttcaccatgttgaccaggatggtctcaatctcttgacctcgtgatccgcccaccccggccaacgcaggttttgagcaaaaaataaataaataaataaataaaaaccgttttgctgattaagagagcagttgggaggttattacaataatctagactagagacgaggctgttttgaatgttttggagttttttaccaatataattaggtgaagaatgatacctctttggcattttaatttgcatttctttgattatgaatgaggtcaaacatcttctcatatgcataaaatcatttatatttccttttctgtggtctgtaagtgtataacctgtgctagtttttgtgctgattcagtagtctttttcttttttttgagatggagtctcgctttgtcactcaggctggagttccgtggcatgatctcggctcactgcaacttctgtctcttgggatcaagcagttctgcctcagcctcctgagtagctgggattacaggcacccaccaccacgcctggctaatttttgtatttttagtagaaatggggtttcaccatgttgtccagactggtcttgaactcctggcctcaggtgatccagccgcctcggcctcccaaagtgttgggattacaagcatgagccaccgtgcctggcctcagtggtctttttcttactgacttgtcctcagtattttt

SEQ ID NO: 46180 - DNA, 1031 bp, Homo sapiens
taaattttcaagatacgtatttggaaacttgagaatgtagatactgctaattactattgatttagttattctgtcttccttttgaaaaatctttttatttagaaataattagagattcactgaaagttgtaaaaatggcacacagaagcccatgtactctgcactcagtctcccccattggttacattttacagacttgtaggacaatatttcaaaccagtatactgacattggtaaatgtatgtgttgtagttctgtttcattttgtcacatgtagattcatgcaagcactgcagcaaacaagatgcagaactcggccaggcatggtgactcatgcctataatcttagctcttttgaaaggcccaggtgggacagatagcttgagaccaggagtgtgagaccagcctgggcaacatagtgagatcctatctctacaaaaataaaaataaattagccagacatggtggtacatgtgtgttgtcctggctacttgggaggctgaggtgggagggttgcttgataccaggaatttgaggctactacgagccatgatcacaccactgcactccagcctgggcaacagagtgagactgtctccaaaaaaaaaaaaaaaagatgcagaattattctgtcaccacaaagctcttccttatgttgtcccttaactactcttctcttcacctctgctaccctactatctctagcccttggcaaccatgaatgtgttctccatctctatgcttttgtcatttcaagaatattacataaatggaatcatagtatgtgactttttgaatagtattctatgtttttgagtagtgttctgtgtaccacagtttgttgaacccttcacctattgagggatgttttgtttttcttcagtttttagctatacatataaagctgctgtgaatatctatgtatgggttttgtatggacataaatgtttatttctttgggataaatacacaggagtgtgatacctcagttgtgtagtaaatatatgtttagtgttctaggaaactgctac

SEQ ID NO: 46181 - DNA, 1081 bp, Homo sapiens
tttgagctatgtaactgggatatctcttggggagatgtacaggcatagttggatgtagggctttagtgttgttcttcctcattttctatttctctctttctagctcttgtttctttttttctctactttgttttcaaataagccaattcccatttgctatacttcatacactgtatagtctgtagacttgtagtgaagaaggtgaagttttttttttgatagtcattagaaaagtccccacaaacacttggagtaaactgtccatcctggaattaatcattcaaacttggttgggggtagggacatactttactttagccaagcctgggttatatgtccaacctggagaaacaggttagccccatccaaactactccgcagggtacaattattttatggagcggttcctcaaaagcaaagatttttagagaaaattatttccattacagtcagaacatttggttcagttcctagttctgatgcttttagttaagtgatcttgcacaaggctctggacctccattaatttcctcatttgcaaaacagagatagtaatagcaaatgaaggactttcgtgaggtcatcttcattcagcagacatttattgcatgcctactcattgccacatgttgtgtttgagtagagactttgaggaaagacaggcagtctaatagacttaagtttagtagaagaggaaaacgaaagaacagaatgatagatgtgccccgatggtgctatggaaacattaggaaggaactaagcaccccatccagattggggcaccaaagaagccttccaggagggatgaactgaatcttcaaggttaactaggatttagccaggtgaggagggcaaggaaaagtaatacagattttggcaacaaaggctaggaatcctgagaagtttagttcattcatggacttagaaacagttcggtaagtctggaatgagaagagtgaagtctaggcagggccccgatttgaatgtcctgaattgtccatgccacgaggtttggattttattctgaaggtgattgggagtcattgaaggattttaagctgagggataaaataattggata

SEQ ID NO: 46182 - DNA, 1044 bp, Homo sapiens
aatcgtttgtcaattttgtttatcttctcaaacaccaactttttgttctagtgatctcgtataattttttcatttcaaattcatttatttctgctctgatctttattatttcttttcttctactaattttgagtttagtttgctcttatttttctagttctttaaggtgcattgttagattgtttgtttgaaatttttccacttttttgatgtaggtgtgtgtagctataagcctccctctgagtactgcttttgctgtatcccataggctttggtttaccattcgtttcaaggaatttttcaattcccttcttaatttcttcattgaaatggtcattcaggagcatattgtttaattctcatgtgtttgtgtagtttccaaaattcctcttgttattgatttgtagttttattccattgtggtcagtgaagatgcttgatattattttaggttttctttcttttttctttttctctctctctctctttttttttttttaatgttttaagactcgttttgtgacctaacatggtttatccttgagaatgatccatgtgtcgaggagaaaaatgtgtattctgcagccattggatgaaatgtgtaaatatctactagatccattttgtctatagtgcagaataactctgatgtttctttgttgattttctttctgggagatctgtgcaatgctgaaagcggggtgttgaagtctccagctgttattgtattggggtctgtctttctctttaggtctaataatatttgctttatgtatctgagtgctccagtgttggttgcatatatatttacaattattatatcctcttgctgaattgacccctttatcattatataatgaccttttttgtctctccttacagtttttgtcttgaaatctatactactttttctgatatgagtatagctgtgtctgctcttttttggtttccgttgccatggaatatgtttctccatccctctcttttctgtctgtgtgtgtcttcataggtggggtgtgtttagatcattggatcttgtttgtt

SEQ ID NO: 46183 - DNA, 1034 bp, Homo sapiens
atgctattagcaattttcatagtataaaattttcacactatgtttgtatgcttctaatatgttttgcattgtaacagatgaatatgcagcattactgaattatgaaaattacacagtggtggtataaatgctatttgtgttatgcaaaattggctgatttttatcagactttaatattttctcattttaaccaattattctgcttttgctttttgatattaaattggctgtgctgtctgttgcacttgaattcatgcaatggtatgcaaaggccaaaactgattatcgtctcaggttaccttgtattttcttataacgactgactttccaaattgaacaggatgttttataaaatttgtgtgacatgcaatggaataggtaaaatgcaggttttctcaaaactgtcttgacttttgtcttttttgtacttttcccaaaagtaataattactagttttttttttttttttttttttttttgcaagccacttacaatggcttaattgtagaatctactgtcagctgtcttggccctacaattggttgcttagattccttctttttacttaggtcttaccaggtgcttacgtagttttcttataaaatagtttcttaatcataattatcacaatcaagccattgtacaaattattgggcctgttaagagtattagaaatgtaaaagaatattatttttaatattaaactttggcctaggaagtttgtagatgaagttcctaaagccagccattttcattcattttaagtattcttgtggctacaattgaactgtatttattgtgactatagtttaaatgagcaggaagtaatccacttgcatgttttatgcttagattttaaaatatattttggcattttttatgggaagtgaaagaaaaaagtaattaaatgtgtctataaatgagagaaaggaaaaatataggttaaaataatgtggtattagaaaaatattctgaagctataatagtaccttgtatttgcgatatagtttagaaaaccatatcatacatttaca

SEQ ID NO: 46184 - DNA, 1082 bp, Homo sapiens
ataaagaagacctaaataagtggaaagacattttgtgttcatgaattggaagactttacattgccgttaggatggcaatactgtccaaagcaatctccagattcaatgcaatctctatcaaaattccattggccttttttttttttttttgcaaaagttggaaagctgatcctcatattcatatggaattgcaacagatccaaatagccaaaaccatcttgaaaaaggaagaataaagccagaggactcatatttcccaattaagaaacttactgcaaagctacaatgatcaaaatagtgtggtactggcataaggatagatgtatagactaatagaattgagagtccagaattaatatatatgtaggcaattgatttttaacaaacatgccaggatgattcagtggggaaagaataatctcttcaaatggtttggggacccctggagatgcacatgcaaaacaataaagttggacccctacttcatgccatgtataaaaattaactcataatggaccaatggccaaaatacaagaacgaaaacttacaactcaacagcaaaaaaaagctcaactaaaaaatgggcaaaggacttggaatagacagttactctgagaagataaacacatcattaatactcaacatcattagtgatcagggagatgcaaatgaaaaccacagtaagataccacttctcacctactaggatggccagaatcaaaagacgggcagtaactggttttgaggacgatgtggagaaactggaaccctcgtatgttgctggtgggaatgttaaatggttcagcctctgtggaaaaaagagtttgacaattcctcaaaggaacacatagacttgtcatatgacccagcaattccactcctaggtatataccctgaagaattgaaagcaggtactcaaacaaatatatgaccacacatgttcatagcattactatttgcaatagctaaatggtggaaacaacccaaatgtccatcagtggatgaatgagtaaacaaattgcagtagtctgtattccataaattgtctagcagtaaagaaatgaagtacagatacatgctac

SEQ ID NO: 46185 - DNA, 1023 bp, Homo sapiens
gaagtatttgggggaatgaaccactttctcaagcccagattggcttcaaggtcctcctgcttcttgccacaagcaccaggaactctattcttttctcttaaaagttgctgctacttagtagtagttacttttctttccaagactgggtgtggagctctgtaatctgctcatgtctcttgtagccatagaatatagcctacagttaggggataagaaaaatagtaaacataaggaggttaaaaatgtgtaagaaagacttctactttcccctatgctggtataatgggaactggatttattttatatgtagccagcttccaagatggcccccaatgatcccggcatcccgatatttacaccatggtgtaatccccatacacactgtattgaggtttatctgtggaaccaatagaatgtaacagaagtgatggatcatttcttaggataggttatttataatacaaatgtggctccacctccttcccctcactacccccaaccttggattactcactctgagaatagttagctgccatgttgtgaatggcccgatggggaggcccatgctgtgggaaactgaggcctcctgccaacagccaacaaggaactgaggcctctctagccaacagcatgtgaacgagccttcttggaagcagatgtctcagctttagtcaagcttccagtcctaaacatctgtcctgctgacatcttgactgcaacctcatgagagatcctgagccagaactacccatctaagctgttccctgattgccaaccctcagaaactgtgtgaaaaaaagaaatgcttgttttgtttgtttttaaattttttttagctttttttgagttgaagtcttggtctgtcacccaggctagagtgcagtggtacgatctcagctcactgcaacctctgtctcccaggttcaggtgattctcctgcctcagcctcctgagtagctgggactacagacgtgcaccaccgcacctggctaattttttgtatttttagtagagatggggttt

SEQ ID NO: 46186 - DNA, 1021 bp, Homo sapiens
tgggaggggattcttatgctttgaataatccattgagcagggagaatagggttaaaaaaaaaacaagcctaaccaaaataggtatgcaaaatagacaactcacctcagcatatagatgggctaaggaattttcttatgattcagtgctagaatcttccttagaaaacagatctgcatacagttctatgcaccaataaatgaatgattgaggcctcagagttctatatcataaaacagacatgataattgttcttgggaaagatagaaagtatcttttgaatgtgtctctttgtgagaccataaaaataatttcagtgaagtagccaactaaagtccattagttgtatggtccatttgttttctgaggtcagtatcaggcatatacaacttagtttcataaatgatttgctttccacagcggggaggacagatctgtggctggctggaaccattctccttaaagtgttagaaaattgaatggttggttataaactgtaggttgaatatcccttattcgaaatggttgggaccagaagtgttttgggtttcaatttgtttttctcgaatatttgcatatacataatgagctatcttggggatgggagccaagtctaaacatgaaatttatgtatgtttcacatataccttaaacacatattctgagggtaattttatacaaaacttcatttattttttgagacagaatctcactctgtcacttaggctggagtgcagtggtatgatcatggctcattgcagcctcaacttcccgggctcaggtgatcctcccacctcagtgtcccgagtaactgggactacagacaacgtaccaccatgcctagctaatttttgtatattttgttggggggtatagatgggatttcactatgttgcccagattggtctcaaattcctggactcaagcaatctgcccgcctcagcctcccaaagtgctgggattgcaggcatgagccaccacactggacctatacagcattttaaataattttttgcatgaaac

SEQ ID NO: 46187 - DNA, 1151 bp, Homo sapiens
gcttcccaagtagctgagattacaggcatgtgcaaccacacccagctaattttgtatttttagtagagatggggtttctgtgtgttgatgagtctggtcttgaactcctgacctcaggtgatctgcccacctgggcatcccaaagttctgggattacaggcgtgagccaccacgcccagcactacaccagatttttaatggggcaaacaaaatcatagccatcataaaagtaaaatgtaaaattactttgacattcggagactctaccattgtattacagaaaagaagttgttaataatctttagatcaaattagaactatttactgggagcccaggcatggtggcctacgcctgtaatcccagcactttgggaggcagaggtgggcagatcacttgaggtcaggagttcaagactagcttggtcaacatggtgaaacttcgtctctactaaaagtacaaaaattagatgggcgtggtggcttgcagctaattccactggaggctgatgcatgagaatcacttgaaccctggtggcgaaggttgaagtgagctgagatcacgctactctactccagcctgggtgacagtgatggaatgagactctatctccaaaggaaaaaaaaaaaagaactagttactgggaagtctgttgtttgaaatagaagttttgatgccttgtttgttcatttagttctggtagtattcatggccgggaggaggcgggagtcacagtaaggggtacctcattaaattagaaagctctctattctaatcattatcccttaaaaaaaaaaaagtgagattctgctgattgtagttgtattaataaagtactctctaattttaaatttctattgtatttgttgggatggtaatgataattcagagctgctagtatttctaaactaaccttaatgcttccctgaagagttatttgaaattaaaaacaaaaagtctgtattcttcaatgtagtttttgaagcaagtaaacaaaaaccatcccctgtgatttttgtatacataagagtattgcctttggggttttttatgtgtgtgggtttttttttttttttaatgttaacctgataataaattagaactagcaaaaactaattgaactatgaccttctccccgtatcttctatccagt

SEQ ID NO: 46188 - DNA, 1050 bp, Homo sapiens
gttttagagacttttagctaatttttgatgaagacgttttcagtattttagaaatagggaaaatgtttattttagagggaaggggacagtgtctctttgattagaagccattttgttgctaagagtggtgctgaaagtacaattgccttgattgtaaagctttaaaagtactgaggcaaaagagtaattaccttcctcttcatcctcattcccccctcctattcatgcctccttaccacggacccttttctgttgctcaaaattcattctttgcagagatccagaacctatgttcgtgatgtcctcatcttgtctttttttcctggtctgattttccatcctctttcatgggtgatgttcaagctttccaaagtctttgaataacagtttttattgccttaaattgacaagcgtcttggacacctgacaagaaggttaacagtgaaccctattcactgaagccttgggggtcaaggggaaggaagatagaggattagactagtaggctaaaagaacatagagtataaagggaagagaatgattaccatccaagacaatccaagtttagtttcgttgtgtccaataattttgtctttgcactatagctgcatggtactcgttattacagagtatcagggaacacttatggatgcttgctgtgtatgagaggactaaaaagggagaattgaatggaaagctatgctaagattccaatctccagtcatttttgtcaaataccgtttatggtagactacctatattgtatgttatacataaatatctgatttagtttccattacaacaataaactgattgcttgtatgttcagtttatgtagttacacattaagtactgttgtctgcattaaatactatcttataataattgtaatcagagaacatattttcctcatactgtccctggaaaaaccttggtatccatattgtagattggcttttataattatattctgttttttactgctcgtttatatacactgtgttttgacctagcttgacaccatgttaggttatagactttctaactacc

SEQ ID NO: 46189 - DNA, 1112 bp, Homo sapiens
gaacaaacatcttctctccagaagattgtcatcacttttgttgctttctggctggccagcatcatttctgactgtaaatgtgtggagacaacaggatctcagtctgttttcatcatcagcctatttgtctaccttcaactaagttcaatgatggtatgggaaggaagaatatttcacaccaattcaaaagcttttgactagggagatattgggggaaggcttactctgggagcttacagatttttcaccagaggaaaataatatttctgtaagcatgaaaccaagtcaaaaatgtgttctctaaactctttccttaatatttaattctaaatcaaatatcaaacttaaacattatgttgaatttcttctttaatatttctgtaagttacagcatttgtaataaattctccctattgtcctatttcaaattcattttatcctccttccctgattttatttgtctgttcttctaacattggtgttatccaggttctttattcagcactgtgttactcttctcactcttctttcaccttcagtcaccttaagcagctaactcccagatctacagctctgggaacacttctttttttaaggcttaatttcacacccttgttgaaatacttgagtacctccagacatctcaaatttaacacaactaaacttgatctttccaataacaaagaacattttgtttttctttatcctgggttactgtccacctgtctatttttgtgctcagtttttctcttttccacactcctccctcctacatttgaaaggtagcccattcttttcttaatgtcagtgctgtagtctggttttttgtttgtttgtttttgttttgttttttttgagacagcgtctcgctttgtcacccaggttggagtgcagtggtgcaatcttggctcactgcaactgctgccacctgggctcaagtgatcctaccatatcagcctccgaagcagctgggactacaggtgcatgccaccacacccagctaattttttttttttttttttttttttttttttttgcagttgcaagatttaatagagtgaaaacagagctcccatacaaagggaggggacccaaagggggttgctgttgcc

SEQ ID NO: 46190 - DNA, 1035 bp, Homo sapiens
atcttacaattgatggcgtgtcttagattcagaggagagtagtatatttgtggttaattttcccatacctcaccaattttgggacagacaagggtaatatttggctatgaaccactggaacctaatttctcatgtcctcttctcccttttcccccatggtttctgggtgtttctgctgctttacttacagtacttaacattctgcagttattttccattttgtagttatctcaatctgtagctgccattttccctaccacttgggaaagcaggccagtatggccatgatggttttataagccagtggtgtcatacctttagcaagtgttctgtcctaaatactagtgtttcttaacaaatttgttaatactttgtcttcatttataggtgaatgcagcctcatgtgattatagctttctggattgtgtgacctctaaaaggtcatactagttcttcatatttacaaacaaaatgtgaattttcatttatctttacatgcagctctttaaatcattttctttcagctcttccatgtctacatttgggaaacttagaactagttttttagaatcacgacttcaggatttttcctgccctgtctaatgaactgttgttctgggaagaatgcaactaagggtgaattctgtttttgtgaatctgcagaacagatactacacattgcttgacctttcactgtttgtatctttttaaaaaatgttttatttgtgaatgtagtatgtactcatttaaccccccaaatgctggcccttctctctcactatttcaggggatgtgaatatgcaaggcagtttattgcctagtagctaagaaggctgggggctggcatgaattgtctttttttaatgtaataattccaccccctcagtaaaaaagcatggtccagtgaatgtcttagattgtgacttagtgatattgatgaggaagtagatgacagtcccttctgggatggaggggaggatggagcagtggtcctgtattatctatcagtgcgtaacaaacccttaaacttagcga

SEQ ID NO: 46191 - DNA, 1029 bp, Homo sapiens
tataaacaacagaaatttaatccttacagttctggaggctgggaagtccaagatccagggtgccagcagattcagtagtccagaatggcaccttctgactgtatcttcacatggcagcaaggcaaattagctctctgccttcttataggcactaatcccattcaccagttttccacccttatgatctagttacctcgcaaaggctccacctcttaattccaatactttgggaattagatttcagcatatgaattttggagggacataaatgttcagaccatagaatatcccttacagcacctaacttacagtcttaaagtttgcattttgcttacattttgaagaaatacatgacatgacataccctagtatactaatacatagtttacatagttctttcgtgagatttgtagttcaatttgttggtcaagtcaaacttcccaccttttgaaggtggcgttatcagtcattttattcagcgtatctaatactttgtgctagaccctggctgtagatttttcaccacatgctttatgacatttatgtaactcttaatttatatatatcagaatctttgaaggtagctaagcctgctgaaacctggaaggtaaaaaaatttgaattgtatttttacaagaaaaaaaatttattcttccaaagtaaaataaaaatggttggcttaaatgaaacattaactctgtcaggcttagtgctaattactgcttttcatctatggcatgaaatgcagggatcaatgagagaaagatacagaactgtattttatttcattctgagtcaaggttttcagaaaacaaatatttcatttggagtgttcatttcctgaatactagacagataacttctgaactagcttgagaaattaaaatttgattctagggtagtaaactctttgcctcttggagccaagcaggtttaaggtacatgtacatacattggattcatggtagacagcatacccaccctaaagagggcagctctatttaaagggaatagtcattgttcatttct

SEQ ID NO: 46192 - DNA, 1024 bp, Homo sapiens
taatagagacagggtttcaccatgttggccaggctggtctcaaatcctgacctcacatgatctgcccgtcttggcctcccaaagtgctaggattacaggcatgagccactgcacctggccttcaggtaattttaatgtgcagccaaagttgtagactcgtcttcactacaatgcaggaatttaggtgtgccaattatgtaaattgggtaagttgtaatacatctccttgtacctgttttagagttcaggagacatttcaaagtttaatcctcttgaaagatttaagaatcaaattcgagattggaaagatctatatttgttttgttcctacataattatagttctgtcaaagaccacccatttcctgtacatatctgagcacttattgactgtcctatcagctttagtaaaatgttttgtttgatggccattttatacaacaaacaaaatagctgtcatgagagctttttgtggagcagttttagtgaactgagtacattaagatgtggctatggggcggttccataggctcagttatgagctcagtgattcttctttaatgctggtagagtccacctaaacaaaatttaaaaatattttattatatcatgaatcgttggagttgaatatgcataaaaatctcatttaaaacgtaatctgggttggtcacgatggctcatgcctgggatctcagcactttgggaggccaaggtgggaggattgcttggagccaggagttgagaccatcctgagcaatggcaggactccatctctacaaaaaataacaacagaagtaatcttaggggcctgtatcaaaccatatcagggccccgtaccaagaatagtcctttctaggtacttggaatgatattcttgtttttaagtctttttgcccttcattggggtcattattattgctagtccttgtatctctcattctacaacctatgctgaacttatcagttcactaaaattcttgagaatcaagttgtttgacgctggcccctgggcttatatctctctt

SEQ ID NO: 46193 - DNA, 1050 bp, Homo sapiens
tactgtcacaagcattgctacaataaacactgtttaactgtgttttaaaagtcaagatgcccttcattaaaatacctctagtaaaatattatacccatttaaattcatttattatgtttaaatgacacatataattgtacatatttatagagaacagtgtgatattttgatacatgtatacaatgtgtaatgatcaaatcagggcaattaggaaatccatcacttcaaacgtttatcatttctttatgttggaaacgttcccggtcccctcttgtagctattcgaaaatgcataatgaattgttaactatagtcaccctgtagtgctatagaacactagaatgtatttctcctacctagctgtaattttgcctcagttaacctcctctggctatcctcatctccctcctaactttcctcacctctgttaaccactattttactctctacttctatgagattaactttttcagcttccgcaaaagaatgaaaccatgtggtatttacctttctgtgcttggcttattttcaaatatatacattctaaaactcttaatttaaaatgttttcctgcagttgaaaagactgttggtacccacctcagcatgcatattcgtgacatctctatcctaatggcacagaaaaaaacttaaagctttccaatagggtatggaatacattctgtggttgggcagatcgctccaagtgtaatattttagaataaaatattcacacatcttttgaataacagctttgggtctttgatagggaaaacttggtggaaggtctagactagtaggcatgcaagggggactaatctttttcacactcagtgaatatctcagtgatttaaggtagtggagtgtgggaagaacacatgctttggggtcaggcaaagtcttgactccaacttgggcaagtaaattaacttccctgatccttggtgtcttcatcaataactttaggatactgatagggaaatcaaaaggattaggtaggttcatgtatgagctggatcttatgtaatgcctgatgcatagtgatccttcca

SEQ ID NO: 46194 - DNA, 1033 bp, Homo sapiens
ctgacttgatctaaaatggtcaaactcatagaaacatagagtaaaatggtggtcgccagggactgtagggtggggaaaatggagggttgctgttcaacagatacgaagtttcagttactcaagatgaatacattctatagatctgcactacaacactgtgcctatagttaacaatactgcattttgcatttaagaatttgtcaaggtcaggtgctatggtacatgcctgtaatactagcactttggtatgctgaggcagaaggatctcttgagcccaggagttcaagaccaatctctgcaacatagtgagacccccgtctctgcaaaaaataagaaaattagccggacacggtggcgcacacctgtcctagttacttgggagactgaggtgagaggatggcttgagccccagaggtcgagactgtagtgagctgtgattgtgccactgcactccagcttgagtgtcacagcaagaccctgtctcaaaaaaaacaaaaaaagaatttgttaagaaggtaggtctcatgttaagtgttcttacaacaataaataaaatactgttcggatgacacaatcaacaaattaaaaataaatatattcaattaaccttctatattttacttaccttcactgttttagtccttttcccagattccttgctattatataatgaatacttccgattacagctttgtaacttgtttttggaggaagcagttaaaggaatgacattccccttataatagctctgattttagagttctacagtcttttaaaacccttaaaaattattcacaatagcaaagacttggaaccaacccaaatgcccaacaatgatagactggattaagaaaatgtggcacatatacaccatggaatactatgcagccataaaaaatgatgagttcatgtcctttgtagggacatggatgaaattggaactcatcattctcagtaaactttcccaaggacaaaaaaccaaacaccacatgttctcactaatagatgggaattgaacaatgagaacacatgg

SEQ ID NO: 46195 - DNA, 1025 bp, Homo sapiens
tgttctgaatgggcataaagtacctggttgacagcgctgtaaatatgtcagtttgtgactggattttgttggaggccccagctctactatataactaaattccatgctcaaaagtagaaggcaaaatttattgttttaaatgtgtgcattattttataatcttttaagaaggccagggatggttctcttcagttttggaaggttaaaaatcgtctccttttaaagatactattcattaaacacactctcttggtttagagtattcattatacctagtaatcaaaatatatatagcacagtagaggctgtctgtgtacatgtcgtagaaacccaaataagtctccagaatgattttatgaataatctgccttcagttttaaaataaacttaaaaaaaaacttaaaacttggcatcatcctgggtggtactgtggttttcttcttctaccaaaaaaaaaaatctaatatgctacagttaggaagaaaaaccttaaaaatcactactgaatgtctactctatgctaatagattttctactgtctcatatgtaactatttcattagaaagttctcaatcataaaaagggagtctaaagcaagtttattgctgtaacttatttcatacaaaggttttggccaaaataggaatatcactaaaaaattagcttgttttctgctgttctcactaaggagttagcttgtttttgtttgcactctccccatcgccacatgtccatccctgtacaccctgtatcagattcagggaaaatctgattccgagtttttttgtggtgacattaaactggaggaggaaggaagcagtaattccatgtgagacgtatcacttattttattagtgatttgtgtattacatgttgctgaaatagaaaccccctgaatattaacaataagttagtatcatactcatgaaatccaagtctaggtgcccagaattttttgtgctaattctgatctgtactttgttttttcacttgtcataaaactattgaaaatatctgggaaaaca

SEQ ID NO: 46196 - DNA, 1048 bp, Homo sapiens
tgaacaagaaatcatgaagtaattctatttacaacagctacaaataaaattaaatacctagcaatgaacaaaaaagtgaaacatttctataatgaatactataaaacactgatgcagtcaattgcagaggacacaaaaatatggaaggatattccatgttcatgaatttgaagaatcaatattggtaaaatgtgcatactacccaaagccatataaaaagtcttgccatataaagaaatcaaatcgcaatggatgaaagacttaaatctaagatctcaaactatgaaacaactaaaagaaaacattgtagaaactctccaggacattggactgagcaaagatttctgaggaataccccacaattacagtcaacaaaagcaaatatagacaaatgggttcatattaagttaaaaagtttctgcacagcaaaggaaacaatcaacaaagtgaagagacagcccacagaatgagagaaaatatttgcaaactatctacttgacaagggattaataatgagaatatataagcagctcagacaactgtataggaaaaaatcaaataatctgattaaaatgagcaaacgatctgaatagacatttcccagaagaaaacatacaaatgacaaacaggcatatgaaaaggtgctcaacaccactgatcatcagagaaattcaaatcaaaaagacaatgagatatgatgtcaccccagtaaaaatgttttctttaatcaagaagacaggcaataacaaatgctggtgaggatgtggggaaaaggaaaccttcgtacactgttggtgggaatgtaaattagtacaaccactatggagaacagtttggaagttcctcaaaaaactaaaaatcaaggtattataaaattcagcaatcccactgctgggtatataccccaaagaaaggaaaccagtatattgaagagatatctgcactcccatgtttattgcagcactattcataataaccaagatttggaagcaacctaagtgtgcatcaacagacaaatatataaagaaaatgtagtacatatacacaa

SEQ ID NO: 46197 - DNA, 1027 bp, Homo sapiens
ttagagcttcaaacaggaacaactttgcctaaagacaactttgttggggtaaatttatattttcccacgtatacgtatatcacactctaaagacatgtacactacctgaattgaataaaaggaataaaaggccgtgttttttttttttttttttttttttgagacggagtcttgctctgtcacccaggctggagtgcagtggtgcaatctcggctcaccgcaacctctgcctcctgggttcaagcaattctcctgcctcagcctcctgagtagctgggatcacaggcccgtttcaccatgcccagctaaatttttttgaattaatttttatttttatttttatttttagtagagacgcagttttaacacgttatccaggctggtcttgaacttctgacctcaggtgatcctcctgtctcaggctcccaagtgctgggattattaagaaagctctttcctttcaaatgtctacttttatatgtagtgaaaaaaaatatctacttagtcactggttagcctgcgtttgcatttaggaaacaatctcatatacatctgtaagtctctacctcctcattttggtgagactacaagaaatgaaattcttcaacctgcaggcaaaagctctgctcagaacatgaaccaaaataattcagcatatcagtgcaaaatgacctgcatgctctctctaacaggtaaagtgtggcactgagatctaccatctggtgaggttgctgtggctccttggtcttgttttaacttccagttttgcagtcctccatacctgttttcccattacctttcccccacacctcgaaatgtttgtctgaaccttgagattgtgccaccttctggagttggaggcctgccctaaatccatggtttgcactgagcagtgctcatcatctctgtatcctctatcatttcactctccccctccccctccctctcttaggatgcattatcctattgcctgcctgtcctacaaatcactggtttggataccactttcactcaaagagacttgcct

SEQ ID NO: 46198 - DNA, 1078 bp, Homo sapiens
ttgttgttgctgatatcaaaagacactactttttaacaacaacaatagaaaagtaaaataatttttaagaattatcttcaacttttattcaaaagagaaatgttcttgggcacaaacctcacttgtgagaagtttaagaatttgaacttgggacttttataattctctgcagagaggatattgaatttgacctagtggcagaaccaagaataagagacattgagaattatggctgtgtatgggtccacaaacgatttctctatgctcttcttatggctgtaagttaggtcaagttagatatatttcatgtacagtccaaaaaattttgactctataagctagtggcataaagttttatttctgactgtttcaaaacacagaccaatttctaatttctagcatttataatttataattttagcattacataccttttcattaactcatttttttaacccttcgacagaaatgtgtaaagtataaccattatttaaaaatgttttgtgattgaaagtatagccaactagttaacatttaaattcattagagaactcaaatatagctgagaataattgtattttctatgaattataatgaagacactagctgtgatgagtaaaaattgatgttttcttcctttcctgcttgaaattctatctaattcagggttttgaacagccagtctagttatattaaacaaatacagttaaaaagaggctattttttcaaacaaaaagagagaagcctgagatatataaatggtaattgttctctatagtcaatttttggctttccagaacacaatccacatactatactaaggtatggtaggtacatagctatagtacagcccctatactataggtaggatatactgtaacctgcctcctttttttctcttttcacaattccaaaaagatctctgcattaacaaaatctattaacagtgctttatccaaataatggtggggttttcttttctacaataaagaatccagagttagacaacttagtgttaatagagtatcttcatggtgtcatcagtgtcataggttcctatatatttcccgttaccatc

SEQ ID NO: 46199 - DNA, 1072 bp, Homo sapiens
caagtcattttacaagtatgtgcctcagtttcctttgaatgggtcaataagaacacctgccttattgagttgtggtgaggacaaaaaagaatgaattagcatatttaaaacacttaaaacttatattggcaattacaataatttattttgtgtcaacttgactaggctgtggtgcctagttgtttggcaaaacagtaatttcgatgttgctgtgaagatatatggggatgcaattcacatttaaaatcagtagactttaggtaaagcagattatctttcatgatgggatgggtctcattcaatcaaagaccttaagagcaaagaatgaggttttcccaagaaggaattctgacttaaggttttgtcatagaaatcttccctaagttcctggccatctggcctgccctgtagacttcagattcacaagtccccacaattgtgtgagccaatttcttaaaataaatctctctctctctttatatgtcatcaatctatctatatttatatatgtattctactggttctgtttttctgaaaggcttgtctaatatagcagcttagtaagccagatgttctctgtcctcttttaggtctatattagcacagcatagtgggtaatatgagactgtataaatatttggggcataattcaacttgcatgttttcttttttgagttttttggatatgactcttacatattagttttacaaaattgtttgtggtttgaaactaaatattctctaaaaaccatacaggatatatttttctgtatactaagaggttgaaatttacttttgaactactgtagttcagataaagtaagaattaataaagtatttaagaagtaatggtagttaaattaatatgcccgacataaaacgcatcctggacaaaactgctgaaatttatagaaagatgtaaagatataccatgtggccactagagggcatgcaacatctgccacatttttcttcaagaccaaggacttttgcctgtagacgaaagtagttatggttcagtctaagaaataagaaaatggagctccatttatatttcaatcattataattga

SEQ ID NO: 46200 - DNA, 1091 bp, Homo sapiens
gtcagagggaaggtctagggctgaaggctgttgttcagattcttttgtcctatggggtgtttccttgatgtagtcctcccacactttttctatagcagtggcttcttgagaactgagctgtagtgattattatctctcttctggatctagccacccaacaagtctaccaggctctgggctgctactggaggttgtctgcacagagtcttgtgatggcaaccatctgtggttctctcagccatagataccagcacctgttccagtggaggtggcaggggggtgaaatggactctgtgagagtcttaactttggtggcttaatgcagtatttttgcactggttgacctcctgccagcaggtggtgctttccagagagcatcagctgtggtagtatggagaggaacaggctgtaggtggggccctagaactcccaagagtatatgccctttgtcttcagttaccagggtgggtagtgaaggaccactgggtgggggcaggactaggcgtatctgagctcagactctccttgggtgggtcttgctgcagctgctgtggggaatgaggatgaggttcccagatcaatggaattatgatcctaggaggattgtggctgtctctgctgtttcattcaggttgtcagggaagtgtgggaaagccggcagtcacaggcctcaccctgctcccacacagtccaaagggccggactcactcccaccgtgcctccctccaacagcaccaagtctgtttccaggcagtgggcatgcatggctgagaacttaccccaggctacccacctcccagctgtgaaagcaaatatagctttccttcttcccctagtctgcacaccggattcacaccctcccccaagttctggccaggaggcttcttgatcagttcaaattgttacaaagtttagctgaggatttccttctccctgtggcctttttcccagtgcctctggccacccctccagaaggatacctgtgaggccaggcaggaatggcctgcttggggatccagcgagctcacagagcctttcccgctgcttcctctacctttatttttcgtttggctttccaaattgactcagct

SEQ ID NO: 46201 - DNA, 1050 bp, Homo sapiens
cctatcatatggcctatcttggagaaagttccaggtacttttgaatataatgtatatcgtgcagttttttgatggaatgttctgtagatatctcttcagtccctttgttccaaggtataatttaaatccattgtttctttgttgactttctgtcttgataagctgtctagtgatgttagtggagtattaaagtcccccactattattttgatgctgtctatctcatttcttaggtttattaatacttgtttcataaatttgggagctccagtgttaggtgcatatatgtttaggattgtgatattttcctgttggacaaggcctttaccattatctaatgtccctctttgtcttttttaactgctgttgctttaaagtttgttttgtctcatataagaacagctacccctgcccatttttggtgtctatttgcatgaaatatctttttccacccctttaccttaagtttgtgtgagtccttatgtgataggtgagtctcttgaaagtagcagatagttcgttggtgaattcttatccattctgtagtcctgtatctttaaagtggagaatttaggccatttacattcaatgttagtattgagatgtgaggtacccttccatgttgcctgtgtaacttgattttttgttttatggttttattttttaaattgtatttttttgtaggtcctgtgagatttatgctttaaagagattctgtttcgatgtgtttccaggatttgtttaaagattaggcctccttttagcagttcttttagtggtggcttggtagtggcgaattgtctcagcatctgtttgtctgaaaaagactgtattgtcccttcatatatgaagcatagttttgctggatacaaaattcctggctgataattgttttgtttgaggaggctgaagatagggccataatcccttctagcttgtaaggtctgtgctgagaaatctgctgttaatctgataggtttccctttataagttacctggtgctttttcctcacaactcgtaagttttttttccttcttcttaactttaga

SEQ ID NO: 46202 - DNA, 1103 bp, Homo sapiens
ctatttaagtctactgccttcttttagctctttgtcaatggttgcctttagctgtttgaacatatttaagacagttgatttaagtctttgtctaggaagtccagtgtctgtgtttcctcagagacagcttttgttaatttctcttttttttcacgtgactgggtcatactttttttttcttggcttgcctcataatgttttgttaaaaactggatgttttaaatattgtgatatagtaactctaaatcagattctcccatgttcaagatttttcatttgcttgctgtgaggttatagtgaattttgtaaactacttctgaaaatattgcgttctttgtgatgtgtggtctctgatatctttttttttttttttttgagatggtctctgatatctttcgcctttaccttcattgtcagccattgatttgacagagatttctttagtgtctagagctgaaaacaagcaaacaaaaaacaagcacagaagaagaaggagaggtaaggaaagaaaagaaaattttctccagtcattgcttatctctgatcatccaaagcactacacttctaagcctttcctcccaggctttcaatatgaccattgtttgccacaaatgttattttatgcaccacacagagtaagtcattcatttttctttcagtgtttttgaagaacatgtttttaggcacctctttgccctgagacagttttgagttcggtaaaacaaatgtaagttccttcattgcatcaatatttcaggaatccacagacaagtaagccaaaacagacaaacacaattccttgggaacaactttcactctgcgacttttaaaacctggtaactgcatcaagaatgtgggctgctattttaaagactgtggcatcatggggaatttggtggagtacaaataagttaattgcccaaatccttttctattttgtgttagtgtcctttcttcaagttaaacattcacttgtttgctataaacctttgactacctttcagagttcctataagattgattctgacagatttgccaatttttcagtgtttctaggaacggactaacccctggtttgtccctactgtgtcatttttgcttac

SEQ ID NO: 46203 - DNA, 1048 bp, Homo sapiens
atatcaggtactgggctaagatcagtatccattgccttctgtcatctattcttactttgctccaatctggtttccacactgcaaatctcagttcatgctaaatgtggagtaaagacagatgttattgaaatattgcctcattcagtcacctccatcacttcttatggttctgaaggtaaaggataaaattgttaagatgggcaacaagacccccaaagccttggccttccctatctcctcagcttctcctcatccccaaacccttattttgtgttccaatctgataataaccccttggatttggcgactttacctctcaccacacagctctccctgcactttctgtcttcctaaagcttttcctccagctcaccttgcgatcattttgagtagttaacttagtctcatgttttagatgtcagaatcttcaactcttttgctagttttatacctccctgtttattaccatcatagcatcatgtatctgagtcctaacagttactagcttttatcaagaatcaagcaaataaatattctgtctgtcttctccactaaactgaagctttggaaagaaggggaccatttattttattttatttttttttatttatttatttatttatttatttatttatttgagacaaagtcttgctctgtcgcccaggctggagtgcagtggcgggatctctgctcactgcaagctctgcctcctgggttcacaccattctccagcctcagcctcctaagtagctgggactgcaggcgaccaccaccaagcctgactaatttttcgtattttcagtagagatggagtttcaccttgttagccaggatggtctcgatctcctgacctcatgatcctcctgcctcggcctcccaaactgctaggattacaggcgtgagtcaccacgcccagccaaaggggaccattttatttttaacactattttgatctcagtgcctagcacagtgtctgacatgtaacaaatactcaataaatatttcttgaatgaaggaatcaatgaataagtgctaagaatatacaaat

SEQ ID NO: 46204 - DNA, 1015 bp, Homo sapiens
attcacaagtgttgattttctactttatgccagaaactttgctagagctggactttgatcagacctctggagctgaatgagaactgtactacattcaaaaggggttcagagttggtggtgctgtgacttgaagtgcacacacctatcttttctaactggtaatcctgttttctggatctcatttgcacaaaggtagacaagccgagcggtgtgagagtacaacagatgtctatgagttactggatttggggagtaagaatctgcccttggcagctaggtgcggtggctcacatttgcaatcccagcactttgggaggccaaggcaggctgatcgcgaggtcaggagatcaagaccatcctggctaacacagtgaaaccccatatctactaaaaatacaaaaaattagccgggtgtggtggcatgtgcctgtagttccagctactcgggaggctgaggcaggagaatggcttaaacccaggaggtggaggttgcagtgagccaagatcgctccactgcactccagcctgggtgacagagtgagactcagtttcaaaaaaaaaaaaatagaatctgtcccttggcttttgctgtctgccttggccacgattgtctcttatattgtactgggctaaggataaggtggaagagtatcagtgaacctcgatgtatagagcagagacttttaaagtaactgcattagaactccaatctgggtctgaattctgaatcttgtgcttctaccattttaaaacataccaggcatcatcattgaatgaaataaatttgttccagatagtaaaattaaactgtgtttccactaagcccttttccaacagtttttattataaatttggtgacatgattctacctgcagagaaaggggactatttcaacatgaacatgtcaaaacagaatgtaaacagttatttcagccttatgaaatccctgtaagatagggcagggagctatgtattattgcctttatgtttcctgtgtagaaaggaaaatgaagca

SEQ ID NO: 46205 - DNA, 1045 bp, Homo sapiens
aattttatgaagtataatgcacacaaagattttgtagaggtcaaaatttaaaacactacattgaagcctcagtacagaaggtctgaaaagtcaagcttaggatatatatatatatatatatacacacacacacacacacatacacacacacacgtacatatacacatatatgtgtgtgtgtgtgtatatatacacacacacacacatatatatatacacacacacacacgtatatatatttagttgaattaggtacatgagctaagcaaaggtgtactttaggtacttttaccaagagtaatgtgtaaataatgagagaaggaaagaattacgaaatgtactttgaaaaactatacaattatacatggaaaaagtaacaaatgaaagtaatagaataaagatgtgagagactgaggtagaggaagaaatgataggtttttttgtttcaatcatgaatttatctgagatttttaaggagatatataatacatctataaggatttaattttggattatggggaaaatactgacacaatatgagaaatattaaattcaagggaagaagaatgactgggaatggagaagatatatctagttttttgacctgaaggcgggatagcaataccacactgtgatgacaaagcaaagctactgtgagcattttaggctataatttgcatgtgggttatatttaaagatgtgcaaaatgatcaaattcaaagtctggagagaatcttggaaaaggctcacatttaggacctgaatgaaaaaatattaaaaagagccagagaaaaccgggaaattaacaggaaaagtagttggtaagaatgtagatgcagacaaattcttatgcaaatagatcaaaacccagtgctttagaccaaaaccagtgtagtcaaacttactcctcagccattcaaaaacaaatttcagaaaaaactgctatatttggaggcagaaattgcatgtgggttatagttaattttttaattgtgccctccaaaacaaccagttgtaaatgtacttaagcaattgaactaagtta

SEQ ID NO: 46206 - DNA, 1029 bp, Homo sapiens
atatattttaatcttttattggtagccatcaatgctttcaatatttgcaaaaacttctcttgtgacaatgacctccaaaaactgtcttctttatagtcttacttcattaactactatacaaatcagtcaatatttactgaatacccaagtattatatcctggcagcttgtcttttcaaacttcaaaacacggaagaggaaatattaggtgacttgttataagtcatacagcagataagtagataattagactgggtcaacagtcataaccaaatgaagccaaatctcacatatcaatgctgactgtgtacatgttggcaatgctatttaaatttcttcattgataaagagagtagttctaatagccttgtggggctggattacaagttgagtacatttttgaagagcacgttttttagtgtgtaaaattatgttaatggaaaaatatggctgatgaattaatagtataaatatattattttgcagacggatgaacccagaatagtgtgtaggagggaattactgagctaaaagatggttcatatatatatttttccttatgtccaataggtttagccaatacaaatgtttccgatgtgaaatagagaatatggactccattttatatgctagtaatgttcacaaagtttttaaagatctttttgacatttttcattgaatttcaaaatgatttatagtaaaagtttgcaaaactgaaaatttaaaaaaaagtagattctcttttttacacattattaaattttgaactaccataataaggaagtatggcttacattattaactgttcataaacacatcttaaagactatgagcctttctgaattttaggatcatttatgagttgttcatagatgagttaccatcccaaatacatgttggttaaaaggttttgtgtatgagttttgggatcatttatgagttgttcgtagatgacttaccatcctgaatataggttggttaaaaggttttgggtatgatgccctgaaggttgtatttgtcaaactttcct

SEQ ID NO: 46207 - DNA, 1025 bp, Homo sapiens
tggtttcgcatctcaacaactacgcttcccagcgggaagccgcgagcggcgcccacgcgggcctcggacacattccctgggggaccgtcttcggacatcacccgcacatcgcgcacccgctgttgctgccccagaacggccacgggaacgcgggcaccacggcctcacccacggaaccgcaccaccagggcaggctgggctcggcacatccggaggcgcctgctttgcgagcgccccctagcggcagcctcggaccggtgctccctgtggtcacctccgcctccaaactgtcgccgcctctgctctcctcagtggcctccctgtcggccttccccttctctttcggctccttccacttactgtctcccaatgcactgagcccttcagcacccacgcaggctgcaaaccttggcaagccctatagaccttgggggacggagatcggagctttttaaagaactgatgtagaatgagggaggggaaagtttaaaatcccagctgggctggactgttgccaacatcaccttaaagtcgtcagtaaaagtaaaaaggaaaaaggtacactttcagataattttttttttaaagactaaaggtttgttggtttacttttatcttttttaatgtttttttcatcatgtcatgtattagcagtttttaaaaactagttgttaaattttgttcaagacattaaattgaaatagtgagtataagccaacactttgtgataggtttgtactgtgcctaatttactttgtaaaccagaatgattccgtttttgcctcaaaatttggggaatcttaacatttagtatttttggtctgtttttctccttgtatagttatggtctgtttttagaattaattttccaaaccactatgcttaatgttaacatgattctgtttgttaatattttgacagattaaggtgttgtataaataatattcttttggggggaggggaactatattgaattttatatttctgagcaaagcgttgacaaatcagatgatcagctttatcca

SEQ ID NO: 46208 - DNA, 1026 bp, Homo sapiens
tgaaaccagattacactgctcctaattctcacagctaaacattctcttttatttccttcaatcttgtcaaattaaaccaacattcatttactgatatactctgtcaaaggattcatcagatagtcaccatggaaaaacctagtttctagttagtaaacaagaaacacaatcattaaaaggtgttgataacaaaagatttcagtcgtagtttcaggcaatagtgagagtccaatctgagagcattacttctttagtggccaaatgaactgtgcaaacaataattattcttgaaactcagtaaaagaataaatatcttcaggctaagatagtcaaaggaacacctttttcacagtttatattttggggtgggtctgaattttcttgtctgcctcactggtgacttccagcttattctataaaatttaacataaatttcagctgttttcccaagaattccttgatacttctttcctaatagaatttctttacatttacctataccactagtgtatttcatttcatcatggttgtctttcctgctagactctaacctcattaagatcactgacttctttttcatctcctgagcatctccttggcacataatgtgtgactaatacatatttcaaataaattgaacatttgtgtgcaaataggcattcatatgataataagaccttgttatgtacagagttttatccccccaaaatttatatgttgaagcccaagtttccagcgtgactgtatttggagactgaacctgtaaggaagtaataaaggttaagtgaggtctaagggttgaggccctaatccagtgggattggtggcctcataaaaggaggaagaaatgtgaaagaacactctgcatgtgcatgcagtgagagagggccacgtgaggtcacagcctctgcaagccgggaagagagccttcaccagaaattgaattggcccgagccttgatcttggactttcagcctccataactgtgagaaaacaaatttctgttgtttaagccacccgatctgt

SEQ ID NO: 46209 - DNA, 1047 bp, Homo sapiens
tgctcaggaggccgaggcaggagattggcctgaacccaggaggtagaggttgcagtgagccgagattgcgccactgcactccagcctgggtgacagagtgagactccatctcaaaaaaaaaaaaagaagaaaaaaagaaaaatttaacactatatataatagcataaaaatacttaatataggccaggcgcggtggctcatacctgtaatcccagcactttgggaggccgaggcaggcggatcacgaggtcaggagatcaagaccatcccggctaacacggtgaaaccccgtctctactaaaaatacaaaaaaaaattagccgggcgtagtggtaggcacctgtagtcccagctactcgggaggctgaggcaggagaatggtgtgaacccagaaggtggagcttgcagtaacctgagatcgcgccactgcactccagcctgggcgacagagcgagactccgtctcaaaaaaaaaaaaaaaaaaaaaaacttaatatatttaacaaaagatatgtaagacctctatgctgaaaactacaaaatacaacaacaggaaattaaacaagagctaaataagtggagagatgattagaaggaatcaatattgttaagatgtcagctttctctatattagtctatagatttaatgtaatctcagtcaaaatcatagtaggattttaaaaaagaaattggtaagttgattttaaatttcatatgaaaaggtaaaagacctaaaatatccaaaacaatattgttttttacctggtttcaatacatattgtaaaattgtaacaatacagtatggtattggcatatggaaagatgccactatagatcagggctttacagggctttttggttggtttccatgaagctctcgcacatattttatgtttattttaaggtgttttatcttttcattgttgttgttactgccagtgttggctgtattttactgcatcttcatactaatttttgcttgcgtatataaagactgttggatttttgtgagttagttttgtatccagtcaccttactacatttatgg

SEQ ID NO: 46210 - DNA, 1026 bp, Homo sapiens
tgctagtatgctttctatgattgctattttgccatgtggagaggaggttccagcccatttgaggggcataggttttgataacagaatgctcttataagaacatcgctacctcttcatgataactatttacatcattctcttgccaaatagagtgaggcaacatttctactcttggtgtatttttatgtttgttcttactcttcacttacattattttcagctaatgatgatctacttaattttggaaggttagggtaggaagaaagagaaagtaggcccattaaaaacttcattttctttctaatattccttgttaaatctgtcatgatagtacttctcaatcgatatgaacaaaattgtttctctctacctgtatcaaggaaacaactgaaaatatcctaacaaattttggaagggagggtttttaaatgatttgatttaaaatatgggctatgtaaaacatgaaatctacttggaggaagggggattcaagacatcttaaaggaatgggcattcttttccgaagttgataataggctctatgagatattactcgtattaaaagtgcgccgtcatgtgtaatgaagatgctttcagttgcaattgacagaaaactctaccttaactgttttaaacaataagaaacttaccaactcacctaacaaagaacccagaggtaagacagttgtgattgtgttgtgataaaaaccgtggatcctcctttttgtaatattttattctagtctggcctttttccctgtataggttttatactcaggcttgatcccatcatggctgcgagatggcagtaacaatgctaggcataatatccaaaattaatttacaggtacaggaaagggggcatctctttcgtgtgtctcttttaagagtaagaaaattcttgtagaagtttctctgcattccttcatatactgttggccagaattacatcacatgctgagttgtgaagcagtcattaatgagggtgagagcacatgattgattcagacttatcaagatctgccg

SEQ ID NO: 46211 - DNA, 1050 bp, Homo sapiens
tgggaaagaacgtggctcttggccagcaattaattaagccactcttttgttttggccatattgtggtggtgcataggtgtgaaatactctgtcttcactaaatagaaatattcctgtgtatccatgataattttaagaaaacctttcaattttggtgttattttcctataaagtaataggagttgtaagtgcaagtaattgaagcatgagaagaatggagaaaagttattgggataaaatgaatttggcatttgggtagctgaaaaatgattcctatcattttggtccatagaaaattgcatcaatattaacaggaagttggaagctgaacatctgtagcaggtctcttgttaaagaatagagaaagagaaaagattacttaattatgtattgtgtatactgggatatcctattgtcaaaaagggaaaataattagcctgactaatcaatttcctgcatttctcctgaattccaatttagatattcttgaattatcttcaagtagagatctctgatatcagattatatgggctcaattaggttactcagtgttcctctcatcgttcagcttcacttgcctctcattagagtagaattaactttttattcaggatatagtagttaaacagagttatgggccttgggtctaaagattgaaatcagggaaggccggcctcaacagagagcttcctttcacccattttgaccattgtcactgcttcccctcattcatcctcattgctgttgatcttagcaagaaacccagagacactattgccttgcttacaaataaggttttatgtttgatcttttcattttgtaaaagataaagcacctaaatcttaaaagggtgctttctttttttaatgaacagcagcggctctgggaatttcaaaagctctataatgttttgttcctgtggtaaaaaggattcacaacagacattgtgatctaaatacttgttttctttttcttttaatggaaaattatttccctaagattaagcataattaaaatgtagaattcttctgcacttttctttaaatccta

SEQ ID NO: 46212 - DNA, 1045 bp, Homo sapiens
aagaaagggcaaatttgctggtgctgaaaatgtgataaaaattcagatttctaggccaggtgcagtggctcatgcctgtaatcccaacactttgtgaggccgaggatcatttgaggtcaggagtttgagatcagcctgggcaacatagcaagacccttatctctaaaaaataataaaataagaggtttagatttctatgcacgacctacttgtatctgcttagattcttcactttctttctttcttttttttttttttattaatttattcctggcccttttctgtgagaactcgttttctttctgtttctattcacactttcctcttacccacttgtctacctgctgctgttccaaagttctagagtctctgagtggcagaaacacccatgggagttgctgatacttggccaaattttcttttaatctcgactttacacttactagttgccccaaccttcctttgtagaaggcacaccctagctgggcgtggtgttgcaggcctgtagttgtagctactccggagactgaggtgggaagatctgttgaggccaggaatttgaggctataatgtgctggctttttaatttcattatttatttatttggagatgggggtgtgtcttcatatgttgcccaggctgtgctcaagggattctcccacctcagcctcctgagtagctaggacttcaggcacacaccactgctcgtggctgagggtatggtgtggtatgatcaaacctgtaaatagctactgcactccagcctgtgcaacacagtgagatcccaactctaaatatatgtacacacacacactctctctctctctctttcactgtgttgagagtccaactctaaatgtatatatatgaagcttatccagtaaatggaagcagaaccccttgacatccagaatgtacagttgactgcattgtgtataaagttgttgttccccaaattgcttatcataagcccatttggacgataactctttgttgtatggttatagtggctagctttcattttgtgttccaaaccagtatactg

SEQ ID NO: 46213 - DNA, 1052 bp, Homo sapiens
tcgcgagcgcgttggagcggcactcggagcttctacagaaggtggagcccctacagaaggtggagcccgggcgggtgagagggagtcgcgggaattacgccaacgacgcggtgggcggggtcgggaataggggcggagcctggcttaggaaggggagctgaggtccggggcccagttttccggagttgcggtgcgttgtggctcagccctcggcccctagaatctgtgcttggtgtttttcttcctttcgttgtccttttgtgtggcatttgcgtactgggccgggtctgtccacactgcgcttgttttcctgggattgaatgctggtgggaaggtaaccagcggggagcgctgctggggaggcgatctagggcgattcctgggacgctaaggagaatgggactcacacggagaggcagggctctgctgggtcttgttctgaacagtagctctagcatggagcttgctgtctggagtagaaggcccttcataaacatttgttaatttaatgactgggtgatgaatcactttctgaacttgggcaagtgatttaacttgtcagcgcttcacctctcttttgtaaatgtcttctttttttaaaaagtaaagtaaaatctccgtttgtctcagccagtacttttgtaaaataccataaatttatagataaatgaaatggaagaaataaaattacaagcctaagtttttaataattaaactcagcagacatgaaattgaattatatacaaataaactctcaatttctgtatttttcttcctagggagtagtaccaaacagttcacaagactggcagtgtcctgggttatagggtcattttagtagcaattactgatgtcaaaatttttctgaaatccaaggactagaagaagcctggtatattagtttattattttctgttgtaacaaattactacaaatttagtggcgtaaaacacaggaaatgtgttgttgttagggttgtgagaagtcagacgggatctcactggtctaaaatcaaggtgttggtgaagttgtgttcttttccgtagcttcta

SEQ ID NO: 46214 - DNA, 1033 bp, Homo sapiens
ccaatgaaactaaagtgaggtaagggttctgatgtgaaaagctgagggtgtgatgaggacaagtggcagaaagttcacctggcttggtggaagggaaggtcagagaagacctcttagaggactcagtaatgtccattgaggattttaggttgaagggaatgtttgaagtttgagggcccttttgaggaccaccaagaacttcactgtgctgtaggatattgagcaggaggtgaagctagagagatgtgtaggccacattgcagagtttgaacttggggcaatgggaagccattgaagggttttaaacaacccaagtggtgcattcttctgtaaatgttagagagatcagtggctgccctgcacatcaaaggggagaacgattggagacaggcagattagatggaaggacggagttgtactccaagccaaagatgatggagagtgaattaagttagtgcaatgggaccaagtctagagctatttagaagtgagaagtgacacggaaaaaaaaaaagattgattggatgtagaacaagttggataagaatccaggacaaccccaggtgtcaggctggggcagctaggtaggtgctattgccatataaagtgttaaaaaagaatagagaaggggctagttgtcgggggaaggagttcagttttagacatgttgaactgcaaggagatttgatactataattaaggaatgtgttttaataaatttaataaacaatgaacacacattattcgcatttcccaaacaatttggatggtagatcaaaaagaatgagagtgaaaataaggggtctgtgaccactcaattaagattgagctaagagcaaggtcaagttcaaacccactataagcttcttgcatccatggtcactgactgttttcttactgttagctgtcctgttggacagtgtaacagtgagagagcatatacagattagcattgaaaaggataaagtgacatgtgtaagggttttgaaaaagtattatacaaatgcaaggcagatatattgaaataaatgct

SEQ ID NO: 46215 - DNA, 1031 bp, Homo sapiens
ctctagagcctctgatcctgtagagttggggtgggacctgaaaattggcattgcttatgacttcctgatagctgcagcagcagctggtctggggcccacactttgagagctgttggcttaactgttctgccatcaccaccgtgggaaggaagaaaccccttttcctttctttgcatttttcatcttggtagtaggaaggatattcaaggtcagttggataggataacagcattggaaaccctgtttccaaagcgcctttgtgagagacaaaggcgctatgatcctccttaattaatatggatagatgtgaatgtaacatggatgaatgaatgtcctgtgggctcagcgtgctctcctcatcctttgggacagagttgtgaagtaggcaaagccgtttctatgcttctcccccttctttttggtccctgctttcccagtctattatgctgctccctgatattgaacctcataagcttgtcccacttaggtgatgtgtgttcatgtagaaattctgccagggaagatgtgaatcaaaatagggattttagagcgtagtaccttaaccaaaattaaactgatctaatggtggcattttcttgtaccatgacaagttggttggggaagtgacagaattgctattttacccggcttcgttacctctccttacacacgtacttgaccatatctatattacttatgtctgagactggccctgttcatggaatcaaatgcatactcttaaaatattagatcagaaattgagaatcttacattataaatacttgtatgtacctgcacatatatggtacagattatatctgttcttttgccgattgagaataatgttgaagaggaatcaattatattttcaaactagttggattttttttcagtatttgtatttactatttgtttttcttttctctccatagaaactccccaacttttaaatcatttgaagaaaaggtcgaaaacttaaaggcaagtagagagatgaacagggtctttttgatacattgcctggtgtctta

SEQ ID NO: 46216 - DNA, 1319 bp, Homo sapiens
tgggtctaatggtttttaagagtatatagcaacatggccaaaatgctatccagcatatttcttacagtgttttgaaagagcattttttttcaaatccttgacagttctcagtattgttttattatcaacaaaataaaaataatagtaatagcacctaatgtctatagactacatgctgtgtgggaggcgttaaactgagctctttacatgcattatttcattaattattacaacagtcttacggggcaggtgctattatgattgatggaagaggaaacatagtctttatttaacaaatgaagttaccagctatatgatttgtaaatattttctcccattctgtggattttccttttcattttctttatagtcccttttaaaacatttttaaacttaaattttttatttaaaaaattttagattcagggggtacatgtgcgggtttgttacatggtaatgcctcatgatgttgaggtttgggcttctaatgatcctgttgcccaagtagtgaacatggtttttcagctctttcccccaactctccctctccacttctggaatccccagtgtttagtgttcccatctttgtgtctgtgtatacccaatgtttagctcccacttataagtcagaacatgtggtatttggttttccatttttgtgttaatttgattaggaagatggcctccagctgtatccatgttgcagcaaaggacatgattttgtactttttaggggctgcatagtattccatgatgtatatgtaccacattggacagtgggcaccggggttggtttcatgtctttgctattgtgaatagtgatgcaataaacatatgagtgcaggtgtttttttggtagaacaatttctatacccagtaatgggattgctgccattgaatggtagctctgtattaagttctttgagaagtatccaaattgtgttccacagtggctgaactttaggactgttatgaataatgccgctgtaagcaattgtgtacagctttttgtatggatgtgtgttttctttttattgttgcttgtttgttttttgagaagagtcttgctctgttgcccaggctggagtgtagtagcatgatctcagctcactgcaacctctgcctcctaggttgaagtgattctcctgcctcagcctcctgagtagctgggattataggcacaccaccaccatgcctggctaatttttgtgttttagtagtatggggtttcaccatgttagccaggctggtctcaaacccctgacctcaagtgatctgtccaccttggcctcccaaagtgctgggattacagccgtgag

SEQ ID NO: 46217 - DNA, 1026 bp, Homo sapiens
gtgatctccactcaatgtttttccttctggcagctagttaatctgtggagaggcactttaaacatcatttaaatatcatcttcttcctcaaaatttctcccgagctttagcatccagcgatgatttttgtctgaatctttacaaagatggtcagggtggcattcttctgtagttcttccttctctctatttattactttcttggactcttggattcctgtttttttcagtggtttataatccctgactgtccctaatttttttggcggcctgattgtcccatattggctagttggagccccttccagccagctgctgtatcaccatgacacgtctgcattccccaagtatctgcggcctgcctctcctggtggacagccacattgtctccctttgacgtgccctccaagtaaatattgtgtttcatagcttttaaatcagactgtcctttatatgtctttcaagtttgtggagaatttacactgacatatttgagtgatgagttaacaggcagacagaaacttaattttctttatagtcatttgtacctactaccatttccgtttgcaatgacatgagtcgtctccggttattaccctgcagtacatacgcactttactggctgcacctagttgacttctgaactgcccttgggctccctctgctggcatagtggtgcgtgagcacttttctggggtcatggaatggatttctctttctgcccattttctttcttttggtttgtggttttctctctcataaattattacacaaacatggaccatacaatacaaccttctttcaaacctgatttgtttgctaactgtatcagtacctttccatataaaattcataaatatttttatataattatgtcagtgtttccatatttttctattacctgaatgttctttttagcatttaaataatccatttttagtaggcatttgtattgcttttttccatttcaggtagcatctaaagtgaatgtcccttgcatgtatactattcatatgtgacttaataa

SEQ ID NO: 46218 - DNA, 1056 bp, Homo sapiens
agttctcacccggttggttcacacgagagctggctgtttcaaagaacctggtccctctcttgttccttctctcaccatgtgatgcgcctgccttcccttcaccttccactatgagtggaagcttcctgcgaccctcacagaagcagatgctggtgccatgcttctgtacagcctgcagaaccatgagccaaatataaacctattttctttataaattacccactctcagttattgctttttaataatgcaaacagattaacacagttgcttaattctttttttttttttttttttttttttttttgagctgggagtctcactctgtcgcccaggctggattgtagtgttgccgtttcagctcactgcaacctccacctcccgggttccagtgattctcctgcctcagcctcccgggtagctgggattataggcatgtgccaccacatctggctaatttttgtatttttagtagagacggggtttcaccatgttggtcaggctggtctcgaactcctaacctcaggcgatctgcccgcctcagcctcccaaagtgctgggattacaggcgtgagccaccgcgcccggccttaattctttattatgtttatctgttatctacattatttctcttcccatacatcttttcttctcttttaaatatgttgttgtctgggtccctgctgctaatacgttcaatagtaaatatctcactgtaacacttggtatggcaacactctgagctcaggaatgatgtaacggttaaatgtatgtgtggacttgactgtgccatggggtgcccagacatttggtcaaatattttgggtgtgtctgaggctgtttttggatgaaatcaacatttgaattggtagactgagtaaagcagattgacttctccgaatgtggatgggcctcatcctatcattgaaggcctgattggaacaaaatggctgggaaagagggaacctctctctgactgtcttccagctgggacattggtcttctcctgcctttggacccaggcttgaactagaatctaatgccacagtttcttctgg

SEQ ID NO: 46219 - DNA, 1047 bp, Homo sapiens
agtctacagtgagctgtgttcatgcctctgcactccagtctaggtgacagagggagaccctatcacaaaaagaaatgaattaagtaaaaaattttcttttaaaaaatttttcttattttttatttttttgagacagtatcttactctgttgcccaggctggagtgcagtggcacatctcagctcactgcagcctcagcctcccaggttcaagtgattctcctacctcagccacccaagtagctgggattacaggtgtgcgccctcatgtctggctaatttttgtatttttagtggagatggggtttcgccacgttgcccaggctggtcttgagctcctgagctgaagtgatatgcctcccttggccttccaaaatgctgggattacaggtgtgagtcagcacgcccagcctaaaaatgttctattaaaaagaagcagacctggttaatctgagaacctaactataaatactcatttagttctttttccttcagggcatgcagataaacaagcaaaaaaaaaaaaaatcagcagactcagagtagacgagaggttagaaacctctacatgccagtaaaaaatacttctcatttctgttttttttgttgttgtttttttttttttaaatagagatggggtcttgctctgttcccccggctgatctcaaactcctcagcctcccagagtgctgaaattacaggtgtgagccaccgtgcttggcccttcccactttctgagatgttcaagatcgtgtgtgtacgtgtgtatgtaggtgaacaattttgtttaggtaaaaacttccactttgtagccactaaaattctaaattgcttttggtaagatttgcccattcttttagaagagcttaggttctgagatgctattatgagaagcacttgagactataacatccttctccccacacccccaaactgggaaggagctgggagaccaaagaataacttggataaatctagcttgacggctagatgagcttgttaggacttaacttcaggacactcctggatggtggctggacagctctaga

SEQ ID NO: 46220 - DNA, 1027 bp, Homo sapiens
acacagttggtcatagtattactttataatcctttttattctgtatggttggcaataatgattgctgttttaattcaggattttagttctaccttgctttttaatgctttatattttagagatctttttgtaaaaattgaattcatcttttagtgaccacatagtgttccataactaacctatttatggtcattaatgttatgaataatgccacagttaatatcttttgatatattgtagggtacttttggtgatagtgtgtttctgagggtaaattcttagcagttgatttgttaggtcaaagggatataatgttcaatattagtagatattgacaaattatcctttatagagtttgcactatttacatttatttttctatactatgatatcctttacttctttgtcttttattgggttatttattttaacaagtttttgttatattaagaagaaattagcctttgtcatatgtcttccaaatattttttccttgtttatagtttcttttgaccttgttgaacattttttgccatacggaagttttaaagttttgtgtggtcagatttatcctccatttccgttctggcttctggactggtatcactgccatgtatcacacggtattactgccatataaataggctctgttaggcttcaagaaacaagtgatggattttattgaattcatagagaataagaaaagtaggactagccacacagttaagtttatgttttggggatacagcagtcttccaggagttagtctgtaaggtctgccctctgcagggagcttgattgaaaatctagtagttggctgttcagagatgacattccattcctctcttgcctcccttccttctctctaggtgacattctactgttatggttctgctgccttttccgccgcttgtatgactcttgatctttcttgtttattgaagccttatagcttctgctctcttgctctgcttttcgtcatctctctgtaggtcattgtggcttctgtgcccattggtaagtactg

SEQ ID NO: 46221 - DNA, 1013 bp, Homo sapiens
caccatcttggcctggctggtctcgaactcctggcctcaggtgatctgctcacttcagcctcccaaagtgctgggattacaggcctgaaccaccccgtccagtctgattttttgttttaaatgacaaatgaatattatctctatgttataagacataaggcaactgaagaaagccttcttagtgtgaaatatttatcttagatattttttagccaaaatgattttagtaaacattctgtttatattgctaactgaagaaggtcaaatgacaatgttgataaaagtgcaagccatttcaaagattaaagcagcacttcacttctatgcatatattgtgttttagtcccatcgatagcttttacaggatcaacctgtcattcaatccatccattcttttctttttttttcttttcttttttttgaaacagagtcttgctctgtcgctcaggctggagtgccgtggcagctcactgcaacctctgtctcctggattcaagtgattctcgtgcctcaccctcctgagtagctgggattacagacgtgaaccaccatggccagctaatttttgcagtttcagtagagacagggttttgccgtgttggctaggctggtctgaactcctgacctcaggtgatccacctgcctcggcctcccacagtgttaggattacaggcatgagccaccgcgtccagcctattatttttttttagaaatattcatttaattccaattttgttgtgcttagataccatctactgaatccttatatatatacatggtacaaggtatgtaaacctctgtctgttataaatattttctctcaggctgtcacttgtcttttaacttgtgctattctatcataacagagttttaatagtatatagtcaaatttgtcagtctcttagtaacttttgagttttttatcccagagagatcccatcagtacccaaattattaatgtcctgtagtttttctaacattttaattgtgtatattttctaatgttttctgct

SEQ ID NO: 46222 - DNA, 1031 bp, Homo sapiens
ggtctcgttattaatattttggttaggctagtctctccaactactggccttaagcagtccttccaccttgacctcccaaagtgctgggattatggcgtgagccactgtgcagggctgaggcttgcatcttcatatctgttggactctgtagtccttcatgctcttgctccttggctccctctttcttgaatctccactcttcccatcttgataaaccattacctctgagtctagtggtttcttaactcacttgtacattagaatcatcagggaagctttaaaaaaagaaactgatgctgactgggtgataatgatgtatcagtgtaggtttatcgattgtagcaaacattattgtggcatgggatgtcaatatgagtaagggaggttgtgcatatatggggacaggggctatatgggaactctctgtactttctgctcaattttgctgagaacctaaaatactctaaaaaagaaggtggtttttttgtttgtttgtttgtcttaatggtcaaatggtcctgggatcagaatacgtgctaagcatggcaaaaaagatgatcaacatcatttagatagtgctattcttaaaaaaaaattctttctcccctagagtgatgttatttttatgctagtgaaattcatataaacatacagctagcatatatcatctaatttaagacactatcaattgtaagccacactactaagatagaaaattgctaattaaactatgccatactgtgtgtgtatgtgtatgtgtaaacgtacgtatacacactactgatgtctaggtccagactaagaccattgcctttagtctatgaaacttgccaggctgggcagggtggctcacatctgtaatcccagcactttgggaggccgaggagggtggactgcttgagcccaggagttcgagactagcttgggcaacatggcaaaaccccatctctaatctccacaaaaaatacaaatattagccaggcacggtggtatgcactggtagtctcagctatttgggaagctgaggtagg

SEQ ID NO: 46223 - DNA, 1080 bp, Homo sapiens
ttggagcttttcttaattgtaagtcagagataataattaatgtcatgcctagttcagagaattattgtgtgactcaaatgagatgatgagcattaagacattggaaactttaggtactatatgaatgttttcttattggggcaaaccattttcctcttgtaaaggtgagcccagggacatgtctctcccccatctctatactatcagttctgatctttgaatgattgcagtgcccctcatagggttgggtaaggaccaaggcagagaatatgtagataatgcagcacagtacccggcacatagtaagcattcagttaacagctacaattacttaatggttttgaaatagatatgccaggcactaaagaaaattaattgataaatgaaataactactgctcctaagctgtggccgtggattagaatcaccgtgtctgccatgtcactgactctacagaatactgtatatggaaaaatggtttttattatttgttattttctatatttggatgacatttctgatctgaatttcaaccgtgacttctagtcctctgtatcttcttcttattctgacttgctacaatataaacttcatcctttaaagaaaaagtgaccctgttattcttccttggggtgttttgaatatcctccccctccttgcccagcttccctcaaatgtgccaacaatttttttcttttcttttctgtttttttttttttttagcatcagcggtaccatcaagttcctggactcttgaacttgatgaaatcgagatagtttctgtagggctccatttggaattgaggagcaggtgtggtctagacctaaggtccagtggtgggaggaatggaaagaagaaatggagccaaaggaaactgagggaaggattcatgtttctctggctcagtgagtgggtgggtcaaagaaataaaatgtttgtaattggttttaagcctgggcaactggagaaagtggtggtagtgttaataagagaccaggaggaacacaaagaggaaagaatatctggttttggagggaagaaggaaaattcagttttgattctgaatttgaggggggttg

SEQ ID NO: 46224 - DNA, 1081 bp, Homo sapiens
ccagcctgggcaacaagagtgaaactctgtctcaaaaaaaagaaaaaaaaaagaaaagagacggggtctcattctgtcgctcaggctggagtgcagtagcacaatcatgactcactgcagcattgaactcgtgggctcaagtgatcctcccgccttggcctcccaaagtgctggaattacaggccaccctaccttgctgaaatatttaaattctgaaggaccaaactatccccttctcaaagaacaatatgaactagcaccgttataaacttggtactgctgtaagagtcctactcctgagggcttccacccatcttattttcatacttatgaaaaataatacatgttcaaagcaaatgaatccaaacagtatgcaattaaaactcaaactctcttagcctagacccatttctcccagagcggctgttatgatcagcctctgggtgtccttccagaaatgtctaggcaggtaatgtatacaatcactttaaaagttcaaatgggaacatgtcatacacattattctgtactttgcttgttttaactgacacgtatcttggatattaaaaaaaaaatctaacatatagtttccattttttaagaaaaaagctttattgatatataatttgccataaataatcaccatatagtttaccttaaaattcacttgttttaaatgtacaattcagtgatttctagtaaacttacagagttgtgcagtgatcaccacaatctaattttagaatattttcatcaccctgtgtctatttacagccactccacatcccgtgcccgcaggcaaacacttatctatttagtttctatagattgattttattactctttttaatagcaacctgtggtccattttggaaaaatacaaacatgtatttaattgtgctttatccaagcacatttagcttttgctgatgttttattttgctgcctgcctactttaaaaaaaattggaaaagattgaaattttgtctttgagccatacttgttaagagtgataagggagttttagctgaagttgtttgtagattttccagtcattacctgtggaactaggagaagaatt

SEQ ID NO: 46225 - DNA, 1050 bp, Homo sapiens
tttttagaaatgcctccctcactttgagtttatgcttttatggttttattttttatgtttaaatctttcctcaatctggagtttgttttgataatgagatgtgaggtataaatcttaacacctccacctccaattggccacccaactgcctaacaccattcattgactaatggcttcttcctctattgatttgaaataccactgttgtcatgtactaaattcttacattcttttcttttctctttatctgtatgttcattgccagcagctaaacctagtttaagttattgtagcttcataaaatgtaaaaatgtctggaagggctagtttgctctgattactctatttttttttctgtcagtttttttctaggtattcttgccagactatttccaaacgaacattagaatcaacttatctaggtgaaaattcaacaaaaatcatgctggcagatctttttctccttctctctcctcccccctttcccctttctgtctgtctgtctctctctctctctctctctctctctctctgtctctctctcacagttagaatttggtctgtttctttattcaataccccaatatatgttcattagggttatactgtatacactacacataacagttttgttttttgttttggatattatttgataataagaattttaccacatcattaaaaaaagtttccccaagctataatttttgataattgcactcttccactattcaaatgtttatttaactctttctctcctggagtaggtttacattccattttagctatgatactgctttaagagaaattgttttaagataaatttccatagacaggtcaaaggaggtgaatatatgtaagcttttcgatgcctgttactgaatctcattctggaaaacataactgtcaatgccctctttttctcatggtaaaaaaatacataacaaaatttaccatcttaatcgtttttaaatgtacagtacgatagtgttaactgtatgtaccttgtgcaacagatctctgaaactttttcatttttcaaaatgaaaa

SEQ ID NO: 46226 - DNA, 1123 bp, Homo sapiens
gttttatctgctgggtttaattctcaatcccagaaaaaaatattcttcaaggggtatcagttatagtttcaaagaacaaaatatgaaaatattgtccagcaaagcaaatcattgatcttttttcaaaattacttatattttggaaagtctatatagaatatccacaaatttcttcagccctcttgttgatttcatattttcatgaaactttttcccctaataatttgtcttcgctctttaatcagtgctttactacattactcagcctgaaaaaatatcttttccttcatctgacaatgtggaaataaagaactccatttctgtcattctggttctcttcagtgtccattgagaaagtttctcaactgtttgtaaaatacggggggaaaaaaacacgcatttctaaacctggtacttaaggttatactggattgtttgctacctaattagaagttattggggaaggggcattgtgtctttttatatgatttttagccaaatccagatgttctgatacacatttctgaatacctgtctgactgtaaatacagcctgtggaggttcaggttgataaacctttcacctgactgctccacagccatgctccttgccagcttctggcacattgtacatagatttgttgaatgtttaaatgatgttgtttttctaaatgctgttctctaaaacaattttttgaatttcttttgctttccattgttttggactttgtgtgttcgttttttaaaaaaaaaaatgtttcctaaatatttaacaccaggaaaaatatttttaaatacactggtgctaattgaaacagaaggaaattttcagatcgaagatgtacaatgttaaatgttcataccagttaaactgcactttcccaaggggacagctggcatctacttgaaatgggcatcaagagaccaccaaatgtttacagtttctgtggcccgtttaagtgtaaaatgcagaagtggctctgtccccccagagttaaggatttgctacactggtcctctggaagcatttaagtagaagaaaaggcttatagtcagaatcactttagtaatcgtcttctggtccttggacttttctgttctgtaatgcttgtaacaatgaatat

SEQ ID NO: 46227 - DNA, 1050 bp, Homo sapiens
tggtaataagcgtcagtactctacttctcaagttaactggaaatattttacaagatgcagtgttttgtaatcacaaagaacgcagacattttgtgagaaatgaccttggttttatacattgtagcttattttttaaaatatagtattttaccaggcaggaagtattaatattataagtaattcttgctcaccaaacaaagggctatgtctcttttaagcaaatgttttgatgcatatctttttaattaaccctctgcagcaagggtagaaatacagatcagatggaatgggtattataggagaatcaagatagcaacagctactccttttaccattactagtgtgttttcaaagtatggaaaaagatgcctgaagagtcattttatatattttaaatctaaaaagtgttaacaggtatgcttataggccatgggagaaatattcttataaattttttagtgtaaaatgataaattctgtgtcacaaagacaagtttaccacttgacctaccagaatcacagatacttgcatttaactagcaagtatcatttggtggaaatttctaaaatcatagtagacaggcccaaagatagaattcttaggtgatcagtagtgtttaaaataattttgtcctcagcactaactatataactgtaatttctacataagaacaagtgcttccaaaatatagtggagggaaaaaataaaaaaggaaaataaaaaaacaaaacaaaaagaacaagtgcttgatttttcactgtgaagaactagcaggcacatgaggttgtgatcagaaagtgactgagttcccaagaaccaggaaacagaggggagttgtgaagagtttattaaaactgtacaaataattcagagctttgccaaaaccatttcataatgctgtacagttttttcaagcccactcactgttaaaacaagaaagcaccttttctttctaagattttagtaatccaaaagctagcctaattagccaagtatgcagataacatcaaaagcaaagctgagatagaacagccatacacccgttgggca

SEQ ID NO: 46228 - DNA, 1035 bp, Homo sapiens
tggccaccgcagggagctcagaggccaatctacgcaaaaggcatgcaaaacaatggattctggtcccaaaatatttctaagtaaggcatgatgtagccttttgattttttttttatcctttgacaccccagccttcagaaaaggtttttcatctctctccaaagaagtcatttcatagtgactgacaggacattctccagagagcgacaaagcagagtggccagcaggcagtggtgttaagccttgggccttcccagcagatgtgtgctgcattggtgggtgggaggcagtgtgacagcctggagaaaacacacaggtagcaagggagtcaggggggaggtacaagagggctgtggacacctggctcttgctcatcttcttggtgctgatcagctggtggtcaccatccctaagtacctcccagggagctgccattttctcctctgggagcagctgcctgaagcaaggagagaatgacctgaagggaagtacctccggccaagagtgcagggctgctgtgcctagcctgagcgggccatctctagcagatatggacttctctccaccacactagctgaaaagttttctcccttggttggcaaaagccagtgtcaggaaaaaagctgtgggtttctgaccaagaatgtgtgcgcttagctgcaaagtgcctgtcagcagctccaggcaccaacaaggtgcccttttattagacaattcctgcccgaacataaccatattgcagatgaaaattttcaatagagaatgacacaattcttgacctttctaaaaacttttcaaagagatagtcacatgtgtatatgttgcaaaagatttttgaaactgaaatgtcctccattaaatctcaagagcactcgagttttaagtctgctgtttctggtgtcacactaagacacacttttgaaagcagccctgggttctgaattagttggcactgctgaatccatgttcccccttcatcagactccaaagtgcagcattcacttgcaaaggttgagagaaaagtggccagaattg

SEQ ID NO: 46229 - DNA, 1086 bp, Homo sapiens
tcacgagttggaagagttgccccgcagaggacttgtgggaaaatgggtagagagtcgggagaccagagcagagagggccaggtgtttcctgcattggagttaagtctcatgtgagggcaatggggagcctcccaagagtgaatttctgtgtccccgcggctgttaccaagcctttgccctccactctcaggtaaagccctgctgcttgaaggcttcttccacctcccgcttccttaactctgctgacatcctgctcatttgccctttatggaaggcttgagccacctggccacaacttttctctcctcaatgctgccatcatcccggatgacatcagcctcgccatttccgatccagcgactttcacctctgccctgcctctgccctctactcccacggccataccttggactcggccatctctcagaatttttctacatagaaaatctccatccccagtatctccttcctactcataacctcctggtcttccatctcgccttcgcttttgtgtcctcggcacctgattttgaccccatcaagatctctggtttctctcaatttgtccccatcttttccctccaaccttcacacattgcccagtccagccaagaacctatggctctctctccaaaaccttgcactctccatgcccttactcactgtaaaacctggcatagggctagtccagcagcctcctctcacactcccaccccaggcttctggcacagccatcagaccccctctccagtgaccatcacaacaggatcaagctttctaacctcagctgagcctcggttgctgcttgatagacttttggtgtcctgctccattttctctcccagtacccataacagcaattccaaaccttaagcatggcaatgtcctctccactctccacagagaaacctacctgcttctgaggagagacctccagagagaagcatcagcttccccagccccacacctacaagcatgcttgcacccagcccatctttgttctcctcactccaggtagacggggtggttgttcctccttttgtctaaagctacttccattggagcccaggaccctcatcatgctgc

SEQ ID NO: 46230 - DNA, 1104 bp, Homo sapiens
tcttccagcagagctagcgtttcctgtactgctttgtagttctggctatttatggtataaactatattcaagtcccataaacagggcttttcaattagcttgaaaaaaattattaaatgtttggtgggtaccagaatagcaagattcgtggttatttggaaggcttgttttatgctttgaggccactgtggcctaccacagagctacaccgcagaccgtgaatttagcaaatcccaggaacttgcctggaagtcagaattggtcccatatgattaaaaacaatttattcaagtacccagtttcttcaagcagaaagctagaagcattgggatcgaggaagcagatgtggaaagtccagatgaagcacatattcggaagacagcatgttgtcaaagacagtataaactggattcaggactacaccatgattttccagtttaatactattgcctttaaaatagaaatagtgctgctttatattatgaaggactttatggactgattgatgtgtactttcccaactatattttcatttcaccttattaataatgtgaattgtgaggaccttttgcctggtttactctgcagactgcatttaaatgcctttctccaagaagccttctttgactcactcctgagaccaatctccatggcacccaggactgagtttgctattgcccgtaacaatgggtcctgatccctctcacagcacctgaatttgcgtgattatttgtctgctgcccccattggacttgtaaaagtacttgaaaacgtaggttctatctagttggttcttgtgctgccaaacttagtgtaatacccagcatgtcataggtgctgaatttacttgaactgttggaggcaaaaatgaggttcagaaaacttaaacatcttgcccaaggtgctagaatgtgaaccccataagagtaaagcctcaaactatcacattcagtacaatatccccaatatctagaagagtgctttgcacagagtaggtccgaaaaaggttgaatcagtgaatacaatgggtaatagaccaggacataaacccaggtctgccctattaaaaccctgtacttttttatattacatccaaaaatatat

SEQ ID NO: 46231 - DNA, 1031 bp, Homo sapiens
gaaatgataacaatacctcctcatggggttgatgtgaagataagatgaaattgtatcttttaaataataatatccctggtacataatcagtaatgaatgagtagtaaataacaatatcattgtttccattgtagtggaaacttgtgtgttcacagatctgggtgccaggaaactttggttttcttagagggagtgagatactgctcttggatatgtctgtcttgatatctaaaagacttgggtttctggtgcagcgacatgtgttctttgatgggctctgatgatactatagctcttcagctacatttttttttttttgagacgaggtctccctctgttacacaggctggagtgcagtggcgtgatcacttctcactgcagccttgctctcccaggctaaagccatccttccttctcagcctcccacgtagctgggactgcagatgtgtaccagcacactcagctgatttattgatttttttttttaagagatggggtcttgagtgttgcccaggctggtactgaacttctgagttcaagtgatcctccctccgtggcctcccaaagtgctggaattacagatgtgagccactgcagctggccttcagctacatttggctacaacacgaactgctgtttgggggtactgttgtttgtgcattgcttacctaaactattcagtgtcctgggactgagttttggaaaatggtaaagcccagtcatgtgaagccatggttctcaagcctggctgcacgctgaaatcaccaggggaggcagggaagcaccatagatgcctggattctacctagaactcagtacttggaatagttccgattgaacctggatgagcagtattgagaaccagagatttagagacactgggaatcactgtttctcagtagtcatgtctgttttcctcagctggaccattctgttctgttttttgggttttttgtttgtttgtttgtttttgagatggagtctcactcagtcacccaggctggagtgcagtggcacgatctcggctcact

SEQ ID NO: 46232 - DNA, 1050 bp, Homo sapiens
gccattctgctttccacaatggttgaactaatttacactctcaccaacaatgtattaagtgttcccttttctctgcaacccaaccagcatctgttattttttgactttctagtaatagccattttgagtggtgtgagatggtatctcattgtggttttatttgcatttctctaatgatcagtgacactgagcttttttttaatatgcttattggccatatgtatgtcttctttagaaaagtgtctgttcatgtcctttgcccactttttaatgttttctttcaatttgtttaagttccttatagatgctggatattagacttttatcagatgtgtggtttgcaaatattttctcaatgggtgattcttgatcagttttttaagctttgaagttaattatgggaatattgaatttcaatattgagtgtgtattgggtaatagtattgaatacagtaatggcgttgtggttacaaaaaacgcccttgttcttaagagcgatatattgaaatatttaggggtgaggtgttatgatatttgtgggttactttcttctttttttttttttttgttgagtcgcagcctcactctgtcgcctaggctggagtgcagtggcgcgatctcggctcaatgcaacctctgcctcctgggttcaagcaattctcctgcctcagcctcccgcgtagctgggattacaggtgaccatcattatgcccagctaatttttgtatttctagtagagacgggattttgccatgttggtcaggctggtcttgaactcctgacctcagatgatctgcctacctcggcctcccaaagtactgggattacaggtgtgagctaccatgcctggcccatgggttactttcatatgattcaggaaaaaagtgtatatgcatgtgttgtgtgtatataaagatacacagagaaaataaaatgtgacaaactattagtaattggtgactgaaggtgaaggatatatacagatgttcattgtagtatgattttagcttttctgtaggtttgacattgttcaaaaataacaacaagcag

SEQ ID NO: 46233 - DNA, 1115 bp, Homo sapiens
tgtgaggattttggtatccttgagggtgggaagcatcctggtgccattcacctgcgaataccaagcagcgactgtacttcctcaaaagcactgctgacaacccaagatccctcagatgtccttaatgaaacccttttttcaggctctttcttaccctggtcgtcctcctcttctggttacactcccattactaaataccattcctactattgtatattaacgttccttttaaaacctagtgcctagaatagcagaaggactctacatatcatgtgattatttcagagtacagtggactcttgtattcatctggacatcgtaattgtattaatgcagccaaaattatattaagtacttcagcagccccatctccctagctcttgttgagactctagttaaaaacatccctgaggccttttatcctctgaactgctgcatcacgcagctgcttgtaaagccgtctctcctccaacttgtgcttttataattgaatctctttaaatgtaaatgcagacaattacatttgtcctagttaaatttcatcttgttatttcgagcccagagctccagcttgttgagatcttattgaatcttggttctgtcatggatttctgttatgcatacttgcttgtgtctgcaacccaggtagagaggcttgaaaataaatatatcccagctgcgctaactcaaagcaagaggtactgagagaagacagcagtgatgattgctcggggatggggaaggcaactgcccattctctaagcagtaatttcctaatatttttggtggcagttcacagttcaacattatgagatatagcaaaagccatttattgctaattacatttaactgatgtctatgaaggactattcctatacattagagtgaatttgagactatctccatcattctccagccattcttcagtgggagaaaaacggtggaattaaactagtggaaacaaggctttctcatctagtcccaatccagtcgataagctgtgtttgccaatcactgctccagcacaatggccctcagtttatttttaagtctatggcatgcctgaaggaccatgttcccatgagtgacacccttctgtaaatgtggtggcacat

SEQ ID NO: 46234 - DNA, 1032 bp, Homo sapiens
cccttcactttttcagtataggctgctcataatgaccttccaaagagtaaagtatgcaaaagaggaaaaaaagagtaaatacagtggagaaacctaacaaatactactttacccagatgtgatggaaataatgctttacttcttgtggttttcttcccaaaaacccatagccccagtgtaatcaagtgaaaaacatcagaccaatcccaattgaggtgtattctgtaaaatacttcaccagtactccttgaaacagcaaggtcatcaaaaacaaggaaagtctgggaaacatcacagccagcaagagcctgagggggcataaagactaaatgtaatatggtatccaggatgagaccctggaacagagaaaggacattaagcaaatcaaggaaatctgaatacagtgtggactttagttaataatgatgtatcaatattgtttcattagttgtgacaaatgtatctactaatgtaagataataggggaaactgcatgggggctgtatgggaactccacactatcgtctcagtttttctgtcaatcaaaaactgttctaaaaaataaattttaaaaaatgtttaaagataacttggagaaagcctagatgaccttgggtatggtgatgaccttttagaaacaacagcaaagacaaactccatgaaagaggcagttaataagctgtacttcgtcaaaattaaaaacttctgctctgcaaaagacagtgtcaagcgaaggagaagacaagccacagactgggagaaaatatttgcaaggactgttatccaaaatatacaaagaactcttaaatctcaaaaataaaaaaacaacccaattaaaaaataggcaaaagacctgaacagacatctcctcaaagaagacacgcagatggcaaataagcatatgaaaagaggttcaacatcatatgttattaggaaattgcaaattgaaacaagaaatcactatatacctattaaaatggccaagatccagaacactgacaacaccaaatgctgatgaggaagtggaacaac

SEQ ID NO: 46235 - DNA, 1036 bp, Homo sapiens
ccacctcccgctcttgcactcctccctgggttcctgctgtgctggccttctcccactagtatcattgtcacctgatcactttcttgcatatagtttcccatttcctgtcattgttttttaaaaaagtctgtaaactggtcccacctcatgtatgtgtgtgtgtatttacataggtgatttttatttccggtacctttctaacacaccatctgcactcatcaccagtccttggccctcaggcattcctaactcatccttttcctattttcccttcctgaacactcatcttccttctctccactgatccatgtcctccccataaccaaggtccagttcagggccaaccactgtaactctaggccacggagtcacaaccctaactgcacattaaaatcccctgaggtgttcttaaaataatattttagctgggcccagtccttgcacagttgaaacttaaactcttgggtaagactcaagcatctttgtttttttcaaaatacccctaacccggaggatactgatgcacattgaagagtgagaacaacagcttctagctgacacagcacactggaaatgctgtggtattgataaccagtgccacacacttccacaccaatcttttcccaccttgcctacctttgttttcttaccagattctgaaacgcatacttgtaaatatctgttcatggacaagtcattggattttaacgtacaaatatcctttctctgactatttcttcttgacatctttcattgagtataatcttatctgcatcaaacagaaatggaagcataaacctgagatactggcagaagctttgaaggtacttacttcattttattgcttattgttgaagttgaatcatgtgttatttttaggggtttttttttgttattagtttttcagaggacagagtctgactctgtcacccaggctggagtacagtggttccatcatagcttactgcagcctcaaactcctgtgctcaagagatcctcccacttaagccttctgagtaactgggactgcaggcat

SEQ ID NO: 46236 - DNA, 1130 bp, Homo sapiens
tatctacatctagagcataattttaatgaatgaattgtattatagcatatgtatgtgccacttttttggggtttatctctcccatctgagtcttgagcccatcatatactaaacatcttcacttggataacctacagacccatcaatacttggtgttctccagataacatgtatcatcttctccacacgcactttttctcccgtgttcccatgtcaattgctccttattgctcagtacaggaagctggacatcatctttgatccacactcccataccccaccttaaatcagtcaccacatcttaggttattcaattccaaatttctctcaaatccattgctcctcccttgtccctacatatgtgccatttttagtcagcaaatattctagtagacattttggttgttttatgtatttatagttacaaatagcactgtggttaactgaattagttatatattgctgtgtagcgaacaaattactcccaaacctattggattgaaacaacatgcatcagtttctgtgggtcaggaatctgggcatggcttagctgggtcctccgcttcaggatctcttgcaagtctgaaattaaagtgttggccagggctatctgaaggctcaactagggataaatccacttctgagcacatatgattgttgcagaattcatttccggaagagtagttggactgaggtcctcagttcttaggtggctgtcagctggaagtggctgtcagttccttgccatgtgtgcctccccatataccagcttgcttcagcaaagccagcaagaggaaacctttactcctgatgtgttaaaaggatctcatgtatttacaatgctagggagagaatctgctagcacgacaggagtcacagtcttttttgtagcctaattaaagaaatgacatcccatgccatcaacttggctacattccctttgctagaagcaggtcactaggccagcccacactcaaggggaagggattatatcatggtctgcaaaccaggagcagggatctttgggggtcatgttagagtatgcccccacattaaccatcctgtagccaagccttgtgtatattcttacatatttccaagtgttaaacctgagaagaaatattcctaat

SEQ ID NO: 46237 - DNA, 1992 bp, Homo sapiens
gggtctgctccaaaccctagctgcctcagtttttcctgtacctggaggtaccaccagtggctattttgggcacttgtatcagtcaaactcttaaaatcccttctacctggacaatgaagaaacatcaggatgcatcattaagtattggctagactcaagggaaataagcctttacttcagagttcaggtctaaaaattaaaagagaaattcaattcaattataaaacaatttatgacttaatacttcagcatattgcaaaataaatattgcataattattccttgtaactttttatatgtattattgtctagcatcctacaatttgaaatattaacagtaatttccagttcctatggtttgaatgtttgttcatttcaaaattcatgttgaaacttaatccccaagatggcagttttgagaagtgaggcctttaagaggtgaatggttaattctatttatggatcaatggattaatgggttaatgaattaacagtttatcacaggagtgggactgatggctttataaggagaggaagacagacctgatctagcacactcagactcttttgccatgtcatgccatgagccactttgggactctgtaaagagttcccaccagcaagaaagccctcaccagatacggcccctaaaccttggacttctcagcctccataactgtaagaaataaattccttttctttataaattattcagtttcaggtattctgttttaagcaacagaaaatggtctaagacagaaaaaggtactgagagaggggtgttgctgatatcaaattcctgaaaatatggaagcagctttggaactgagtaatgagcagaggcttggaagaatttcgaggagcaggctagacaaagcctagattctggtgaaggcttagaagacaagaagactagggtaagtttggatcttcttagagactgggtaagtgatcatgaccagaattctgatagaaatatggacaccagggccgggcatcgtggctcacgcctataatcccagcactttgggaggccgagatgggcagatcacctgaggttgagagttcgagaccagcctgaccaacatggagaaaccctgtctctactaaaaatacaaaattagctgggcgtggtggctagtgcctgtaatcctagctacttgggaggctgaggcacgagaatcacttgaacctgggaggcggaggttgcggtgagctaagattgtgccatggtactccagcctgggcaacaagagcagaactccatctcaaaaaaaaaaaaaatatggacactaaaggccattacaatgaggtttcagatggaactgagaaacaaggtattggaaacatgtgtaaaggcccttcttgttataaactgacaacttggctgcattgtgtccatgtctaaggatattatggaatgtagaacttaatacacctactgtatatccacaaaaattaaaaattttaaaaattaaaatgaaaaaaagagcaaaaaaagatccatgaattaggatatctggcagaagaaatgttgaagcagtaaaacattcaggctgctgcatggctacctttaaccacttacattaagctgtgagagggaaaaattgacttaaaatggaatttataatcaagaaagaagcaaagcagaaggatttggaaaactcttagcctggccatgtaaagagtgaaaaaacatgttcaggagaacgtgctttttttttcagtgacctttactgaggagatcagtacagagagaagggatgattaagagactagaagaaagaccctgaagacattttagatatctttgaagctgcctctcccatcatgggccccagaggcctaggagggcaaaatagttttgccagacaaatccaggaaaccctccgtgggcttcctgcccagggtccttgcaggtctctgctccctgcattctagcctcatcactccttgaccaccccagctgtgattcaagtggcaccaggtatg

SEQ ID NO: 46238 - DNA, 2025 bp, Homo sapiens
aatatttgtcagatgaaaaaaagaaagaaaatgctgtagcatgagagattgcttatttgtaatatgggtgccacattttgttgccaaaaatcatttataatggaacttagagcttatagcaattgtttgagaagtcctgcatttgtccaagtggtttctaacagttaaccaggaaaacagtacctttggaagaggaataaatgtgcctttcctgcctgttcacgttttgtaattaacgtttcatttctttctatattaaatcaaaagtatcttctctagaaaattattattttctcccattgccagatttgtcagactttctaaaattataggcctcttagttttctttaacctttaattgaaaattttcacgtattcattacttctgtttaactacttggaattatttgcttttctaatgtttttcgtataaatacatgttaagttatttaggattatttccttctactgtggcatggttgtgaaacattttatcataccctgaccctcataggcatctcaatttgtatttgttgtttggttgtctcataggaaactgacatgttaacaatttgaaatgtgaagaactgtgcttttttttttttttcctaagtctgtagggcaaaagttagacttctagtgtcagtttaataccaacttgcaattctataggacttattctacataaaatttccattagaccattgtatatgttaaaagacctggaattaatcattttaaattgccataggttgttttaagtatacctttattctttaattccacctcacttggagcacttgctggggaaaataatgaaaagaggaagaagaaagatgttttctgccttttctgactctggtatgtaggatattttccaccttttatggttcactgaatgtacttaaaagtacatgatcccacgccagtgttattgtgaggttcttaaacagtgtgggaaagttaattaggttttaaatccattaatgcacagcaaaaatcccccaatgacaagatataatttagatgtattaatctattatgggaaatactacttaaggcttcattgtttggggtatctactaatatacttgttttcattgctatagtaggaatttaatcatcataaatacagtgtgccagcagttggtgagataagttgcttttaaaaaaaatgatgatgagggaatcaagcattgtggattataatgatcaaactctcaaactctatttccatttactgctaccaagtttaataaatgtcggacttcccactgtcacctaagtatatcaatattttgttttaaagaaacttctttacctgatacagtaggaagatgtaggattttccttttgtttactaagaagaaatatatctgttgacaggtataaataatgaactttgagtaaatctagagtatagtgaaatttatcaatacaaggaaatctatatacaattggccctgtgtatccatgggttctgcacctgtgggttcaaccaaccactgactgaaaatatctggaaaaaaattgtctataccaaacatgtacagatacattttcttgtctttatttcctaaacaatacagtataacaactatttacatagtgtttacattgtattagatattataagtaatccagagctgctttaaagtataccagaggatgtgctaggttatatttaaatactatggcattttatataagagacttgagcatctgctgattttgtgtctatagggaggcctggaaccaacccccatgggtactgaggaatatctgtatccatatcttataaaatatataataaatgtttaaaaatatatatatgatattttggccaaaaagcaggataatcattttaggcccatagaatgcagagttcttcaatcatttaaaatcagttccctgtaacgtttctcactttatcttttgcttattctcattaaagctaagatttttgttgaactttactttctctggtttgtaaaatgaaactcaaagtttattttctgaggttta

SEQ ID NO: 46239 - DNA, 1046 bp, Homo sapiens
tgtatgtctgtgatacactatatgaagagcttctgtgttgggtagggagaaagaatttgatggtagctattgtagtacaatatgactacaaagtgctgatgagcaatagaagttatagtgttcggaaagcaagttctttaaatcaatcctaatgtgggggaaattaatctgaacatcagcatcagctcttccctgccacttaggtctctctcctacaggaagctgtcagtttcttacctatgttgtgttctcttcctggtccttacaaggaatcctatagctgtgagaagccctcccttctttggtagatccccatttaccccaaaaggtgagcatcttcatttgttagtgctgtgcatactgattcttctttctcttgcccttaccagctttaatgctgctgttgatttctgtccttctaaccagatgtttttgttctttctggctgtcttctatcattgaacacttttcctgcttaggacctatagcatagagtgatttttcagattgtctcaagttttccattaacaagaatatcagctcatatttatgaatcacataattgataccagcttcaaagaagcagcaagctaatttagactagaccttgcagatcaccaggaacagttttgtcaccagggcattgtacaaattgggaaaaaaaataaaagcaccctatttggacagatgaagtataaaaagttgctctccaggtgcatggatcagaaaaatgtccctcatccaaagtaaggaagcctcgggatgtggcttgaatggggactgaattttagcctcatttgaccagtgtttagggtttaatacacaactgcttgcagcagcttgggttgccatgccatctctgttttattttgttttctttggttttgtttttaagatccatagacttggtggctatctctttgcatcacaatttccaaatttttgtttctaggggttcttagaaatacaccctctaggccgggtgcagtggctcacgcttgtattcccagcactttgggaggctgaggtgggcagatcacgaggtc

SEQ ID NO: 46240 - DNA, 1032 bp, Homo sapiens
tttatgataaattaacttaaaatcaaataacttccacatttctagaagatgttgttggcacctttttcccgcacttcccacaacatgtctctaatatatgcctgtccctacctgcaaaccttgccgctgtatcataggctactctctctctctctgcctctctgttgaatgcctttaaaataccctttccagaaaaagagtgaaaacgtagcatagagaagtgaagggggcagggctgtcagagccatactgtgatatttgttctcattgtacaacctgaagactttccttggtctctactttccaaagaaaatggaaattgggggtagagtgaccatgttgactgccttacatacaaagggctttgaactcagcacagggaaaggctctctttaaaatgttagcttaatgaatccatattctaaggcctctccaaaaaagttcttaatactgtggcatacaatgtgagttccacatatgatccttcaacttgaaaacctctgtgacactcaaaatgtaaaactcttcacattatactccaagacttttcataaacacagccttaacccataacttccattttattcatgatttccaaatagaaaaaaaaaatggaaaatctcgaggaagacagtgtgattttaaagatgttcagaattgcattctttttggtgcatgaggtcttgtaatcccattggctccatggctttctaaggagggtcagttttctgagttctccctgtggacttctggagtttcactgcctctgcccctggggacccgctatgagattagatttttactttcacactatgaaccaggaacacagtgaggcttgtctacagaaccagtgagatggaaagggaccaggaagaggtggcacttcagtgcccacacagagagagaagggatagagaacagattcaggattgggcagtgcaggactcacaagcacgagacctgtgtccttcaaagggttttctagtgaattacctacttgggaatcacttaggatgcaagataaaaatatag

SEQ ID NO: 46241 - DNA, 1050 bp, Homo sapiens
tgggttggttccaagtctttgctagtgcgaatagtgccacaatgaacatacgtgtgcatgtgtctttataacagcatgatttatagtcctttgagtatatgcccagtagtgggatggctgggtcaaatggtatttctagttctagacccttgaggaatcgccacactgtcttccacaatggttgaactagtttacagtcccaccaacagtgtaaaagtgttcctatttcttcacatcctctccagcacctgttgtttcctgactttttaatgattgccattctaactgttgtgagatggtatctcattgtggttttgatttgcatttctccgatggccagtgatgatgagcactttttcatgtgtctgttggctgcataaatgtcttcttttgagaagtgtctgttcatatcctttgcccactttttgatggggttgtttgtttttttcttgtaaatttctttgagttctttgtagattctggatgttagccctttgtcagaggagtaggttgcaaatttttttcccattctgtaggttgcctgttcactgtgatggtagtttcttttgctctgcagaagctctttagtttaattagatcccatttgtcaattttggcttttgttgccattgcttttggtgttttagacatgaagtccttgcccgtgcctatgtcctgaatgatattgcctaggttttcttccagggtttttatggttttaggtctaacatttaagtcttaaatccatcttgaattaatttttatataaggtgtaagaaagggatccagtttcagctttctacatatggctagccagttttcccagcaccatttattaaatagggaatcctttccccatttcttgtttttgtcaggtttgtcaaagatcagatggttgtagatgtgtggtattatttctgagggctccgttctgttccattggtctatatctctgttttggtaccagtaccatgctgttttggttactgtagcctcgtagtatagtttgaagtcaggtagcgtgatgcctccagctttgttcttttggct

SEQ ID NO: 46242 - DNA, 1070 bp, Homo sapiens
aggaccaacatcaaattccatctgagaatcctgtcgcttgtctcatttgatgctctcagggaggttggtagtgtgagtcaggatttaaccacccgacactgctctgcactccgtagcattgtcatactcacttgggacactagcagagctgtaaccagttctattttacaaatctgcaggctaaatatgcctaattcgctgtggtttgaggaaaagagatatatcatggctatgcctaggactccatgtgggccaatcctgatgaaaacaaccacaggacaagttggcagtggaaatgtcctaagatggcacagaatgaagttgattgccatgaaaatatgttgtgctggtcattctcaaggagtcaggcgttcagtctactgaaagtgaaggaaaggcatatctagcaatacttcttattttattttgaggagttctgcttttaataacattgtcagcatgcactaaatcattgtctctcaaggttttgagcagctgtgatgcagagggaaaagcacagggtgttttgtgcgtattggatgagataactgacctcatgcagggctgagaatacaacaggtgctttttacatgcacccactccctcatctatgccctttccaatggtccccatccacactactgtttttctgcatgatatgaaagttaagatataaatatgagagtatgtgagtatgtgtttgtgtttaagagatgccctcactctgtcgcccaggctggagtgtagtggcacaacatagatcactgcagcctcaaaatcctgggctcaagcaatcctctcacctcagcctcctaagtagctgggattataggtgtgagccactatgctcaaattattgtgttttaataagtcatcattcattttagaccagtgattttcaacatggggatgattttgctcctaaggggatatttgttgaagtctggagacatttttgtttattacaactcagggcaggaaatgctagcccctcaaaacaaagaattctccagccccaaatgtcagcaaggccagggttgaaagccctgttttagagcatgtattttaca

SEQ ID NO: 46243 - DNA, 1023 bp, Homo sapiens
cacagactgctcacagtctgatttaatttaaatcacagactgatttaatgtttaatgaaatctcttagctaatgtatgctaacactgaatggtgcttcaatataaatgctcaaagttggctttaaaaaaaaaatcaaaactcttcgagagttctactcttcctgtaggctgcctccatgtgcctggggacacaataccatagttgcaaagtgcccaaaagagcccctgccattgactgagtcatctcacatctctgaattatcttctgtttcaacttgaaccctccttttcagagaacagatattcccttttgcttacttaatagttaatttcaagtgttcccctgctctgggttggttattctatagtaaaagtctcccctgatcacttttgtgacttgaatgaggttcatgatttattattaactaactcctcagaatatacatatagttgtttcatttctcatctatgttatctgttatctatttagtggcttatctgtgtcacttttaaatctctgaataattttcttctgacatccatcaaaagatacatgtaaaagaaatgcaaactaattttaatatggatataaatgaatgaagaccattgacagtcatatgtactgttttgaattttcttcactttgggcttgaggagttgggagctgatagttccagagctcctgcctcatgcattgtgagaggcacattgggaggttatacaagttatacacgcaagcagttcatgtgcagccccgcagagacagcccctgagggctcgctcattgctgagttcaagggcaggggttaagtatgaggggaaaacagctctgtacataatttatatgaccacatttctagtccttactggttatctttctggataagaattggaatgaatagcttaaagggagcacttactgtgtgttggctgccatgttaagaactgcccttcatcctcactgtgaccttgtgtggtagtactttattatcctcttttgtggaagtgacaactgaggcctag

SEQ ID NO: 46244 - DNA, 1063 bp, Homo sapiens
tatgaaaatgcattggattcacattttctgtccatagattcttaaacaataaagaggtaataagaatgcacaaaaatagagaaaatatgacattttctaactggtatgacttcattatttactcaaaaattatgcttagaaacagttatatattgtctaagcttatacattgtagaaatgtaacagtagatttttgtttaagaaaactgaaagtattaaaatgttatgtgaccatagtacatattgctatacttgttttatatgaattatttttgtaccagataaaattatttttcatacttgtttgcttttaggtggaccatttgatttgatgtcacgaagagtaattgctgcaaataatagaatattagcagaaaggatagctaaagaaattcaggttatacctttgcaacgagacgacgaagattaattaaggcagcctcatagtcaatcccagttgcttttccccagatttggtgactcatcaatggatatgtgttttggatgtatgatatgcttggtttaaattctctttgtccaggtcaaaaatttggaacttgtttcttattttactatgtctaggtttgcaagaattgacataatgtttgtttcactgatttaaaaaattttgcatgtaagaatgtactttaggaaacatacccaggaagtacagttgataaatataacatcaactgaaatagtcaattagcaattttgtgtttctaaatatctatggtcccctgaaattttgacttagtatataggtgcagagacacccacttagaaagttaactgtttggaaaaacatttctctttagtttcaaaaaccatatataattaaatttgtaaggatatactgagtaccctaggccaacttttttttctttgcagagaaccttttttgttttattcttcagtgttcatatagcacctggcccattacatatctaggcaactaaaaacaaacattgtaagaatgaatatttttaatgtagtaattcctagttacaatagatacataaagtaatgaactcagcattctgtacttttgcttcaggtttga

SEQ ID NO: 46245 - DNA, 1048 bp, Homo sapiens
tgttatttttttctttaaagacaccagtgggaatgctccatctcctttgtgtcttcatttcagccattttctctctgtctctttttacttctttcttttattgcttttcctaatttctctttattaagttttcttatcatctgttcttttattggcaccttgtaatttattcttcgttcctgacataattttgtcttttatttcccccccatttctttcctgagttcagtcatcttgttttatgtacgtattttggtccatttgtgctcttagtttctatatcgctgatgtaacatttttttcagtattcacaagtttttgtttgaaaatatttaattcggattcgattgatattcattttattccccttcattgttggttttgggggagagactttacagcaaaaagaaaaaacaaaaccattttattaacagcgttcgatgttttgcagtagttttgtgtgaatgtggtctacttttttctattttcacttcgttttgtgatcagggttcctgctttctgaatttcttattttgccagttgtgcctttctgtgcattttcttttatgaatacctgctggttgtagatagagttggcttgtcttgtttatcattcatttctgcagggtccttaagttttcactctttttttttttctttttttcctttttcttttttttgttattattatactttaagttttagggtacatgtgcacaatgtgcaggttagttacatatgtatacatgtgccatgctggtgtgctgcacgcattaactcgtcatttagcattaggtatatctcctaatgctatccctcccccgtccccgcaccccttagttcctacttttccttcacttgtttccaaggagtaccatctctgctatcttatttgattctccttcagaatcacagcttctctgaggctgcctggtcaggttctgagtgttttctagccccttacctctagccaagactatgaattaccaagtgctgatctgtgctcagtgtttttgtttttgtgtttattgtctcagtgactcttttc

SEQ ID NO: 46246 - DNA, 1025 bp, Homo sapiens
ggcttcctttaaaacaaaattttaaaaaatgctttaatcaggaagaaaaagcatcaggaagaaatttagcgtgtgggtcttttgccctcctttccactcctgtcctctttcctataatgtgggccccaagataggagtttctgaatagtcttcaagatgtaactctgtgtctattattttctattggaaaggagacaaaattagggttgttttataaatggtgccacagtttttagtctgacagcttaaaaagctttactgtgctaggtacagacttcagagtgtgatcaagccagtggtgagttattttagtcttcagaagtcagtggaaaactggacagtttagaacacaaatatatgttgggtttttttttccctctgtgaaactcagggaaataaatttgcttttttcttattttttttggtcctggaattttcttttctcagaatgttataatagaaagaaaaatggactttaaaatcagaattgaattcaagttctgtgtcatttgtctgtaattttgggcaaattatttctcatctctgaaccttaagttcttcatctttacacataattttttcaagtaccttttgctgcttcccttcaagcttcttttatttcagtattcccagtgttctttctcgttttcactgtattctcctccaaaatattatcctaacttttaaagtatttcttgtgttgtttcttatctattctccaaacgaatgttttggttttttaaaaaaatgtaatatggtacagacacactgggaagcaatttcatagaatagtctttatgaaaataatttgatatagaaattaggtaatttaggtgagaaatgttttttactgggtataggcataaatcttgggaaaaactctagggcagggggtgaatcctgaaatgacagtctgtttctaattaagacgtttttgtgaactaactattctataattaagacttctaagacagttataactactttgtacagatatttgtcaaatattttcagaagatggctga

SEQ ID NO: 46247 - DNA, 1063 bp, Homo sapiens
gaactcagattatgttgaaagagctcatctgttttcttgttatttctctttctacattgacctcattttttcccattcgaggaaactttttccacattggttcaggaatggctgttaggtgacggggtttgctgtaggcaactccaggtttaatttgataaaacttaaaaaaataaggagaggccgagtgtggtggctcactcctgtaatcccagcactctgagaggccgaggcgggtggatcacctgaggtcaggagttcaagaccagcctgaacaacatggtgaaagcccgtctctagtaaaagtacaaaaattagctgggcctggtggcacgtgcctgtaatcccagctactcagaggctgaggcatgagaatcacttgaaccctggaggcggaggttgcagtgagccaagaacgtgccattgcactctagcgttggcaacaagagcgaaactccctctcaaaaataaataaataaataaataaggagagtgctctttgtctcctaagctgttgaacataaaatcccaggaacagatctgattggcctaacttaggccacatatctgtctttgcacagatcaccctggccagggtcttggtcctatgcccatgcatttatgtgtgtttttggctactgtgattggtattccaagtagcagataccttgttagaaggtaattctgctctgaccagaagagaggaacggttggcaccagacaaaaactgatgtctattttgtctatgtaatggttgttttaactttttctttttacagacagaaagaatttactttcaggttttcttacctaaagggagcaaagagaagagcaaaccaatgttcttttgccaccgatggagcattggaaaggccatagactttgccgcttctctagccaggcttaaaaatgacaataacaaatttacagctaaggtaacatctcattataataatatttctatattaataaaggttttatgatgctccattcaagcatgtttatttattacagtatgacttacttctcccttcacagaaattaaggctgtgtcacattactt

SEQ ID NO: 46248 - DNA, 1993 bp, Homo sapiens
ggctaacacggtgaaaccccatctctactaaaaatacaaaaaaattagccaggtgtggtggtgggcgcctgtagtcccagctactcgggacgctgaggcaggagaatggcatgaacctgggaggcagagcttgcagtgagctgagattgcaccactgcactccagcctgggcgacagagcgagactccgtctcaaaaaaaaacgaacaaaaacaaacaaacgaacaaacaaaaaaagattgttagaacctatcaggttgattttccaatccctaatggattgagactactgtttaaaaaatgctactttagggaatatacctagaaatagaaaacctggattatgggctttgctgatcttcagctttactagatatggtcaacttcctgttgtcagtgattgtactcatttgtctctttctgttagtgcttccaacaatgtctatttttggccatttattccttaataaaaattttaggatcactttgccctgttcggtgaaattatgattttggtaggaattatgctgaatttgagattagagagagttgacatctttagaattttgactcttctcatctatgtctgtggtatatcttcccaacttttcttaaggtttccttttatgtgtaattatagaagtaaccttctataatgcttaccataaatatttacataccttttcctagttttattcttaggctctttataatttttgttgtcattataaataatacctttttaaaaaaattacattttcctagctaattattgttggttaatgttatgttgcccttctatccagcaaataaattcctaatagttcccatattttgtagattttctgggctattttctgtgtagtcatatcttctccaaatgccaatttttgtgagttttttctgcagattttctcttctcttgtgttcattatcattgtttgtcttaatgttgagatcttcagaacaatgttgaataatatgggcaatagaaggaatcttaatcatgtttctgactttaatgcaaatgtatctaaagtttcatcaagtattagatatactgtgaatttgtataagtagcctttttcttgatactattatttctttctattcctaatttgctaggaatttacactatgaatggatattaaactttactgtaaatttttttattacatctagtaagatgatcattttttcctcatcaatgtaataaattttatcgatcagtttttctgtcgttagatcatcaaatattccaggataaatcactgactctggtatataattcttttaaaatgcactgagaaattgatttgctaacattatttagtgtgtgttagtgacattaatagcaagattatgcttaaaaattagttgagtagctttctctcttctattctttgaggtagttgtagagggtgggaatttgttctcaaaggttggtaacactcagttgtagtaactcttggagaattttgaatactattccaatgtgttacttcttgctttatctggataatctatttcttctgaagtcaattttggtaaatatttttccaaaaaactgtttgatgtagatttttcagtttattattttcaacttgttcaagttattctgttatacttcagaatctttatgtgtctttagtcattctgcttcttccttaatatttttcatttgtacttttccttctttctcctttagacagaacagctagaagtttatccttattttttcgtagtgttttcaaagaaccatgatttggatttaaagacctctgtgttttgttttctgtttcactaatttttgcttttatattatttccttctgctttgtttagatttttctctgacatcctttttccagcctttcacatagaatggtaatttattgattttattttcgttttgttttgttttgagacagagtcttgctctgtcgcccaggctggagtgcagtcgtgcgatctcagctcactgcaacgtccccc

SEQ ID NO: 46249 - DNA, 1307 bp, Homo sapiens
ccaggtttttcactccaaatgcggaatttttgcagtatacagtcatcaaaaacaacacctagtaaatctgggaaacaaaacaaaaaagaaaaagaaaaccactagaacttatttttgtctgacttagtaaagttacaagtaacatctattaataccttatgttaatccaattactttctgtcagttattgaagttgtgattaattttgttagagtggttacatagtgcttgctacactaggatattagtcaaaatgggaagtttttccatagaggttgtcttcttgcttaagaaaactaaatcaaaatcagatactgaccagtatatacattttctctcaattttagattttcttccatttgtgtgtgatgattgttcaggaatattttggtaagttaagtttttatgcaggatttgggagtaattttagtgtttattaatatgaggttatttctgaaaagtagaatgatttaaaataattgttactttagccattgattattgatattcagtatagttatagactctgattacttctccatatatatgactgatttttaaacttccaaaagtggggttatgtatgtgaattttatataaaagttatatttttgtcttttaattacaaggagaaaataatattcacaatataaagaatatggtaaagatccagttataattattgctctttattttaattaataaaatgaaaagagcccaacctataaatgccttaaaataggaatcacagcatttgactacattacatgccaagtaaaacctgggaattaatgaagaattttggaaaatggattttccttacagttaaactttaaaatgtcaagcatttaaattataaaatagagcactgaaagaatgaatttttttcagaatgtaattcagaatgatttgttggaagtaaataaaagtaatgtatatttttaaattatttggaattagagcacttttcacattttactactgatgatcttttagaaataaaaagagctgaaagatatgtttatattttcatgcaacgtaaacgtaatttagggtggtgaattgtttttactcatattgaagttgaacatttgtgttttaaaacttttgagactatagatgctccatctttatctgacatttcagttttttctcatattcaaagttattaatgtagtatgagcataatgtatcttaagtatactgaacattaaaatatcgcaaatttctgcagttatctttaagtatgttatttaaataaacacttgctattattatttaagccttgaacacagaagcagggagtc

SEQ ID NO: 46250 - DNA, 1007 bp, Homo sapiens
ggagttgggggaggtcaactcgcccaactagtgttcacgtggatgtgtgtccggaagaaggcccttccttagcttttatcaaattctcaaaggcatcctgatcctcagattattccaccaaatggtcatcatgctctcccagctctgtcattccctgattctcattattattgtttgaacaaacatttacagattattgattttggtgcttggaccacataagggtgtaaactacagtcttttacacggaagacctttccaactagtaagctgcattttagagagaattagttaataatatggcaatgggctctccccattgcactgagagaccttgggatatacctagtccaaggtgatgtggcattggcttcaggatgccatacaccttgaaaaggcaagtttttgaagcattagaaccacacagactgctcagtcgttgttactaggtttcacacactacataaggtagcaaacaggtttaatctccccttggaacttcagtcattggtatcaagtgcctgaattaccgtgtcaaagactcttgagatttagcccagtttcagtggagttccataattgattagtgatttctactgtgggaatgcgtgataggacaggtgacacaatcccttctaggttcttgttacttatagccatctatctatctatctttcaccactggctgtaataacaagccagtgtgacttttttcatgtggaagcttagccatttgggttttgactgtgaattatgtgtgtctatgcctgatccttcgctagtgagtccaatacacattatatgccattcatgacatagttcattttcctttccagctatatatgtctttagtgtcaataactgagatgaggccaggcctatctgtttgggactagtggaaagcagttaagatttagactacgtcaagtgtatatcctaaattttatctaccttctggagggattgaaggatggtatcaggtgctgggaagttgtcttgacttaact

SEQ ID NO: 46251 - DNA, 1028 bp, Homo sapiens
tcccattcctccttttatcttgtgtaaaataatttttagtatgccattttgattcttctgtagaattttttactttttcttatttttcagtgactgctaaaggtattatatttcagtgaaatataaacttggctccaatatctctccgtttcctccctctttctttgtgttgctattgttatctattttacatatatcttataaacctaacaatacagtgcaataattatttctttatacagtcttttgtgctctaaagaacttaagaaatgggaaaatatatttcatagattattttatttaatccacgtgtttactatttctggccctcttcatttcttcctggaggttgatgtgatcatctggtatcacttcctttcagtctcataatcttcgtttagtttttcttgtaagacgggtctgctagcaacaaattctcacagtctttgtttagctggaaatggtcatttttgaaagatagttttactgacagatttttttcttccagcactctgaatgtgtcattccactgccttctggcccctattatttctgataaaaaaaaaatcaacctttatattgtttccatgtgcatgatgagccattttgcccttgctgctttcaagatattctgtttgtttgactttcagcagtttgattatgatgtattggggtgtagatctctttctgtttctcatgctttggcttcattgagctttgttgacttgacagattaatgttttatatcaaactttggaatttgttagccattatttcttcaaatactttttcactccctttttctctcccttctccttcttggactgtcattacttgtatatttgtataccctgtgttgtgcaaaatgtctctgaagtgctgttcatttttcttcaattgcttttttctctgatcttcagattgaaaatttctattgatcttcagattcacagatttatatttcggtcatattaaatctcctgttgagcccctcttgttaatttttcagttactgtgcttttcaactc

SEQ ID NO: 46252 - DNA, 1031 bp, Homo sapiens
tgggcggctgcctccacgatgccactgctcatcgaggggcagcgagtgcggctgccacagtccgccggggacctcgtccgagcccacctgcctctggaggaaacagccagatgtatcagaggtcagtctgttcaacaactgggaccccagggccttctgtatgttcagcaaagagagctcgcagtgacctccccaaaggatggctccgtctccattttgggttctgataatgccactacttgtcacattggggtcctgttgcacacaggttatggcgccacctgcttgacacattgtgatggaaccgacaccaaagctggggtccccttgatcatgaactccataaagtctttttccgactgcgctcaatgtggaagcctggaagtatacctcgtgggaggcttcagtgatgtgggaggcagttgtcacaaaaactcactcattaacttcttagtgaatttgacaggcaagaagatgacattcacttagtgatactatgattatgtgtgacagaattaaatgaccaggaagaaaacgaataacactttctaataatatatggcattgctgtcaacttaagactgcaaagatttacagagcctcctttcttttttttgtttgagacagagtctcctctgttgcccaggctggggtgcagtggtgtgatctcggcttactgcagcctctgcttccagggttcaagtgattctcctgcctcagcctcccaagtagctgggattacaggcgcccactgccacacctggctaatttttatatttttagtagagacagcgtttcaccatgttggccaggctggtctcaaactcctgacctcaagtgatctgcccacctcagcctcccaaaatgctgagattacaggcataagccaccgtgcctggcctacagagcctcctttcaagatcgaggtccagaggagcagctgcgtgccgcgtgagctttagcaggaggaccagtgattagcatttacgatgcaaagacagaacaacttcgtataggactgtactcctgga

SEQ ID NO: 46253 - DNA, 1023 bp, Homo sapiens
attttgtttaacatgtcttttaagaaactgttgtggttgtcaactgggttgtcgtcctaaagtatgaatctgttatatattaactgaagttgctaatggctacatttttactgactcatatgggggaacgaatgaagaaccaaggccaaacacaaaacacaaaaaaacccaggaaagtagaactttagggaggaggcgatctgagaggtaaatggctgaaatgctactggatttgtgtttctggaccatggctcctaacaccagaaagaagggccttttctggggtaggagtatttcttaagaggcctgggaagaatgttattgccttgagctaactggccttatgaagaggaccttaaactgaattgccaagttattagtattggtattcatagactttggagggtagcaggacaattttccattttatcctccatttgtttgagtggtgttacctgttctctcaggaggatatgtattggatgggggagcactgtgtatggaacttctcacaaaacagggctgtagctgtgcctacacaaaagaattggtcattatgcaaataaatgccatcttagtcagaggcaaagccagagtgcagtttggagctaataagaatcaatataatctagcaagagcccaacaatcctataattccattgtacagatgcatgagaaaaatcgtccctctggacatgctgccacctggccatgcttcctttccctttcatctttctcattgaccaatgggcttggagcattgagaccacaccctattctgagttctagtgtggccctggttaactctcctctggatcagttgcacatctgcccggtagatgactggatgtgtttagcagtggttgccaggatcgtgctgatatggccccaaccccacctcccaccctgcctgtgatgtctgaagaaaccctacagagcaaattggctgtggccaagaaaacattgagagaatatcagcatacaaacaactctggtgtaggtacaagagcaaaaaaggagaaa

SEQ ID NO: 46254 - DNA, 1058 bp, Homo sapiens
ccccattatttcaattagatcaagaactcaatttgtgaagtgtgagtttttaagataacttgactaaattaaatgcatcatttttactaatattttatttactaatattgttaattatatgtaatattcgtaaatgtcctgctaaacatattcatgaaatatcagaaaatgtaaaataacactgaaatcttttccaatatccaaattgttccacatcatgatgagcagtatactttatgatttttcttatttttaagtagtattttcattattatgtatgtacaggataagcagaattcagaattaaaaatctatacttcccttcagatttttaaattaattctttagttgatatgtcttaatgaatgactattggccccgaactttgtttctaaatatttgaactgcatacttgaattaggcaaggggatatctttgctcagtttgccgcctctgcattctgaggacatcttgctaaattctctcttaagtatcctataaaattgatttgtttattcattgtagtggcagcagctggtagatctgaaaagagagagcagtaattaacagtagcagtggaaagaaaatgaccacattgcttttttgctaacagacaaatgagcctaccagagaaaatactgtggttcgaggagttggtgtaagaaacccaggggatatcaagtagcaatataattagttatagtcactgtctatgcaaagctgaaataatcagttgaaaagtgaaaaatcgttatcagtaactaacccagctagtttgtctacatgctaggaggaaaaaaaagggattgagatttttttcacactgctcaattgattcatgtttggaacatgatatttattattgttttgttccttggggcaaagaattagaaaacctctacagcaactttataggggcaacaacgttgtaaattcactcactgtgttgtttgttgattggttaagtgatttaacatcgggcaggttaacttagacctcaggagaaatatttttacaactaaatgagaaagacttccttagagagttccgtctcacct

SEQ ID NO: 46255 - DNA, 1049 bp, Homo sapiens
caagatcaaatattttaagcacttgaccttgatttttttctaaggccttattttttccaaagctctttaaatattgcttattgctcattaaatcataaagaaagcctcaagtttagactaaccttttttatattaatcttttacttcttctttattttcttttttttttttgagataagagtcttgctctgttgcccaggctggagtgcaatggcacaatctgggctcactgcaacctccacctcccaggttcaaggaattctcctgcctcagcctcccgagtagctgggattacagacgcccaccactacgcctggctaatttttgtatttttagtagagatggtgtttcgccatgttggccaagctggtcttgaactcctgacctcaggtgatccacctgcctcccaaagtgcaccccgccttaatcttttacttctaataatcatcttttaaaccaagaggaaattttttaacaatagccaagtaaagtgggaaacctgtatgttggcagatagatcaattatgagaatttaaaataatcatactttctcaaatcatactttctcaaatctgtgcatagacatcaaagaaatatttattagtttacttaccattaggcagtaaacaaattcccttataaaagagacattatgaaaagactttgaaataggagtcattttgcttattcagaggagaatgcagcccaaattcttgcaggtccagtgttggttctacaggacagcatttcaaacatggtgtttaatctggaggaaactaaagattggtgaggtattcaaaagggaaagagccaagtcaagaataaaagagaggataaagataaacagttcaagatcaggaaaagaggccatttgttaaagttacttgtcaccttgaacagctgttattggaccactatacttacaataattttcacctaagaactcattctagagtttacctggtgtgtgacatgcatctaagagctatcatcacattttcaggtcaaatgatagatcagccacaggtatataatttccttctccccaa

SEQ ID NO: 46256 - DNA, 1018 bp, Homo sapiens
tagaataacaacttgtggagaaaaagaagaatacaaataaggatatagataatctagtaatacacctagctcactataggaataggtattacttattgaggtggattataatgtttgcatattttaattttttaaaaaaagtatttgaatgggcatagcttcaacccaatttcatgcattcagccaccctctcaaattagttaccccagtgtgccactggctctcccctcctactgctcctcttccttcccctcctccctctcttcccttcttttccccttttctttccttctctctttctcaattgcactatttcttgaaagaaaaatttacaatccttttgtcttttccacatcctcattctttcctttttataattttgttgcactcctcaccacttcactagacctatttcatgaaaggtaaattatatagtcatcactaaattgagtctttatttcctatcttactggacttcctcatagtatttaatactaataattactctgccattaatatttgttctaggcaactccttggtggtaggactattcattttttcctatgctggtagagtacctagctcatagtcttcaataaaatgttgacttctagacattagagtttaggattttcccctcaccgtgttaactttttaaactaattcttgtgagtttacatgaccccaccaccaccaccacgttcttaacttcctttattatttctacactctttcctggaccctcgttcacagccatggctttagctttatgactatgatgtgctgtgaaactcagattcacaatttccacccacttgctagacaaattgatttgaattttttttagcttcccagattcaatctactaaatttcaaactcaccactatcccttccctcccctcgaaattcctcctgaattatctaatctatttaatggcactagattctcttgtttacctatcgattaaaacttcacaagttcttggccttctccttcctttgacgcatatgcccca

SEQ ID NO: 46257 - DNA, 1045 bp, Homo sapiens
cttctttctttcttttgcaggagtttgtggtaacttgagattcaagacaagagctgttatgctgtttcctagctaggagcaggcttgtggcagcctgattcggggctgacctttcaaacccagagggttgctggtcctgcacatgagtggaaatacactcatggggaagcttccatgatgcacagtatctgctgttcttcagtcctttgtctttctttgtcattcagttctaggcctttcctctgcacgctcaatgcccagtaaaatttcaggattaactaaagaagaggagaaaaagaagaaaagattcttcttaaaagtttctaatgttattttccttctgaagtctgagcccatttctggggggagaaaaaaaaagcaaatcagaaaacccacggtttttctttttttctttttttctttttttctttttttgctttaaaacaaagggaaaaaagagtttaaacaaaaaacccacaattgaacttccaggaaagtgtgaagacccaaaacagctttgtctccaaagaagatagctctctgactgctttggatagtctcctacgcaccattttgtcaggtgggagatttggaatacacatgcaggacgttagactgttgggacagccattttccaacaaccaaggggccaaaatatctgcaatatagtaacagccttaataatacatccatttttcgttttatacagctgttctcagctatgtcctcagtgtttcatcgcatttatattcatagctattttcaaacacgaccttttaattgtttttgaagtatttctaaaccccttctttccaccttactcctccatcattgtgataatcttcccaagttgtattaggccattgccccaggccttccatgggtctgtcaggaatattcgttacaaagcagagcaagaagcagtatgtctctgaagtggattacagtggcagttattttacaaggatttgtgacactagtaacatacccgtgtaaccctttgagaactatcagaccagctttcagagtcttaggattgtcggtc

SEQ ID NO: 46258 - DNA, 1022 bp, Homo sapiens
ttgtaaaatgatcctaaattattgttttgcattatctgctaggagagggaaaaatgcatttatgttgacaaattcatacccgaattatgttcctacaaaagagtgtaataaaatttacattccattaacattttcctgaaatgagatctctctgaatcctatgagtctggcatataatataggtgcacagaaaagcatcagtgggtgaatgaatctatgaatgaacagactaagcaagaaaggaaagctatacccaaacaatgaacaccagttgtttgaacgacagcattgagagaataagaaccacaggcagatactagcagtaacatttgaatttcaattctaccacattcaaacacagtaaatgtgactaagtcaattgtctttgaataatatgatacccaatgctctgtcattgcttaaattgagtgacaattcatactaaatctatggttaggacattattatagagaacattgtaatatgtgatataaaagacttgagggatttaagcacaacaatatatgtatataaatttactttatagctacaaaatgctacatgacgtgtagttatttctacatgaaaagcaactacttctcagaaaactaatctggttgctaggtatgtattaatgttacttaaatcacatgcaggatgtgatcccattgtcctcaggattttaagttattccaaattttatttattattattatttgagatgaagtctctctctgttgcccaagccggagtgcagtggcactatctcggctcgctgcaaccttcgcctcctgggttcaagcgattctcctgcctcagcctcccgactagctgggattacaggcgactgccaccacgcccagataatttttgtattttttagtagagacggagtttcgccatgttggccaggctggtcttgaactcctcacctcaggtaatccacccgcattggcctcccaaagtggtggaattacaggtgtgagccaccatgcctggcctattattattattttgtgaca

SEQ ID NO: 46259 - DNA, 1050 bp, Homo sapiens
actgttcagttttttcttagaatcacctcttaatcctaaccaaatggagaggagatagagtgctaaaataccccacagcatttatctattgctaaataaaaaattaccccaaaatccagcaacttaaaacaacaatttattatctcacatggttctgaaggttagaaatccaggagcagcttagccaggtggttctggctagagttatttcatggatatccatgttggccggggctgcactcatatgaaggggttggaaaattcacttccaagctaactcatatggctgtagaggaggcaggggtggggggaggaggggagagagagagagagataagatggaagtcatggatgtatcgtatgacctcgccttagaagtcaaataccatcacttctgccatattttgctgtggcaaactgataaaaccctgatacaatgtgagtgtgagatcaggaggtgaggatcactgttgtcatctcggaggctggctcccacatatctctttagcttctcaactagagaaaccaactgtacacatagtctgatagggctgcaggttgagaagacctattccatcctatctatccactaagcactggagaaatttctactaatcacatgtttggtgatgatttctgatttttatttctagatatggactgtactattttaagtatttatatatttaaaattagaaatctgttcaaatttattctgtcagtcttttaacctacaagtgaatattaagagcatcagaagttttcagggcaattatggtatgtgttacaatcaagttatatatgaaaggccaagtatacacagatgtagagggacagaattgacctgggaatttggagaaggcttcatggaggagatgactttgatttttcttttaaaatattaacaagatcttgcacaattgacagaggcaagatagaagatatatattaggaaaaaaaatgctgagtttcaacaagttttagaagacagcatgcaaagataaactttgcaaagctacaacactaggggaaactgtaattcattgaaac

SEQ ID NO: 46260 - DNA, 1049 bp, Homo sapiens
aaatacaatattggaaaagtaatcagagactaatcacaaagcttgttataaaacacacctgcaggattgggtaataattgaaagacattataatccctcccttagaagcatatttaaattcttcttctgtttcttctttcattgtactcatcaggcaagtctctagttctttgtaaattcagctatacatatatcctgtgcttgtacttaagtaattgaacatacctgaaaaaaaaatttagtgattggtctcactttaaattcatcgtcataaatctcagacactcaactctgctgaatagtctactccttctatggtacgtttgctttcttagtatccaaaatgattattttataccttcttctcttcccataaaactagtatttctctcaaagtcaataaacgttagcaatgttgatgatgatgatgatgatgatggtgatgaagaaaatgataaaaataacagctatgacaaccaaggttgatgatgttgctgttttgtggtgtcccctcctgttatgttatcaggactttgatctatacttacttttttctattcttgtaacatcagtttttcttgtctatactcaggttgtttccattgacatataaccatatattctttgccgttaaattattaaggggaaattgtatttgaagatgcctattaatattttctattatttataagcactcagcaacaattctatgtggatttttaaatatttgaatcagaaaatatatttcacaggttaaaaaaccctttaaatttgtaaaacattgtaacaaatggacagttgatttcaaacattctaattaggaaatcatgttgataaatgaccatttttaaaaatttactcaatttaatttgtagctagaatatacagtagtgctattctgtgtcagaattgatatatgatatatcactctgtgcaagattaaccagagtgaaatggcatgttcctgggtcaagtcggaggattgaggaccagtctctcatcaaaggcaggttattttctaggccaggtgcggtggctcacgcctgtaa

SEQ ID NO: 46261 - DNA, 1726 bp, Homo sapiens
ttttatttgttcaagttcaaagaaatgagtgatgctgtcttttaaaagcaatggattaaatttttgagaatatgtttattctcactgtcatttagattatacctttatttgaagaacatactaactaaattggattttgttactctaacagatatttggaattggtaatgaatttaattagatagaggcccacttaccagttcaaagctactttttatccattaatcatcaacttttagcattgtctcttaaaaaaaagcattaagtagtttcggggtaagggtaatcacttagatcactctcagctaaataggtaataagaggaaacagtggaaggagggaaggtagtaagacataaaaactagtttctataacttagaaaattatatttagtgttaggagtttcaactcattctcttttatctatttaaaataatcaagatgtactcagtatggataatgatataaccaaaaatatattaataattgtggtgtgtcatttactcttaaagttttatgcagttttcacatctgtgttcattgcctgttgaactctagagcgttaagtggatagacatgaaggcactgtgaactccttgaggtcatgtgtagcatttttatatgtgcatttttcagaagttctttcttcaggttctcaaaggggttcaaaacccattgtcaattaggcattgaaactattgtcactgtatgttaaatattaaaaaatagagtaatacttaaaagaggcttataggtttttgttattttttaatttacaagtataatttcttgttaaatgttcatcctttcagccatgtgtttctgttgcatatttggtggtgtgaatggattaaataatacttatagatttccatatttagctttttatgaatactagtgagtgaaaaaactgtttaattatccggatgctagatacaacttatttcattagcacttcagaaagtgatcgttatctcatagagtttgcttctcccaatcatatgatttctgttatgtatttacctttcaaataggtattgatttattaacatttttctcatcctgcaatttgggtacataacagccagtattatttcaagactgtttgatctgtctagctaggagagtagctgcacctagtggcgagggcccctcacctggtgttcacacgggttaagtatatggacatcaggctactgtgaactctctgaagttgaatgcggtatttgtatatgggtatgttcttagggtcctttcctcagattctcaaggggatccataatcccacaattgattaagagttaaagctactgacactgtgaactaatataaaaagtgaataaaaattaacacagagaggtttgaacgattttgctaacttctaattttaaaatataattttgtattaaatgttaatctctagcaaagcaggtaattcttctagaatagttcttttttaataactattgattgtctttcaaggtattattttcaggaagcagcatctattgtgcaatggaataagaatggactttgtatccaagctgatctaacttaaaataatatctcctcaaaatactagttacgtagaaccttagggaaattatttagcatgtctgtgtctcagtgttctcatgtgtaaatctaacatcataattcttacccagtactactaacacgaggattacagataatgcttacaaagcatctagtgaatatcaagtca

SEQ ID NO: 46262 - DNA, 1040 bp, Homo sapiens
ttctcttattaattctagacaattgtagtgtctagttgttccagagcagtattaagtaatttttgtgatactaggcataatgtcttttattctgactaagggaaatggagactcatttgttttcagttgtcaattattaacctaaaaaagaattaagatactagttactttctttaggataattcattctagaatctttatatattgctattaaattaagattgatggtgaggacatagcatgaccagcctgacaagaattgaaatttgttattgtctgtttttctatttaacattctctatttccgtcttaatttttaatggattggttgcttcctcctatcacaatgataggaggacaaaatttgttttcaaataaaaccagaaaaggatagttgaatatttgatggaatatgagcattttattcaagactttcattcaagactcttcatttcatgatacaaaaagccaatttgaactaccttaagcaacataaaaagtttattggaaattgctaatgtagttcagagattgttggatggagtgcaccaggaaagtatggggcagttgcagatatcttaaacgtgagaccttgatttggttctctgcttgcctgttggcatatgggaatgctagcaatttttgcacattgattttgtattctgagactttgctgaagttgcttatcagcttaagatgcttttgggttgagacaatggggttttctagatacaggatcctgccatctgcaaacaaagatagtttgactttctctcttcctatttgaatacctttattcctttctcttgcctgattgccctggccagaacttctaatactgtgttgaataggaatggtaagagggtatccatgtcttgtgccaattttcaaggggaatgcttccagctcttgcccatttagtatgatactggctgtgggtttgaaatatatggctcttattattttacagtgtatttcttcaatacctagttcattgagagtttttaacatgaagggattttgacttttattgaaggtct

SEQ ID NO: 46263 - DNA, 1045 bp, Homo sapiens
ctggtagttacatgtatgctgtagcctaaattaagatggaaaagaataggtttcagtcttctatatgacactattctatagaaataaaatgtctaactataaaagattgggtgatcaaggcttagctttgggccatgtctgactctggaatctgtctttggattcctatggcttaaaatacccgtatgaagagaactgccagtttttatctccagttggcatctctcttctcagctctagcctgtattcccatcgtctgcttatccatcttactgtgtacaatgacagatgttctgatctgccctgtctcagtgtttcctctgacactacttcccaccactgtgctggtatcacctaccacatgggtgttcaagttaagagtgggcaccaaatccccagttttctgccccttactctctacttctaatcaattgcctcatttcctctaatgtatatcttaagtctttttatttctgatgtctattttgggttgcaaccctattttaaatcttcgttatctctggtcttgacatgttatattatttataacatggcatgcaagacctctcattatcagcctcacccctttctctagccctgtagctcagagttcatcttctgctcactgtgatctagtacagtggttctcacattaaagatggctgtccactcctaaacattaatgaaaacccagaatcttctattatggtttatatccatctatatttatggtattagataaatctaagagaatttttaaatacttatttagaaattcattaaaaatgacatgtcataaataacatttttatgaaaaaataattttacaaaacaaaatagtaagaaaggtggcattgttttagatctttccagatactttaaatatctggcttaacaaaaaatagctagattctcatatctcctatctccttatgcattcacacttctgatgttataaatcacaaaggctctggtaaactcaactgtcaaatgcaagtgaatgagagtaaaaaggcaaataacatcttattaaaattgtttgatt

SEQ ID NO: 46264 - DNA, 1050 bp, Homo sapiens
tacaacatatgtgctctcctgtatgtatgttatccttcaataaaaaggttttaagatctataagggccagcattaataaaactgttctctttatatatcagatggttttcatcactttgaaatatcttatttttttaactcaaacattaattatcacctaatgaacacacttctgatcgagataaatacctgccgactgccactgagagtagaaaagcttgcactatgctgattataacatttcactgtcaccaactggatttgaccctaacagatcattgcctcattctttattgtcagaaagaagcattcaaagacaattatttttcaacccaaatcatcatttttgaaaaatgttcttcacagttaggttgacttatagccaaaacctttgtttagcaaatcaggtaatgcagtttgttatcatatattttgcaaataaccgagcttggagggggtttcacaaagtcccacaaatatttctgaaatttaagattgcaaggatactttttggaatttatttatcattatgctgaacatttgatttaatatgctttgaatgtcctatgctaaaattattttgaccatggtttattatcaggggaatcagccctcagtatgtcaacgtaggttcttttctattttccctaagtgtcggccggtctgagaaataaagggaaagagtacaaaagagagaaattttaaagctgggtgtccgggggagacatcacatgttggcaggttccctgatgccccctgagccacaaaaccagcaagtttttattagcgattttcaaaggggagggagtgtacaaatagggtgtgggtcacagagatcacatgcttcaagggtaataaaagatcacaaggcagaaggtcaaggcaagatcacaaggtcagggtgaaactagaattgctaatgaaggtccatgtcccactaggcacacattgccattgataaacatcttagcaggaaacagggttcaagagcagagaactggtctgacaagaattcaccaggctggagtttcctaattctagcaagcctgg

SEQ ID NO: 46265 - DNA, 1031 bp, Homo sapiens
aacaaccagatctcgtgagaattaagagtgagaactcactctttactggcaccaagccattcatgagagatctgccctcagagcccaaacacctcccaccagggcccattaaaacattggggatcaaatttcaacatgaaatatggaggggacaaatatccaatctatatcaaagaccttacctcaaaaatacttgaaggcagtagcatctccaaggatcaatttcttttttaaataggtatatgtgcctaggtgtgataattattttcaatgtgctaaagctatttcagcccaatgacttttctgtccttaatattaaacctggctaacattcaattaaaattttaattaaattaaattgtaattaattatattaaagattttttaaaaattaaattttaattaaattaaagatttaaataaaattaaattagatttaaattaaattaaattaaaattaattttccccatatcctctccaacacttgttaccttttgaatttttgataataatgtgacttaatattaaccctgagtttcacataaatatagcttgagcaaaattgaatatagatttaaatgcctcatagtaattcataagatattggcggtaaaatatgtatacttagagtccacgatgactcagcttttctaatttgaattattttgggatgcccatttatatactccatcaaatagcatataaatttcaaaagagaaatagccatttaatatacttgttccataatacctgattgtcttatactgaatgttcttaaaatgtaggactgctttattgatatgttgtcaaatggtgtacgaagacaaatttacaagcaacaatttctgacaagaaaaatttacttaacttcacatatatcatacaatttaaaatttgtgttcagagtataattgtagaatatagaagactatgggacagtgaatgtaatatggactttggagtcattttacctaaattcaaatgccaatttctctacttctcaaagaagaacccagaagaagctgagttg

SEQ ID NO: 46266 - DNA, 1049 bp, Homo sapiens
ccactctcttaaaagtactttttcatgtttatattaggatgtcagtatatgtgtgtgcgtctagtgtgcatgcccacgtgggtacacatacttgtatgtgtatctgtgtgtagtatacatagttgattcccaagtatccttgtcatttatctgattagcatttattccaaatattttctttcttaaaaataaaactattattaatagttgcaatgataattttaccaatagttaaataaaataaaatagtattgttgttaatagttgcaataaaatatgctaggttgggttggtacacctacactttgtccttctagcttctggcacagtctcccctaatagtgtagggacacgtagagtaaactattttcacattgatatgtgtttatatttgaataatgaccaacaacatctgtctctcttttccccagctggttccaagcataagagtttaaccctatttttcaataagagcatacaacctgtctctaatgaaaacaaagggcaataaaagctgagtaagtagagtcaaagacattttccagaaaggccacttgatggaccagttagttgggtcatgattcatagcttgagttgcaaaaagaaaaatggcacacaagtcaatgaggtccattggaaacaggacattataggttaggcatatgtgaaatttgtgcaggaaatatttcactgcagatttatcgaagatagtgtttgtgcccttactatttacttactgcatggtataaattcataactattttgcttttaatagctattttgtttcattttgccataaagtttttgacactaatcagttcaaaaataaagtgcatgttaaatgaaaaataactactgaattttgctttctcaagagatttcctgttgaatgtgccacttgcacgtaatctttgacatttaccatctgcatcatcagagaagcattgaagaccgcataaaaatgagagatacaaatctgctgatgaatcatcaatatctatgtcaaaagttgttacctaatttaacaagactgtgcctaaagatgatga

SEQ ID NO: 46267 - DNA, 1663 bp, Homo sapiens
ggacatgtcatctcctatgataccagtgccttttcctgtaatacttcctgaaggacttgcctgaggctgttttacagttagcttttcttcaaatcagataagtaggagtacatgctaaaataacaataacaaatatagtgtagtatgtaaaccagtaacataattgtatattataatcatctattatatatagtacagtaaatgacactgtactttatagcacatgtaatcatctcttatatacagtatggtgaataaataattactgtactgtatataatagatgatgattatatattccataaagatacatgctctacttttatttggctagcagtgtggtaggtttgtttacactagcgtcactacaaacatgaataatgcatggtgctatgatgttatggcagctaccatgacatcaacaaggtgataagaatttttcggctgggcactgtggctcacacctataatcccagcactttgggaggccgaggtgggaggatcacctgaggttgggagttcgagactagcctgaacaacatggagaaaccccatctctactaagaatacaaaattagctgggcatggtggcacatgcctgtaatcccagctactcaggaggctgaggcaggagaatggcttgaacccgggagatggaggttgtggtgagccaagatcacgacactgcactccagcctgggcaataagagtgaaactccatctcaaaaaaaaaaaaaaaaaggatgtttcagctttattataatcttatgggaccaccatcatatatgaggtctgttgttgataaaaatgttatgtggtgcatatctgttttaaaccaccacagaaagctttcccctttttccccaatataagcattttaatgctgtaaatttcccgcaagaactgctttggcttcacaaaaatttcatatgttatttttatttccattaagttcaaaatattttctagttccctttgtgtcttcctttctttcccttgaattatttaaatgtatgttgtttaattgccaaatatatgaaaattttccagttatttttctatttgctgattctaatttaactctgttatggtctaagaatatatttccttttacatttgtaatgtcttgttttgtggctaagaatattgtctatgtttgtgaatgttctaggtatacttgaatgtatattcggccatcattgggtgtattctataaattttaattaggtcaatttagttaataggatttttatattttcagtatttctgcttatttttcatccacttgttctatcagtgattgcaagaggagtattgaagtctttgggtatatgtgtctatttctcttttcagtttttattagatttttgttttatgtattttgaagctttcttactaggtgtgtacacatttaggatttttatttattcttagtgaattaagctgtggtaaatatgtaatgaccctctttctcctcagtaattttctttgttgtcagatttactttatgcggacattaacatagctactccacctttctttgtttttagttttaatggatatttaatagttctacatattttgggggtatatgtggtattttaatacaagcatataatgtgtaataatcaaatgaaggtaaataggatatccatcacctcaa

SEQ ID NO: 46268 - DNA, 1044 bp, Homo sapiens
tcttggtcttcaaaagtcctaggttgctatcctgggctgagttccttagaagcaaaacctgagacagggattcttgggcaaagatttattgtggaagtggctccagtgaaatctttaaggtaatgaagaaaataggataagacaaggaaaaagctaggcaaaaaaatcagctgggtttaaatgcacatttaaacaaaattggtctgattcttacttaagtttggactcctttgaaagcatactatgacacatgatttaagcacaagtattaataatttgtctgggagttaatcccaggaggcacaactgaaggagaagaaggaaaagaacacttaaagaagtgggttcaactgatgccacagtgagctccagaataaaaatggaacccacagttttatttttgacaaggacaagggggaaggctttttgtacctctttattagtcagtcactggctactggctaccacttggaggaagggtgtaacctctcaggcatttctgaactaggctgctcctgttgctaacaagcagttttcaaaagggtgcagctgtgagctggtgaccattggctcacaaaaactgggggaaatgtgcacctgcacttgcttgtcgcaggggatctgtgtgggttactgacagctctcctatggccactctgccatggcaacttatcactcactggtcagactcctcaaggccctggccttctgcaaagctgctcatctccattcatctctcaagactccccgtgcttcattactttatgttcatccttattgcttctacatgaaaatcaacttttgatagtgtacaaaacaatttagctctcaatccccttctaaaataaggccttccttggcctaccaaaaggctcataaatgtgcttagccagccaatgagtcacttgctagacttgctctggttcttgtataatttcatggaaaagcggagagagaccttgaaatttcagccttcccctgtccttacccatttctgagtgtggagctatagtttatcactgaaatgaaggcctgtgttagcag

SEQ ID NO: 46269 - DNA, 1019 bp, Homo sapiens
tgattgggtatgtgttcttggagatgtactttgcaattctctgatgactaatgctgttaagaatcttttatatatttattggccatttatatgtcgtctttggtaaagattttattcaaattatttccagacttctatttttatttcttattgttttaattcaacttttattttagattcagggggtacatgtgcagatttgttacatgggtatattgcatccattagtgaacatagtacctagtaggtagtttttcaacccattttctcctctctacctcccccctctagttgtccccagtgtctattgttactatgtttatgtctatgactacttaatgtttagctcccacttataagtgagaacatgtagtatttagttttctgtttttgtgttaattcacttaggactatggcctctagctccatccatgttgctgcaaaggatataatgtgtcagaaaactaacaaaggaactatggacttaaacttgacacttgaccgcttaaattaaatgcttggccaaaggtttttatggctgtttagtatgccatggtgttaatgtaccagattttctttatccaatatgccattgatgggcacctaggttgattccatgactttgctattgtgaatagcatggtaatgaacatatgagtacatgtgtctttttggtatgatctattttcctttaggcatatacctagtattgagattgctgagtcaaatggtgattctaagttccttgagaaatctccaaactgctttccacagtggttgaactaatttacattcccaccaacagtgtataagcattcccttttctcacagcctcaccagcatctgttgtttttttactatttaataatagccattttgactggtgtgagatgctatctaatcttggttttgatttgaatggctctgataattagtgatgatgattattttttcatgtttgttggccacttgtatgttatcatctttgagaattgtctgttcatgccctttgcccattt

SEQ ID NO: 46270 - DNA, 1025 bp, Homo sapiens
tgctgaaccatgggcaggtaccttcaagggctatcccagtgattagcccccaaacttgtaaccaccgaaagggttcttcttgcctgctgccaacatgaagccaatttaccaaaacaggagaattacaataaacagttcaattattgagtcagctaaattagagaccatagttttatggttactcaaataaacctccctgaaaattcagatgttagatttttttaaaagatagattggggagcagggggctatggaatgagggatgttgattggttgggttggggatgggatcacaggaagttggagctgtcctcttgtgctgagctggttcctgagtgggagccacaagaccagatgagccagtttactgttctgggtggtgccagctgatccatcagaatgcagggtccaaaaaatacctcaaataccaaccttaagctttacaatagtgatgttatctgtaggagcaattggggaggtaagaaatctggtgccctctggctgcatgactcttgagacataatttctaatcttgtggctaaatttgttgtttttccaaaggtggtcgggtttctaagcaaagaggggtttgtggtggggaggggctgttactatctttgtttcactgttaaactacaaactaaattcctcccaaaatgagtttggtgaaaaaccaagaatgaccaggcttggaggttaaagataagatagagttggttaggtcacatctctttcattgtgataattttctcattgttataatatttgcaagggcagtttcaatactattattattgtcatcatacagaggagaaaaatgaagcccagaaattaagtaacctggttggggtggggtgggcaaaattatggctcatggaaaacaatctttaaaaaataaatgggagagaacaaaaagataaaagtaattgattaaaagtcaaattattaggggtctgatatttcacccttcttggaagataacaggttgatcattttgtcatagttttatggatggtaggagacgt

SEQ ID NO: 46271 - DNA, 1048 bp, Homo sapiens
agccaaaatagattctccagtagagccatttttttttttttttaaccctgaaagagcaggttctacaacactggccaaaattttgtttagccattttttgcatagatttcattatggactcaacccttccagcaacctgtagaatggaaacagttttcaaaccaaggccaatgaaatttgaggagaccagccactaacactgcatgtttaaactcaacttgtattctaatttctagaatatcagtatctgagctctgactggattgaacttcagaggtcatttaatgtctcatccatagatcttgaagtggacagtgacttgcctaagtggacataagtgcacagtggcagagccagagctgaactcagatttagtgacctctcatctcaggccattctctgatttggtacttgaggttggtattgcttctctgcaccacacttgactccagtgtgtgataattctgactgattttgattttataactgttaaaaaagtatgcactatggagtgtaaatgaagaggaaaaagtagaaccacttaagtaatacattacatttgaaggaaaaatttatgtgaataagttttaacataaaatcttaaaaatttatgggtcttaagtatatatttttggatatttatgataaattgatacagaaaacaggcaaaaataacatatatagtatgattccttttaaataaaatgagtatcatatagaaactagactagagaatatattccaaattgttaataatggctgggtctgagtattatgggtaattacaatttttttccattatatctgccttctattctgataacaaaaataaattttaatttgtattgcatttttattcaggagtgaataaatagtttagataaatttttgagcaaaattagagtattttgaaaatagctaaaatttgttagattttaaagagaagactaaactgtgattaataccttatctcttactaatttaaaatattcttatatattcaggtttataatttataaaaataccttaagaaggttaatattctcta

SEQ ID NO: 46272 - DNA, 1035 bp, Homo sapiens
atagagcagtgtcatgatcttggtttgagtttaaaaacacaggggaattttagacccttggaggaaacattagatgctgggaggctggtaaggagaccagtgtgagtgaagaggtgatcatggtttggacaggggtagtagtggtgatggtggtgagaagtggtcagattctggatatactgtacatccttattagcagattctgtatttgcaaaccagcctccttgctaaagtttatttgtaaccccaaaatcaatactcaatgtctcttacagtcattcacagaccagcatatgcacaaagtagcgaaaaatctgcctgctgtgcatgttccctgctgagttctaataagatgatgctctgccttctcatttcaggtctcatgttgtaaacaagtttccttttcgtggtatatttagtgcccatttttcttcatttttgtcccttttgttggtaataattgctatttaaaatagccccaaatgtagtcctgaagtattatatagtgttcctaagaacaagaaggctgtgatgttccttacagagaaaatactaaagccagatcagccttgttcaggtgtgagttatagtgctgctgctggccgtgagttctttgctaatgaatctacaaaatagatcactgtgtctttaaacagaaacacacattaaacaaggtatacgtggatcagttgatgaaaattttgtgaacaaatacgtgtcagaacataaccctgtatttcccctaggggcaatgattccatattagctaattcagtatttatagtgactttatagaacataagtactgttaacaatgagaatcacttaattttaaagacagtgacaggatatgttaatggcttgaaaatgggttatgagagaaagaggactttaaggtatttggcccaaacgacagaatggagttgccatttgcttatgtgggaggagcatttttagtgggtgagaggaaatcatgtttgatctaagtcacactaagtaagaaatgtctttagacatccgagtagaggtcataag

SEQ ID NO: 46273 - DNA, 1056 bp, Homo sapiens
ttaaggcaaaaggcaaaatggaatgtagtagaagaaaatttaacaattctgactttgggaacagtttcagaatcaagggcaactatgtatattttttaaatcctcactttgttttatatatatatacacttctatatattaactgtttgtctttctccccctttctctactgttttatatgatatgtgttggttggaattaacattatcatttattgtttacattataaattatctatcaaagaggggtcatgcctgagctacaaaataaatgaatattactcagacattgatacagcaatttatgggaatttttgtctttcttttttgggagagaatttgcatgtgtctttgttagtataagatatagttttattatgttatttggaagtgcatttttgatattattattgtttggaaggttaatgatgggccaaagattgtgaatggacactgaatatccaaagagtagaaattaccagatattgttacagttccatccctgacattttaaactttctctatactacagcagcactgagcctggaaactgctttttcccttgccagcagagtgccagctagattctgtcaatggaagtctcaagcacacagtttagaaggcagcagaagcctgctttagaagagctgctactgttcttgcttgcagctgtgggcacttcctgagaatctctcactttggcattgcaggcagttgagaccattggtggaagcttttccctgcatttggcctctgttcttttgaatttccccaaagagttcttcctaacatttgcccctcccacttcctgatggttctgtaataattttttttgtgtgttaaacctcttcctatacaaaatagctggagtggctttaaaaaaattaatttattttaataattattattttttagagatgggtctcgatatgttgcccaggctggacttgaactgaatttgagtaagcctcctaccttggcttcccaagaagctgggattacaggtgcctgccactgtgcctggcttggagttgacttttattttcctggctatact

SEQ ID NO: 46274 - DNA, 1051 bp, Homo sapiens
tgatacaaaatcaatgctaaaaaagaagaaggtgagaatggatggtgagtaatccctagcactgtctgccacttggtgaagggaatgaaatatggtagagggaccagaagagttaggacaggaataggaaaaggtggggaggaagtgttatgaaaggcttaaaaaagagatgggttaaaagcatgaattatcagctgatgaggctattattcttaagtggaagcaaaaatgggagctgtgtgactgatcaaaagacgcattaaacacaataatttgtgttttatttattcattcagtaatttctcctttgaggatgcatatgtagtgtttaagaaatagtatagagatataatagttcttggcatacctacttgaatcatgaatgaccttgaacactttggaatagaatttctaaattttttgaacatgaaattttcctcactggaacagttcatattttcatgtgtggtgtggactttatcaataatatatcatgtgattttatttctgtgttttgacttacagtttctactgcctgaatccaattaaacttcagcaaaaacattcaagccaagtgccatgagccagtaaatccaacactctaacacagttaatgaaaattagaattgcatgaaagaggtttctgccagacatttagaaatcatgattcctcagtcattgaatatacagtatctctgtcagccttttactataagacagataaaataacaaaatgttgtttataaataatatgtaccctttcttttatattccgatatcttccatttagtctactgaaccaagtcaaacacgaaattcagataactccaaaagggaaggctaagagtttctgataatacttctagtaatggaatagtttgaagatgaaaatatttggatagataaatggttcttagaaaagccttttggagcttagtatgaacatgactcatcatttggccaatgggttaattctcatgctctaaggtctgattgccaccatttttttttttggcatttgactgaatgatttaccttatctttccatttg

SEQ ID NO: 46275 - DNA, 1028 bp, Homo sapiens
gttgctttcacacatcaccctgttttactgtgtttattgcagttgtcattgtgtgaaatggtcttgtttcaccattattgtattttgccaagtagagcactatccaacagcaagatgacagtgttgaagtttacttaatgtttccacaattcattgcatcattttaactacatggatatcttaagtcctccaggtctacttcctgtccttaacagtgaactgtattatgacatcatgcagagcccatggtgccagcagtagccctgctggtaatgcttgcttatgattgccgaattgggggtcagcctgtcctgtgtttgtgttttatttattatcttctgcgtgtagctaggggatcaatgtgtgatcttactccattgtaaaagaatataaactgatgctgtgtagtacaaaacttctcattcaggatattgtttttctggtatcaagctgaaatgtaaatgctttgttttatggagattaatttaaaaagtatttgtcagaagtattcaacagtgacctttagagttgaaaggaactcaagtatttcagagggataaagttgagtatgttattttctccttccacaattcagaaactgggtaaaataacacaaaatttacttgtccgccaagtcctgattttcacatgttagggttaacttatctcaaggtcttttttgaatgacatgcttgcagatgtttttcacatttttttcttcattcctttgcaagctcagcagctgtacacttgcaagctaagccttgttccctgaatatgccaaagggctgcagaggtagaatcagctctagctaatctaacctccagtaggaatcattttggggaacttgacacctaatgttgctctggtggtgtttagttcatgtccatgacatccctgtgactcccattttcctatcacactctctggacacaataggccacatttcctatctccccttttcttcagtttccttctcatgactcctttgaggactgggcatggtctcaaatggaagtttggcaaa

SEQ ID NO: 46276 - DNA, 1024 bp, Homo sapiens
ccaatatgggcagcaacacagtgcccagagaatttataaaaacaagagcaagggcattgccttccagaaacatatacattctttggtctgtaacttggttttctggaaatcagtcctagaaactcttcaacaaaagcatattttaactttaggccttggagctgcttttacttgcttccttgggcatccatagctggattttctcctagatatgtccatggactccattccagtcaggtcttatcatgcagggcatgatagttgaggcacagtgaattgggagccatgcgattcttagaagatacataggagagaacagcaaaatttgagtgtaggctaataaaacacggtctcaccaacagcaaattgttcagcatatttgccaaagattcactgtgtttgaaaaatgcatcctctccttacccaactccatatgatatctcattcccttccagcttcatctctggctctaggtttgatcccacctgtggaatattgccttctcttctcctttagattcttgacctaactactccccagaattactgtgatagctttctcccttaaattggcaccgatttcttcatgctacttcattttgctgactaagactctcatggataaaggggaagtctgccatcataagataaatattatattgagtgtcaatctgtagactaagtctgagactcagttgttcctgctattgattgattctttcagtcaggcttcagtctagaaaatggaagtcccctatatattccaagaatggagggtctagtaggaaatttgaggtttatagaatcattgacagacaggagaaaaaaaggcaagaaagtcaccattagtacatcactgaagcagtggttcttcaagctcacttggaagccactgcaaatctcaggcttctccagaaatctcttctgcaactgtcctgatatgtagcatttaagtgagaggtttgcaaagggccactttaaagctgcagtgaatctcatgtctgctcatgcatatggctgcatct

SEQ ID NO: 46277 - DNA, 1013 bp, Homo sapiens
tcatcttgctaactaccgtatcatttcatgttgacctagcatccttttcctttagtaagattgccctaataaaaacaaagcaatcgagttccaaagtaagtggagtctatacggatctgagggaggctgaggtaccagaataagtttgtgaaacactaatttaggataacaaaatacagttcctgatagctgttgtaaattttatgtaaacaaatgcaattaacatgagaaaaaaacaggagtaagcagtttctaggtttttacagaatagcagctacagggcaagtattgttctagaaaagtcctggtcaggacacctaaagcggaataaaaaggagtgtggtttggccatatagatcacttgtgcttagacatttataaagccaacaaaacagaaacaaagatatgttgcttctaatgagaaggggcatcaatttatggctttgtgtaagaaagactaaccatattagattgtggccttgagaatagggagagtatcttattcacccttttttacctagaaagatgttcactttaccatccctgtcaggtgcaaagtgaacaactaagtaattctaaggaaaactacagagtggaaataatgaagataaaatgcatcatcaatctattaaaaaatagatacaagagtttataaagtttagcttctgattattgaccatttcctttattactgcatgacacacaaaaaagccaaattcattttttaccaaattgggataaagatacatttgggatgatttaatttaatacacaacctatgtcacagcataaataatttgatgtatgaatggagccaggggcaccacaaaaatacacgcagacttttttttatttttattatttaagagatagggtctcactttgttgcccaggctggagtgcagtgatgcaatcatagctcactgcagcctcaaattcctaggctcaagggatcctcctgctgcagcttcctgaatagctggcacttcaagcatgtgccaccatacctggct

SEQ ID NO: 46278 - DNA, 1088 bp, Homo sapiens
aagtgtttttcattcatccatgaattagctcaaattctgtatgtaacaaggagaaaatatctttggaagctttaaaatgatggtattttctaagttataagaaatttaagatttgcaaatactagaacaatcaattcccttttattcccttaaaacctaggtgaacttgattcactgtctagataatggcaggttttgccaaagtagactcttatgaacagcaaggtagaacccttcaaaaagactggacaccttcatttggctgtcgttttcacactgttcatctgcctagttctagggtttgtattaggttctaggtttacagggatgtgcttttaagaaggtcacaatttggctgttggggcaatggaagtaaatggggaaacataagaattactgtactgtggagggtgctataatagatttagggacaaaacatgattgaaaggaagatcacccctcctaggggaaggtaccaagaaggcatcttggaggaaatgacatttgacctggattttaggggatgagtgaggttttggcctcaatctggatctattggaaaaactctatagttctttgccttcaaagttttcagattttctttcaagttgctgtttgtcttctctgatgtgttctattttgaaatatcaaattaatcatcagaaaatgcttgtcaatgaatgaattgcatttgctcaatatacacatatttattttcaggtagctttgaacacatggtaaggaaatacattcatcttttcactgagaactgctcacctaattgcttggtacagtcatgttcaatgatatgtagttgattaaaaaatgacaaatactgtgaccagctgcccttttgatgtcaaataatgtggaagattgaacaccatgctgatccattagccatttccaggtctggctcttttcaagttatgtacagtcattttctctttcagagagaatataactttttaaagctttattctttgctcttagcttatgaaagaaggaattcacacttcaagaggttgtctgtacctaattgtgatttattaattgggtagattagttcagggtataaatagacaatg

SEQ ID NO: 46279 - DNA, 1050 bp, Homo sapiens
tgattaacccattgattgtctttttgccttttcaagtgcagcaacttagacatttttattattaccctgtaaattcttcagacttgcattctgtggcattggctatgtagtctacattttgtaagctcttttaattgcttctctgaagtgtggacttattttgagagaaggtcacagtagttttcattaatccaatgttactttcgtagtcctatgactttgatttaaatacaaaattccattaggtttgcctatttcatcaaatgaatgttttccattttgtaaggagtctttcctttataaaaggtcagccccattgatgtagttttggttacattgctatttttgtgggccataagtagacaatttcatagcccactaaggatgggtaggggtgggaggggtgatgactatgcagtctgtaaaccaaacagtcccctgacttcttatatttcttgttccttaattattggacattttcttcatctcctgattttttttggaaaaggatgaggtcttagggatcaagtagaattttaaatagttaactttgctataattgacattttaggttaaaatgaacctttcagataagcatagaacaagctgtgcttgtttcaaaataatataattcaactttaacttgataaaaatatattgagactaaactatgaactggaggttaaaaatatacatggcttcttttattcaggagtttacggtatagcagggagataacttctaacagagaagatctgtttgtgttttgaatattttagaataacagaatgtgaatacttactacagtggtagtaaacaatcttaattatttatttaggtccctgtcttcgtatcctttctaaagttctttgaacgttactctagcttaaataaaaactggaactatgtgcatttggaaggacttgtgtagggtagcttccactttaaaaagacatactagtacaagaaatgcttagagaagaaccaaatcaatcaaggttagagtgatttccacaagtggactgataaaatagtgatgacttggaggaa

SEQ ID NO: 46280 - DNA, 1042 bp, Homo sapiens
cagtatcatccttctagctttttgtaagtatatttattgttaactatagtcatctgacattgatatagaacactagaatttattgctcctatctagatgtaattttgtattcatttaaaatttaaaaaattcacattgatacatgatattttacacattaatgggtacaggtgatattttgctacatgcataaaatgtataatgatcaatatcactttgagtatttctcatttctatgtgttgggaacaaatcatcatctcttttagctactgtgaaatatacaatacatagtttttaactataatcactgtatactctactttccaatgagagaatttatacattttatctaactgtatgattgtactcaattacctacctctcttatcgccctaattttttattctttagcaaatccccctctgttgttccccccctcctacccttctcagcctctagtattttctgttctactttttacttctgtaagatcaacattttttagcgtccacatatgaatgagaacatgagcaggctaactcttcctggcttactttacttaacatagtgtcctccagttctatccattttgccatgaataacagaatttcattttttgtggtggaatattattccagtgtgtatatataacatgttttctttatccattcatctgttattggacattgaggttgatttcatatcttacctattgtgaatagtacttcagtaaacatgggggtgcagatgtctcttcgatatactgatttccttccctttcaataaatgcccagtagtgggactgctgactcatatggtagttctatttgtaatttttggagaaagcatcatactgttctccatagtggctctactactttgcattcccactagcagtgtataggagttcccttctctccacagtctcaccagcatttgttattttttgtctttttgataattgccatactaactgtggtgaaatgatagtgcattgtagttttgatttgcaattccctgatgattagtgacactgagtag

SEQ ID NO: 46281 - DNA, 1018 bp, Homo sapiens
tttgtataaagtataaagaaggggttcagtttcaattttctgcatatggatagccagcactcccagcatcatttattaaatagggagtcctttccccattccttgcttttgtcaagtttgttgaagatcagttggttgtaggtgtggggtcttctgagttctcttttccattccattgatcaatgtgtctgtccttgtgccagtaccatgaggctttggttgttatagtcttgtaatttagtttgaagttggttagtgtgatccctccagctttgttctttttgcttaggattgtcttggctacttgggctcatttttggtttcatatgaattttaatatgtttttttcttattcgataagaatgtcagtggtagtttaatgggaatagcattgaatctttaaattactttgggctgcatggccattttcacaatattgattcttcctgtccatgagcatggaatgtttctccatttgtttgtgtcctctgatttctttgagaagtggtttgtagttctccttgaagaggttcttcacttcccttctagatgtattcctaggcattttattctttttgtagccattgtgaatggaagtttattcatgatttggctttctgcttgcctattgttggtgtacaggaacgttagcaatttttgcacattgagtttatatcctgagtcttcgctgaagttgcttaatagcttaaggagcttttgggctaatacaatggggttttctagatataggatcatgtcatctacaaacaaagataatttgacttcttctcttcttatttgaataggcttatttttttgctcttgcctgattgtccggccagaacttccaatactatgttgaataggagtggtgagaatgggcatccttgtcttgtgccagttttcaaggggaatgcttccagcttttgcccattcagaatgatattggctgtgggtttgtcatatatggctcttattatttctaggtatgttccctcagtacctagtttattgagag

SEQ ID NO: 46282 - DNA, 1131 bp, Homo sapiens
aaaagttttctttttcccaagccactgcttttaaatgtattctgtccaatttctcttcttatccttaaataacatctcaggcaaatctcataacaatcaattcacttgtagttattagaattcattccggtatggtttaaaatttccaaaattccacattggtggttctcaaactttagtatgtatcaaaatcacctgaggttggggtgctttttaaaagtacaaattattgggtgctagccccagagttttttattcaggtctgtggaaacacctgagaatatgtttctaataagttcctaggtgatggtgttgctgctttctgggaaccaacatttaagaagcactgctgcaaccaaaaaagagctcgtatagccaagacaatcctaagcaaaaataacgaagctggaggcatcatgctacccgacttcaaatgatactgcaaggctacagtaaccaaaacagcatggtactggtacaaaaacagaaacatagacaaattggacaaaatagagaactcagaaataagactgcacaactacaaccatctgatctttgacaaatctgacaaaaataaacaacgggaaggattccctgtttaataaatggtgctgggagaactggcaactggctagctatatggagaaaactgaaagtggaccccttccttacactttatacaaaacttaagatagattaaagacttaaatgtaaaacccaaaactataaaaatcctagaagaaaatctaggcaataccattcagaacataggcacgggcaaaggtttcttgacgagatcatcaaaaacaattgcaacaaaaggaaaaattgacaaatgggatctaattaaactaaagagcttctgcacggcaaaagaaactattatcagagtgaacgggcaacctacagaatgggagaaaatctttgcaatctatccacctgacaaaggtctattatccataatctacaaggaacttaaaaaaatttacaagaaaaaacaaacaactccattaaaaagtgggcaaaggacatgaacagacacgactcaaaagaagacatgcatgcagccaacaaacatatgaaaaaaaggtcaacatcactgatcgttagagcaatgcaaatcaaaaccac

SEQ ID NO: 46283 - DNA, 1049 bp, Homo sapiens
cagctggatcttgcactcaggacttctgccctctgctcctcaaagaactcattagtcactgttcccactcccaccctggcaccaaggaaaatgtggatgtttccacctttcccacccaggcctatttagggcatacaacccttcctgaatttcctgcagtacagttgagatcacactgtagcctctaacaagcatttaccagagattcagcgatgacaacagagaactacaatataatgagtaacagataaccactccatagatgttgcatgcatttccgagtgtatacagcccattctcaccttacaggagaaccaggaaaagagaacaatttgggaaggtctcttcatttaatttttcccacactgctgcctcttctatctttggcttgtttcttcttctcacttaggaggaagtggttctcagataattgactaatcacttcttcatggtcgtgaactcaaggacttacctgttatgaggggagaagcataataaagattacatcatgtgaacttttgaaataaaatgcccgaagacataagagagacccttaccactgtcacactcaaaaggaaagcttagtagctacagagatttaaaaagcaagcaaacaagcaaccaagcaaacaacaaagacctgaagaaaattccagaataatcctcaacctgtgctttcacatgctaaattttcataatgagaaagataaactgtgtatcttgtggtgtcagtggtcagtgtggtgatagtagttgtggtttgggctgcttttttccttgtttattttttccaaattttatttgggaaaatttctgctgtttccattgtgaactaaagttacatatactggatgatataactttaactcctaagagtatgtttggctatgtttttggaattaggtattatgcatgccaccttgtggccattattaagaaaacacctaacatgaagacgagaaacaggatcattagtgagagcagcttgagcttggagcagtactttcccaagtctgtttctccaacagcatccttagaacccttagaac

SEQ ID NO: 46284 - DNA, 1050 bp, Homo sapiens
ctattattaaacacagatcctgagggtgaatgacagcatctgtgagatttttgagtcagttctgaagtaggttctcagccaagttaggcagacatagaaaagtaattataaaatgcctaggcaccagccccacctagagttgatgcttagaatgaggtagatagtagcagaaggagcagttttttaagccagtgagctttacagtgggggaaggggcagaatggggaagtcctttattctgagctcttaagcatgccaggagcagatgcctgattttactgtgtggcactttgtggcccagaaactttccagattctgtattttcctatctggttaaatgtaactgtatttacctgtgtttcaaagcctgaatgctttatttattctctacttaattttcttttccagtttttcctaacaagcttccctagatttacttgttctcacttcctagacgctatttgtattcttccttcttctctagttcattggaaatttctgcttctttgagactgaggttatattccacttcttctgactacaccaccaccatcaatctccttctctgaactcttggatcattacttcaacctgaaacaactcatcaggtatctataaaggtggttatttgagttcctgtttttaggattccaaaatgatgccaagatatgtaaaatgaaatgttaattgcattttttttgagggggttagaactatgtaagtcccaaaagagacaaagagtttagctcaaagctatcagatgttggaatcagaagtttggcttaggttaataaaatgttttgctgtttaatttacaaaatttttcaagatcaggtccctggagggaaaatagcaaaaggaattcctgatagagaaaagttgcaaaccactaattgtgtatagatttggtattttgttatgtgtagtaaagtggttgagagtatgatctttgaagtcaggcagacctgggtttgccactttctatctgtataactctgtactttgcattatctttgggagtcttggtttctcacctagaaagtgagtcaa

SEQ ID NO: 46285 - DNA, 1021 bp, Homo sapiens
tgtgaaccaattaatgggcttcatcacataaacataattaaggaaaaaacatatgatcacctcaatagatgcagaaaaggcatttgaaaaaattcatccacacttcatgataaaaagcctcaaccaattaggcatagaaggaacatacctcaaaataataaaagccatgtgtgccaaaccaatagccaatatcatactgaatgaggaaaatgtgaaagcattccctttaagaactagaaacaagacagggattcccacttttcgccactcatattcagcataatactgtaagtcttagccagtgcaattaagcaaagtaaagaaataaaaggcatccaaattggaaaagagaaagtcaatatatctctgttgataatatgacctcatatctagaaaaccctcaagattcgataaaaaacgcttagatttgataaatgaattcagtaaaatttcaggatagaaaagaaatgtacaaaaatcagtatgacttctatacccttatatgatcaaggtgagaaccaaataaaaaaggcaatttcagttacaataactatgaaaaatacaaaatacctaggaatatatttgaccaaagaagtgaaagatctctacaaggaaaactacaacaggctgatgaaataaatttttgatgacacaaacaaatgtaaaaacatctcatgcctatagatcagaaagttactataattaaaatgaccatattgcctgatacagtttggctgtgtcccccacccaaatctcatcttgaattgtacttcccataattcccaccagtcacgggagggacccagtgggagttaatttaatcatgggggcagttatctttatgctgttttcccgatagtgagtgagttctcacaagatttgatggttttataaggggctttcccacctttgctctgcacattttgctgctgccatgtgaagaagcatgtgtttgcgtccccttttgcgaatgattgtgagtttcctgaggcctcccaagccctgtggaactgtgagtcaa

SEQ ID NO: 46286 - DNA, 1053 bp, Homo sapiens
agggcaggaacaaatcgcaatcgtggaatgtcatcagttaaggtaggaactggctattttcacttttgtggttcttcagtggcttcaggccatctggatgtatacgtgcaggtcacagggtatatgatggcttagcttgggctcagaggcctgacatgtttatccagtcaattaattaaaaacctgagtcctagaaaaagagaacaaaaaataaacagggaagaaatgatcaaaataataatttaaaaatttttgctagggcaggagtcttcatatttaaagggcccaccaagtaaaaagacctacattaaggcacatacatcattaaaagggtgagaacactaacactaaagggaagattctaaacgttttcagagggcggaaacaaaaattaaagagatgggaattagaatggcattgaatttcttaacaatgttactaagtcattgttatcctgaaatataatgaagtgaaatttttccaatattctgaaggacagtaacttccaacttagaattctatagtcaaactttccgtcaaatgtaagggcagaataaaaacattttcacatatacaagaatgaaatactttctttccatgtcattttttttttttaaagaaagctcctagagaatgtgttcagcaaaacatgggagtagcccaagaaaaagaaagacatgagatccagaaaaccggaccaggaaattaagaagggaaactccaggatgagagaaatatggcagaattggagagcaacccattttcactgaacagggagatggcagacttcaagagaaaacagtagttacagtaattgaaatgatagattatctaattttgagtatttgagaaattatattgatagatgtttgatagatctaatgaactatgggataaaattggagaatgaattgtaaaaaaaaatacaagtaaaaaaaggagacaattgttaattccatgaaaattacatcagaagggagacaacatttctctaaactgttttgtggtggtgaaaaatgtagaacttttcagaacttttgaaatgctaatatg

SEQ ID NO: 46287 - DNA, 1023 bp, Homo sapiens
acaagtaaggaatgtgctaagctaaattttggaaggagttagccattacggcctaatgaccaggaagctattaggtatgtagatcgttagtaaccatgcatagtaataataactgctgtctctggagtgtgcagagactagagtaagcactttaccatcatcaaactttaatctgcaaaacagtccttataagatagagggaagagcatcatctacttttcgtagatgagggaactgacggacagagaggaaattagctggaggtcacatagcaagtaattggttcaagctgagtcttaaagctgttacgacatcacattgcagtacaaatggcttatattttaatgtgtgacgttttgagaaatggtggtgtagggatgattgggagctgatgcaaaagcatagacatctgataaaatttgacaggctagtattttattatttggataagaatgtttattcagctgacatctctaccctgtcccattgagtatactacatatgtttgtgtctgtacataggtaaccttcaaatacacacagtcgtaagttcttgtgaagttttaaatataaccaaatcacttattttggtggaatcgtgatatgattaatattttcaccaaattcccagaattcatccataaagtaaaaagctaaagaccaactcttcaggctcttggcaagggaactttttaaatgtggatgccaaagagagccatattcttggagaaactactgcttccttgtctactagaaatatgctcaacttttagaactagcaggtgctgtagatattattttgttgatagatttctgttctcttacagaaaaaagatcagtatcagtaattttagactttaattacaacaaacatataaaaacggtgattaggtctaagtcagtagctccccttgtctcagcacccatttggggtcactgtcctgtgtttctctgtttagaaaatcaattctcaactagatatatgcttcagaaacaattctgaatacaaacgtacattgtccat

SEQ ID NO: 46288 - DNA, 1053 bp, Homo sapiens
agagccagaattatacatggattcagaaaaattctgtatttgcaaaatcttcgtacagaagtgaaaatgatatactgtaggttagatgaaatttattgaagatcatgtaaagaatttaaatagaaaatgtgaatgggaaaaagcaaaatttctagattaatatcattttatagaatgtatgattcataatatgtaccagttactgtgtaataaaacataattatttgtagctcttaaagtttctgtataaacgaacccaaaacattttaattttttaatgatagaaattggagatcactttatatttgtagtatcgttatattcagtcaatatgcctctagcctaggtctctgacaggttactttcctattttccagtttttgtactagtttattaaattactagagtgtcagaaatgctttaaaacttctagaatgtaatgcttcagacgtaatgattttcaatgatctcttcacattcatcactagtcttttctttcttgctctcatcattacactggtaaagagaaaaaggcttatgtaggtatttgaaattctagaacatagtgttttttgatcactgtgttatcaattatctatgtatgaatgtgtctatcatatatcaaatgtaggtattactaagaataacccatgttggagtcatagccagcatttggttagcttctagataatacagttttgtatttttttgttcaagattgatcttaccaagtattggggctcaaatttatcagtgttctcaaaacaaaaccaaaatacattgttcaagttctagaattttaatacttaaatctatacttgagggaattgaaggatgtttatactttttattcacttttaaattattaagttgaatttttatttatattttgtaatgtcagtttatttgtaaatatgtattgaatgcctacagtgaagcaggcaagatagacttgtggatataatgatgagccaaaaaaagttacagtttctgccctcatggcacttagtggagaagccagctgttaaagaatgacactaataaagttagaac

SEQ ID NO: 46289 - DNA, 1051 bp, Homo sapiens
attaacatggttcccctcccaggagagagcagtcctacgaatgattaaaggccaggttccgagctaagtaacttatctagatcagtttcttaacatcccgttatctaacctaagctttcaggcaccgtataaaagaatctggctgctttcagccaaatcctgttccgaaactgatgtaaaaccttttggccttccaaggtttgcatctttctacattttttcccaccaccctgactgaactcctgcaaatatgaaagcaggccagccctggtggctcacgcctgtaatcccagcacttcgggatgccaaggtaggcagatcacttggggtcaggagttcgagaccagtgggaccaacatactaaaaatacaaaattagctgggtgtggtggcaggtgcctgtaatcccagctgcttggaagactgaggcttaagaatcccttgaatccaggaagtggaggttgcagtgagctgagatcccacctctgcactccagcctgggcgactcaaaaaaaaagaagttgaaagcactgatctcacctcaagaaacttcaccgacataactacaaacttgcatagtattttaacagaatcacatttttccctgaagcctcttgaggaacctccctgaggaagtacataaatcttgtaaataatgactctagctgcaaatagtgagctattcttaattctagattatacttgaggatagaggagtctgataagttttcactactagtagatatatttcatggtcttggagtttttagaattagtcgttgattcctctttttgttcacattgtcagttgtgtttaacctaaggttgtttttgaccaagttcaacataatttttttctagattcaatttttgattgtatcaatgtacatgacgactatacaacatccctaccataagattgttgaatccctcctaattcggtgttaactgggacaggttatttatcctattaacccatattcgatgatggcaattgataatacaatttttaaatatatttagttatttgccttaatagagtcctataccta

SEQ ID NO: 46290 - DNA, 1033 bp, Homo sapiens
agcatgacaaaagcaaccactgacagagcccccaaagttgaggaagagagagagtagagaaaacagtatcttgacctctccctgcttccactctcagatccccttcctgtgtcttaccactggcagatccaaccagaagccaaagggaaaaagtgctccatttatgtagtcagtaagagtaaatttctggagcaaaagcaaggtagaaaagggtaagcagattaggggtaaaggcgtggcacgaaatgtggaataatcacaactcctcactgctggtgagccctagtgtttgcttttggtcctgctcaacatttttaaccacttgggtaaagaaatagtgccagaatatcagactgtgaatagcaaaaagctgaaatctgtgattaaccaagaagttttctgtctatcaagatgcaaaattatcttgacagatagaaatctacaaaataaaagtttataagaaaattagataagtttcccagttaggataataaaaagctttttttcaggacaatgggaggggtgggaaaagtgcttgataacaatacacatcctaaaagatgtgaatgtcagttgatgatgggtcatgattgcttacaaagcaaatgtaatttgaggttgcactttcattggctgctagacatctccagctgcctattccacatgttcctcaaatgcagtttgccaaagcctaatcctgttaccttcccaatctccctgtgaaactgtttgaactcctctgttctttctttggttatcggtatactgcccacagggatctcagctaggagccttggaattatcacatttctccttcccgtcccatgtttaatgcatcactaaatcatgctgattctatctcaagacatcacctgaatacccaattttatttctgtactccattgtccttgcctttttcaagccccactgtttccagtctctagacttctataccagctttctcattttcgtgacttcagtccagtctccctacagctgtcagttaccttcagataaacaaatgggcatttgt

SEQ ID NO: 46291 - DNA, 1011 bp, Homo sapiens
cccaagagttctaaaccagcctggacaacataagactccatctctacaaaaaaaaaaaaaatagctagtcatggtggcatgcacctctagtcccagctacttgggaggctgaggtgggaggattacttaagccagggaggtcaaagctgcagtgagccgtgattgcaccactacactccagcctgggcaacagagtgagaccatgttaaaaaaaaaaaaaaaaaaaaaagagagaaagaaagaaaagaaaggaaagaaagaaagataacagtaccacaattataaaagtttacttgcaacatgtggaaggaagtactgggtagtggttagcatttttgtagttagagatcttgatttaaattcagactggcgcctgatggtagtgtggcctgtggacaacttacttaaacttttctgtctgctcagctgtaaactctctgcctggaatggtgtctgtcacacagagggaatggaattaatgtttgttgaatgaatgaataaaagactcatacaacatgcataattctttcctaatgggattgtggtaaggatcaaattagacaatatctagtagcttatgactattagaatatatcaaatatatctggaattgaaactggcctatatgttgggtaatgtagagttacacatgcaaagggcagcttttcctaggcccttgacacgtgttctaagatccaaagttatacctgggcatgtgtggcctcagagcttctgctgtgttgtcacctcatggatgggtcatctgtacctcacaatctttaacacccctgccctgtggattattatatacctcatcccataacagagtgtatagatgaacgatgtataatcccatatacggtgattagggaattattactaaatgaaaatgagagaaagctaacagagggtgagagggatgttagggtatcattgcctggaatccctttgcaacacatgcacctcttgaccctcactacaacatccttctcttgccagtccagcacagtg

SEQ ID NO: 46292 - DNA, 1045 bp, Homo sapiens
aaagaaaaacatcattaacattttcgtgtttatttttctctttgcattttattgatatgtattttaatataatattgagttaatgatttttgtgaccttcttttacttgaagtaatgaacatcttgttattacgtgtattacaacatgacttttaatgactgcacagtcagctgtagttttccatctttgtatcttttttattctgcttagaactgggtcttagatatatatagaaggcatatgatacatgttttagtacaaataataaacctatagtatgtcagactgtatgaagaaaagcttttcaacttgtgttccagaaattatgtacaataagatatacatttttccccccttgagagaagattcaaggcctctgtgtgtatgtgggtgggagggtggaaggggggttacaccagattctcaaataaattggtgacctctccctaagatatttgggaaccattaaaagcagttcctaatttagggacagtgaagtcatgaaaaagcttgcatatgtgaagatgcttctgtgttgtagacagacattgacctaaccatttctgtcagtagaaatctctttaccctgaagccctctctagctgttagggtagggtctcagcactgctgcggccttcttgttcttttttttttttttcctccagtagcaagacttttttcagtactctcagggttgcttgagagaccctaaccagagggtcttagccttgacattaggttcaccatggcggtttctggaaatatttttagtattcattcagtaaataattggtaggtgcctagtatgtgcctgctgctgttttaaatgctggaggtgtagccgtgaataaaagaaagtctctcccttgaggtggtagcattccagtggagaaatagcattctaggtaaatcatggtgtaagttttgctgataataagctaattttcatttataacattttttctgtgtgtttggcagagtgttcttaatttctgaaaatccgattaaaaatggacattgcattccaacttgtttataaactgg

SEQ ID NO: 46293 - DNA, 1070 bp, Homo sapiens
ttggaacagtttcagtaggaatgctaccagctcttctttgtacatctagtagcattctgctgtgaacccatctggttctgagcttcttttggttggtacattatttattactgattcaattttagaactcattattggtctatgagcagattcaatttcttcctgggtgaggctcaagaggctgtatgtatccaggaatttatccatttcatctagattttctattttatgtggatagaggtgttcatagtagtctctgatggttatttgtatttctgtggagtcgttggtaatatcccctctgtcatttctaattgtttttatttttatcttctctcttttcttcattagtctagctagtggtttatctattttattaattttttcaaaaaactaacaactggattcattgatcttttgagagtgtgtgtgtttatgtgtgtgtgtgtgtgtgtgtgtgtgtgtgtgtgtgtgtgtgtctaaatctccttcacttcagctctgattttagttatttgtcttctgctagctagcttcggggttagtttgctctgggtttgctagttttttagttgtgatgttacattgttaaattgagatctttctaactttttggtgtggtatttagtgctataaattcccctcttaacactgccttagctgtgtcacagagattctggtatgtggtatttttcttctggctagtttcaaacaacatctttatttctgccttaatttcattatttatgcaaaagtcattcaggagcaggttatttgatttacaggtaattgtatggttttgggtgaatttcttattcttgatttctaattttattgtggtgtagtccaagagagtggttgttatgatttcatttcttctgcatttgctgaggagtgttttgtgcccaattatgtgattcattttagagtacgtgccatgtggcagtgagaagaatgtatattctcttgctttgaggtggagagttctatagatgtctattaggttccatttgttccactgctgagtacaggtcctgaatatcttcattaattttctgcctcaattatct

SEQ ID NO: 46294 - DNA, 1064 bp, Homo sapiens
acttcctgaaacaaaatgtactatgcatgtttgcctcaacataaagtaaataataaagcttggtatgtactgcttttaattatttgctaacttctttttgttgcatcttaatgtactttttaggatccctttgtccattcttcttctgtttccaaaaactgctgccactctggatggacatcttgtccctagggatacaaatgttcccttttgcatcaatttattctttgaaaaattatttctgagcattttcaatgtgcctggccctaggctaaatgctggaaatataataatgaacagaaccaggtttccgctcaggtatatccagtgtacaacatagcaggatttacaaaatgtttatgatacaacttaaatgttgcccttctctgccagtcatattccttcaattattcaataactcattgatttatacatgtataaaattttcattttgcacctattacatgccaggtacttttgcaaaaactgtgaagtaggtattaggtttacacaaatcacaatgtagaaacaacactactgaatcttataaaatgaaatacgactacttggtttttcaatttttcattgagataactaatttttgaagaaattaaattatgtttttaaagaatatatttctaacatttttacctgataaaaatacttacagatttagtattcccttcaataatttcttcttctggtggttcgagtttgagatccttcaataagaggaagaaatggcagaaaagaaaaaaaattatatcatttaaaacaatgccatatattcaaatcatagttctctcatggctaacattgaaccaaaagaacttcattatcttaaagatgaaataatactgatttttttaaaactcagctgttccaataaagactctttgtacttatttatcaattgtaagaagctgttttagacgtgttcaaagtattgctttaaatttacttcttgaatgccattagagagcaaagtggaagagaaaggtacattaaaacagagagggaaagggtaggaaggtaaacgaaagaaaaggaaacagaatgactaa

SEQ ID NO: 46295 - DNA, 1061 bp, Homo sapiens
aatctctgggagtggggcccaggcactgctatttttaaaacctccctaagtgtctgtattgtgcaggcagagctgggatcacttccctataacaacttaccaatttttaaagagaagtcctattgttcattgcacagctccaatttcttgaatattttgtgatattagacataagtgacaatcattacaaacaactagatttcaaaaaaattagtaactcatgcatttccaaaggtatatcaaatattacagggttgtcaaacacattaactacttacaacaggccctgttcaaatggtaatggcatcagatggtgcttgtttttaatggatcacactggattggatgccaactgtttcctgtaacaaatcctattagcattatagcaattgtagtttcaaggcttccctcaagatccgcctgtgggcttctcatggaattttagatatcaacattagttcttttcaagaattggtagtgaaagtataaaagtgcaaatcaaagtaaggattggcatgaatcataaaagtgcataaacaaaaacaaaacacaaggtaaggatgatctagaatatgagaaaaataacttccacagtaataccagctatgtagcatgagagaattaaacccctggtctactgttttctattccaatgggtttctcatttcatgtcaatagctactatttgttgaataccaatgatattttagaggttaggtattcagtatattcaacaaatattcctacttttgttggactaaccaaagcacatgggtttagtattaataactaagtagggttaatttctaccaaaataatgatggatatatccttttcacaaaaatctgcagggacctcttggttggacatttgtgattactaactcagataattaggaaagctcatgggctttcctaatgagatatataaatacatccacctattccatcataattcttttcgtctaaaggcaattcttacgtgatcaagtgggatggattgtaaaaataaccagaactcttcactaccctcctgaactcatgccctttgactaatttgac

SEQ ID NO: 46296 - DNA, 1819 bp, Homo sapiens
gaatttgattaactggtacaactgaaaaattgaatgtagacagacacactggcataacatctataccatatatattccatatgggtgtagtgattccctgaggctcattccatctgatatagtctacattttgataattccagtaaaagaaattacctgaaaaatcagcaataagaagtgaacgaagaattgtatgaaacaaaccaatcttgcaaagtaaacagagaggctgaaaatctatcttacaggaaaaagatgctctcctttcctctacttcacagcaggagctgatggagcaatttattgtggttattgagagaatggaatttgcagcaggcggcacaaatctatccactctctcactcccccacagcctgtttccctttccctggggctgttctagtagctcgaggtcattttcccaacacccattaaagtagtgtttctgaacctaaaaaataaacttgtgcgccttttttataaatataaaacatgcactcaatccctggagattgtaatacactgaaatagactttatcttctctgtatcctcattaaaaagagtttactgagctctattttgggaagtttacactgtgaacggtgtatatataggtactgtttgcatttttctttttttttgaaacagagtctcgttctgtcatccaggctggggtgcagtagcgcgatctcggctcactgcaacctccgcctccggggttcaagcgattctcctgcctcagcctcctgagtagctgggattacaggcacatgctaccatgcccagctaatttttgtatttttagtagagacggggtctcatcacgttggtcagtctggtctcgaactcctgacttcgtgatctgcctgcctcggcctcccaaagtgctgggattataggcgtgagccactgcaccctgaatttttaaatattcaattttattttcaaatgagtgggctcttaaaaactacacatattcccacctttgcaagtcttgagtcactgaagtaaaaaggactaaaatggggttttgatttgtgccctctgagtctggcgtgaaatagaataataaaaataatcatggaaacacagcatttcctgtgttcttgtttcaaaggcactactggaagatgatgagctgttagtggcactgaggaagtactgtactcatactctagagaggaggtcagccacccagacaaccaggaaacagtagtaaacgcaatagtgacttcagctcacgtcttcagtggatgggaagcattgtgctgagcactgcatatggactgtctcactgaatcctcccaaccatctcatgagcctcttgaggaggaaactaaggcttagagccagtgagggtctttctcaaaaccacaaagctagtaaaattccatgtttatttccagagccagacttcttagctagagaaatattctgctggggtatgaataaaatataattaattgaacactgagaggaaaagcaaaacacccagagacatgaagtatctgtttatgcacacatgtacacacacatacacaaacacacacacattttctaaaaaccttcccaaagcaacatttgaagagcattatgaaatatagtttaagcaagctcataaggtagggttagacttggttgtggaagttttctaaaagcagatgaatttggacctgggctctgaacttgaggcagtgcatgggctggcagagacttgcagctgggtgcacatttctgagaggaagaatagccaggtctgaggcacagtggggaacaaacagattatatcagaaattctatctgtgcatcaccgaggca

SEQ ID NO: 46297 - DNA, 1098 bp, Homo sapiens
aggcaggagaatcgcttgaacccaggaggtgaaggttgcagtgagccaagatcaagccactgcactccagcctgggcaacagagcgagattctttctgaaaaaaaaaaaagaaaaaaaaaaaaagaagttacatgtagaattcttaactcagtacttggcttattgtgtgtgtgtgtgtgtgtgtgtgtgtgtgtgtgtgtgtgtgtgtgtgtatgtgttgttagcccaatagctaaaaggaaagtatcacttttattgggcgagtagctatgaaagctaagccttaatggtgtctaagctaagaagcaaagctaacagaaacaaaaggaatggggtgggaggaaaaccagaaaagaaatggagggaaaatgcacatatctattaaagcaatgagaagcagcaagctaataatataagtattaatggtggtggtggtgatgatttctacatgtattgctctgttccagggtctaatttaagcattttccatagataagccattttaccttcacaggtactttgggggtcatgtggctacactgtccattgcctccccaaatagtactctcctcttactaacatgactctgccactgttcagtttgcaatacacccaatgtaccactcagtgttggactgagaataccctgataaccttactcctctctgctggacacttgtttcctagccttcccagtggccagcaatgaccatgtgacttgaattctggccagtgagatgcaaggggaagtatgctgggaagcagggactctgggaaaacatttgcatcttcaggatcagacatgagaggagagcttgttggttctccctttttcttcctgactgtgggccatctggtgaagagccagaaggcacatctgaaagacagacctgggatctttgatgacagcattaagctgtagaagaaccttgagattgttgcctctgacttctttttgagaataataaatgtacttataatataaatgactgttactgtgcttactctagattgcagttgcaagcattcctatttgataccggaaggtgctgttgtcatctttgtgtatttatttctccattgtttacagataagga

SEQ ID NO: 46298 - DNA, 1075 bp, Homo sapiens
tcaaagacttatagtttcaaaggaatttatactagaaaataacatggctatacatttttatatgtattgtattttcattagcaaggtttataaccagaacagatttttattattaaaaatatttaatttctgagcttgttgagcagagtgtagatagtatactatctacagatagttctataggtagatagttttagtcattctagtgttgaaattcgaaaacagatgtcttctgtctaatactttcactactattttatgacttccctaagattttgtgcttgttttatatttcttagttattcatttgggttaaaattttatttttcaagtattttgaaatcattgtttacatgcaaatatgtatttttcataagaaaagttagctgtctgtatcgcataccaaaactatatagcataaaacttgaaccacatttttccaaacagtctcttctttcttgatatatttaacttacataacaaagaattatgatgctaataaatgacacaatgttgctgtattactaaatggtactccaacttatcacaggattgttcacttttgaaaaaccagtctataacctgatacgtggatagagattctataggttacagccaaggttgtttgatgcctatatactaactttttaactaatgcaaagatagtagtcatagggctgtgagttgggttggggatggagtagacattgttgaagaataaacttcactcacagttacttaaaaatcacaaaacgctgatttaaccctttacagtatacgacagtttacaaaatctgccctatgaagtaatactctaaaagtttccactttattttttctttatcataacagattcattttcacaatattattcctttatgcatatgcttttttccacatattaggattttgtcactaaaaggttttaggtgagttacaatgtagcaaagcatttagcattaaatattgagaatattagtgaactttgaaaattgagctaaaattcacatgaattgataaagttatagaataagttttgaaagagtgcacttagtaaatataccaaacaaaaata

SEQ ID NO: 46299 - DNA, 1041 bp, Homo sapiens
atgagccgttttgttatttgacagttctagttactttaatagtttctatggtaacatgcatttaaatctgtaaacacctggtacgttcacagtatttggtttgataaactaattagtaaaaactgtattcaatcaattgataaattaactttttcttttatattacaggaaaacaaccaaagttttaagtagcattttaagaacagatgaatttaagtttggacatctgcaaatgaggtggatctagcaacaataactgtaatggactgtgacaattcaatttattcttaattttgatggttggctatttgacttctctaaaaatgagaaagagctattttaaaatataaagaattttctaatcagtttcagctttgcaggaggtttcctgcataaattgggaagtaacactggaaagtaggaatttggttagtgaagtgggaagactgtatatttataatttgcatactacttgcaattttttgtttttcatcacttgtaataatggaatggaaatgtaagctgtaaagactctcaaatataaaatatttgctacagtgtatatatggtacataattgcttgttgcttttaaagttccttctgttgttctgcttcccactgatttcataccagctcatgaatggatcattacagtctctccagaggcttagaatgattcagaatgttcaatgcatagttctcaataaacaggaggcagaatttttaatgggtatttcttttcagatatatgattggtctctaggtttttgataataatatggtcttaaattcataattactagcagagattgataatttggaaacaatggtagtgaatgaaactgaagttgaaaaacggctgctacttatgtcactaatcagaccatatgaatagcagaagttgagcaatttcaaagtaaaactgatatttttatttccaaaggaatttagacatttgaaaataattgacatacattaagttttaattcgataatttcttatatatggatgaacaatttttgggtttaagcttttaattc

SEQ ID NO: 46300 - DNA, 1076 bp, Homo sapiens
gaaagggtacttctctgacatctttgtggcaatgtatgcatggtctgttaatgggctatccattctgttcaattagtctttttatacattataacaaatcatctcatgtatttttctttaacatgtctttgctattcttagccctttatatttctgtgttaccttatcaaattccatctaaataaatacacataataaatacatacatgcatctcttaggatattcattggaaaggacatggattttgtcatcagacatggcttcaaattgtagctccattctgtgtaccggtagttcgaacttggacaagtcacttaacctcattgaattgctgataaggatgataagttttgcaattgctgataaggatgataatctctggctgttaggattaataaaataatgcatgagattactgagtatgatacctttctctcattatgcttttagtaaatgattcccattctttgtggtctctacttacatttgactggaatttaacttcctattagagttttcgtaaatacctttatataggtaaaggcagctaggactcttctgaaatgagattcagaatataggtatactgagaacagttcgaatgggagataaacactactaccttctatctccatttttggtattctaattctttggaattcatagtatttttttcctcaaattataatttttaaaaaacattatgttgttcatagtttatattaatatttcttaaactccctaactttagatctctagccaattctttttaaagttaattaaagcaggaattaaaattttttataatacttctcatgcataaatattaaataagaaaaaatgtacttgatgtttcaactttcccaccggttcaaagatctttgggatatgtaatccatggtctgtaagaataaatgtaaacttcagtgctatataaactatagtcactttttcatttgtagactttccatctttaataacattttattgtgtaaataaaagcttgacatacactttttaaaacaaacttgtacattagaattcattttacttgtgatttacacattaatacata

SEQ ID NO: 46301 - DNA, 1051 bp, Homo sapiens
tctggcagagtttagtgtgtgttaatgtaaaataaaatcttgatgtatgagcaacaaattatggtgttacatcaggctgccattttgagaatataaaaattgtcataaagatatacttagtctggtacgatttataaatgcctattatgtgtagggacatatactcacgagaatccttcagtaaagtaacttcttagcagcattagtttataagtaagcttagagttttatcctagttagttaaaatattctaaaacaaaataatcagttgagactcaacattagtgtcaaatttcccacaaatgaaaatgtgattatgagctatttaatgattacgagatatttcccccggtacatccctctggtattatgactataaataaaaattgtgtgctgctgaatatttaagtatcttaaatagagaaattaataaacataaaatcttgatttattttttatttttaaagatttgattatatctaacaaatgactttcaaagttcaaaagcggcaaatgaatcttacattttttcaccaagtacttgagctcaaacatgtttctaatgcacttaatatttttttaaaaatgagatgaagcttagtactgtttcacaaatgctgaaatcccaccaccacagatatcctgttgctcattaatattactccaggcattacagcttgtgtcattattgatttcttctgctgaatttttcaagcttttgagacctctggaattcttgtccttaaaggcaaatattcagatgcctctaacatgaaagtcactgtcacatttatatccttatcactttctggttgttttgtatggtgactaattttaacagtagtggtttttctctaaaacccaggcaacaaataagttaacaaaaattacatatttgcaaacatttcaacttgaaataatcacaacagagcagtagctaaatactattctttcccaatgtctttatattatgcaaattaataaaacatatttgcacttttacttttttaccaataggtggcattgacaattttaacttttaaaatatatc

SEQ ID NO: 46302 - DNA, 1055 bp, Homo sapiens
atcatgtgtttcagggatgggttttggcaaatttaactttcttcttgtccttaaatatgattgtcactggttatgttttttttctttaaacattattgttatttacagagaaatgagtactctagggaagtctatgaaattgttttttgttttttgttttttgttcctgtatggaacagtgaaatgttttctactttcttttaaatgtagctctggggagtgtctctgaacaagtgttactgattttgtaggtctgtgagagaatattgtagaacccaaagtagaaaaagataatttttattataaaattatgttatttctttcctaaaatattagggaaagtaagtagaaaattctgatttctattctttgttaatatgtaaacgtcatttatagtaaacatttattcttttaccattctgtggtgggagatgctgaagaaaggaatgtgatcgtttgttttggagccatgtaaacgaaatgaacactcttacagatagagagtagaagctaagagccctctttaaaactgctcaccgtggtgactcgtaaagacacaagcacttttgtgtaggaagagggaaaagaactgttagataatgctttctttctttgagactgcagaatggattaaaattattaagatttaaagaaaataattgtgttaggatgattatcattgctgtctttcttttctcagagctttgatatcacagcttttcgatctaatttgccttcagtattgtgttctcacctgttatgctacttttctggtttaggatttttcttgcttaagaaatcaaaccaaataatctttgcttttgtgtgggtaacatggttgttttgtttcccattttgtaccccctactatctcaaatgatggatgttaagtatgaatccccttcttatatgccattattttaatgtaattatgctttacattactctcagtttaacgcttctaaactttcaatgcaaaggccatgtagttggattaatatgtatttcctcctcccccaagggttaaacattattctctaaaaataattggttga

SEQ ID NO: 46303 - DNA, 1009 bp, Homo sapiens
taacttactcccccatcaggctcttgtctctctattttgttctttttcctcctcttctttttcctcctattgctttatttatttttttgttactcccacttcccctccccctcctgctcttcctttctctgtctgtgcaaccacgtgcttcaaatctgtgtatctggactgccttctctaacagttccgtgtgagtgttagcagaatgaaaaccagatggaccagcagttcccactgttatctcccagccgactctggcaagcctccctttttccctccctccttggcatgacagaaatatttgcctttatttagggagacttgtatttgctgctgtacctcttccctcagctgcaacataagtgggaagctatttattcccttgttgctgaggttggttgaggtgagtagaatgtgcaaatgaatttaactgttgaagaagcggttttaagcctgcctaacttctgtatttttctagaataagtgacttactggttgtagcaatctgaagacaagtttttaacaatagataaaggtgaaaatgctcttcatgtgtgtctctaccatcctttcactcagaacacttttattcactatagggacatccgttgttattcagccagaagtatagattcagaaatggagaccctgatattgctgttaactcatcaataataataataacagcttattgtgcaaatactcttattagaatgatgattattttcattctcttattgcatcttccctaaagtgatatcaacattatttcaacttttaaatgttgtgttttattgcaacccaagtgttaagcaattgctttgaacaaaagtgaggtagatttggaattgttatagtagtaatttgggtttttctttttctttcaataattgacctttaagtgattttgagattttctcactgtggttattataacatttttaaaggcttgttctttcttaatagttacttcacttttctaaaagcccaagtgtgagatatttgtgtc

SEQ ID NO: 46304 - DNA, 1047 bp, Homo sapiens
ttgatataaaagcaaatatactatgctgggtattatttgaacaaatagagcagttttggagtgaacatttgtaatagaattcattgtaactaaaattcatttttgagtaactttgaattgtttataaacgtggcagattagtatgtgtgcatagattttgataatttgcaatgtggagagatataagtggagaatttattagagatgaaagtcctgtgaaagaaaatatgatgaaaaaaattctgggatttttttttttattgctgtgtatttgctccacctggtggattttgttgaaagtgttttaatccttgttaatgaaaagaacactctttagacaatttctctgaactatagggaaatcttttgttttatttttgttgctgtgtaaaatagtttaattcctatctaggtcaaaacatttatgtgtcatttgttcagttctttcaatgcattgaaagtaacttttttttttttcaaaatataatacatgctcattttagaagatttgggaaatacagaaaaataaaaaaatagggaataaatattgtatataatttcaccacccacaattgcattatttttaagaatagacattatcagaagagaaccagtttgcatttgaatttatttaaagatatctggaatgttaaatattatgccaaagtatgatgatgatgattattactataattatttttggacaaatactatccttagaattcccaggctccaaaataatgaatataatcaagttcatcaagaattgcttttattaagctgcatgtctacagaaggcaaaggtagtgagattaaaggtatctcatgtattcatagggttgttcatagcggtggtaagatctgttgtttgctgggctcacacagattgctttctctgaaaatcttaaggattcagttgtgctttgatcatcttattgttttccttaggttattctttttttctcctgcagtctctcacagctctgtaacagaaggtgaagttttgaaaacagtgtctccatatgcaagggatttggagaccttttt

SEQ ID NO: 46305 - DNA, 1061 bp, Homo sapiens
ttgttttccatgtggcattaaaaatttacttctaggccaggcatggtggctcatacctataatcccagcactttgaggggctgaggcaggaggattgcttgaactcaggagttctagaccagtctgggcaacaaagtgagaccccatctctacaaaaaaattaaaaattcaggcgagtgtgatggcacatgcctgtagtcccagctacttgggaggctaaagtgggaggattgctcgagcccaggaattcgtggctgcagtgagcgatgattgcaccgttttactcctgcctgggcaacagcaaggccctgtttttaaataaatgaaaaaatatactaacaataataattactcctaatttttttttcctctttgtaataatattaggtgtatagaaatatggggttcaaactcaagaagttgggaaaacagaaatcacatactttacattttagaacacctggaatccattgggctcttagagttttggagttgtaatttagaagcagataaagcaaaggactatccatggctgaacagtcggcattgtgagtgagaatggcctgaggtggcgccagagagtctggtctgcgtagcaagtttgaagcaggctggggtctcctggagatgggcctctgttagggcagaggctggggggcaggagggtgggaaatgatactaaaggggtatgccaccagcttgggtggaagctggtaaaatgagaacgctgttgtgtttcccacctggtgttttaaagcatacccaaggtacacacagtgcttggtcctctagaatgccatttggagccgttctcctgtaatgcctgccattgtagggaccagacagatttgggacacctaggagtggtagtctggcctgaggagcttgctatcataagccattgaggacaattctaagaagggtgtagtatttgacatattaaaaagatccatatgttttctaaaagatgtaagaggaagcagcttgggaggaaagaatgacaggaaactttttttgcaaagagtgcctgtttatgttcatgcatatcatggaatgggata

SEQ ID NO: 46306 - DNA, 1026 bp, Homo sapiens
aacagaattgtgcagaaaagttactcacattgccatcttccagaaataatcatatttaacatctagatgtatttactttcagtcttccccgctgtgtgcaccctcccccactccactatttgagtacttacacaacctatacgtgtacatatatttatgtatcttggttatagcattgaaattttttgctttatcatttgttaataaaattgttagtatttatagtaagctaaatgtttccaagatccagctgattgtctttaatgatctttgcttactgcaaggcaattcccaactaagaaatatctagtaatgtattttaattaatcagtacttatttaatttttaaaccttaaagagcaagaaacaactgattgcatcacaaaagaatcataatgtggcacataaactacattgattttttaaaaaatagaacctgcttgttttatttacatcagaatatgttcaccgattttaatttctaggaagtaatttggtctcaaaaaataatagctacagccttagtaattccttttgagactgcttttagaaatctttcttcccttgcatttgttgagttcctaccttatatgtgtatgattgtgctggacccttatatttcctagtttgtaagaattacatagcaatactttttctattcatagtagtgatagtagtggtctcatttttaatcatagtaggtgaggaatagacaataaatattgtgaatgaacaaattctaagtttgtcaaatatagcaggaaaaatgagaaaatttatattattaaaaggaagaaaaggtgtagaagtttgttgatttggtaaaataattcaacaatatttgtttcattaatattttttaactattctattacataaggattattcttcactgttgttttaaactatgtgtgctaataatggcaatactgaaatttcagaacagcgaaacaaaatttgaataatgaaacaaaccactttgttttgaaacaggattaacttgtgtgtaaaattccataaataata

SEQ ID NO: 46307 - DNA, 1044 bp, Homo sapiens
tactaagtatttgttatcttggtgtaatttaccctttcacacattttgcatagtctttaaataacaaaactaagcattaggcagacattgagtcaaagaaatttgaaccatacagagagtgaatatgaaaaaaaaaaccagaagggacttaacatatttttatgttaaagaaatttatgaaaatataaatctattttgactatgacttatacatgacaattgttgccatcaagtaggcaactgatgccctttacagtgtttagaacaaaactagtcctttatacaattttcatgaaaatgttaggtttctgtttgatcagcaggtgctgttgagatgaaagccatgtgtaaattttcagaaggccaaaagtgtcaattcagaaaaggaaagtgataagagaaaatgcaatcagttttcctgttttcaatttgtgcgggatttgaagagctgttttgttaaactgctacatctgctccaatatgaatattgaactacttccactaaaaataacaacctataatttggaagctactgcagtcttttgttaatgtgagtgggttatttaaaaacaaaaaaacaaaaaaataaaaaaaaaattttctattctgacaatctcttgcctaatgtgcattttcatttgttggcacttttatcctcagcagataaatggtagtatgcaattaagacctcatcttgtttgactataaaagaggtttccataggtgaaaatcctggtaataaaaaggggttcacacaaaacaaaatttattttaaaataacctgtttaaatacatgtattgaaaatcagatagttattccttacattctctaatactacaatttttaacttactgccggactgttgtaacaaagttaacactgttcttgcatactgagcattccgagatttattttacctttaatatacctgcaaatgtaagtttaaactaatcagggatattttactaacagggctttcagaataatcttttccatgcttaaataaaatgattaaattatgcttgagtgcctgcatacaaaag

SEQ ID NO: 46308 - DNA, 1034 bp, Homo sapiens
atttgttctgtagtattgtttaaatctgtgtttttttcttgagttttttgtctcaataatctatccatttttgactactattatggtattgctttctatttcttcagttccatggctgttttatgtatttagattctttgatgttgggtgcatatatatatatatatatatgtctacacacacatatacatatatatgtacactcatatatacatatatacttgtgtatgtagatatgtatatatacatatacatgtatgtacatatatacacatatatatgtatatatgtatatttatttatgtacacatatgcatatatgtgtatttttaaatttataatcattatatcttcctgttaagttaattcatttatcattatgtaatgaccttcttcatctcttgtaacagtttttggtttaaattctacttagtcagatataagtatagctactcctgctctttttgggttacgatttgcatggaatatctttttccatctctttactttcggcctgtgtgtgtcattaaatctaaagctagtcttttatagacagcatataactgaacctttttttatccattgagacactctatatattttgattggtgagtttaatatatttgcacttagagtaatttttgatagtaagggctttttattgtcattttttgttaatcgtttcctgtctgttttgtatttcttttgttcctctcttcctcgcttggtatcatctttgcaatttgataatttttgttgtgatatactttgattctttctatttatctcttctgaatctaatattagttttttttatcttttctgtatctattattagttttttttctttgtggttatcatgaggcttccataaaatgtttaacagtctattttaagctaataatagcttaactttaataacattcaaaagctccactcttactttttctcaaattgatttttagccttgtttcttgtaccgacagtgttttgtgtatgatatcagtttttgatattagtatttcctgtctgaa

SEQ ID NO: 46309 - DNA, 1015 bp, Homo sapiens
tcccattttgtagattacctttttattttgttcattgctccttatgccatgcagaagatttttagtttaatttagtctcctttgtttgtttttgcttcagttgcatgttctttagtgttacatccaagaaatcatagccaagaccaatgtcaagaaataaaaatgaattaaaggcaaatataagacataaaactactagaaaaaaagaagggggacattcattctatacctaaaaggcaaatataagacataaaagtactagaaaaaaagaagggagatattcattctatacctaatttattgagaatttttatcatgaaatggtgctgaattttattttttgttataccttaagttctaggatacatgtgcagaacgtgcaggtttgttacgtaggtatacatgtcccatggtggtttgctgcacccatcaacccgtcatctatattaggtatttctcctaatgctatcctttcccttacaccccaccccctgacaggccctgttgtgtgatgttcccttccctgtgctcgtatgttctcaatgttcaacccccacttatgcatgagaacatgcggtgtttggttttctgttcctgtgttagtttgctgagaaagatggtttccagcttcatccatgtccctgcaaaggacatgaactcattattttttatggctgcatagtattccatggtgtatatgtgccacattttcattatccagtctatcattgatgggcattggggttggttccaagtctttgctattttaaatagtgcttcagtaaacataagtgtggatgtgtctttatagtagaatgatttataatcctttgggtatatacccagtaatggaattgcttggtcaaatggtatttttggttctagatccttgaggaatcaccacaatgtcttctacaatggttgaactaattggcactcccaccaacagtgtaaaagcgttcctatttctccacatcctctccagcatgtgttgtttcctgactttttaatgatt

SEQ ID NO: 46310 - DNA, 2171 bp, Homo sapiens
agtatctgtttttctatagggtaaataaagtacaaaagataactgaaaaacagttgtgaagaccttttgctgccaaaccttcaaataatacaaagtatttcctttatcaccatccacttccctcttattttttattttagttagttctctttatacctagtaattgacatttataataacataagatctgactaaaatgtatgctactatataattttaataccatatgcttattaagtattagagcagttcagttatgaagctggtgttttagcaattccaactgatgtttaaacaggagaacgttttttaaacaggaattatgttccacactgtatgctacttgtattctctaaacataaaggagttacttggtagtaatgacactcctgccactgatgataacaccatatatttgcatagagcgttctagtttacaaatattgacttgcccagtgttgctcacaggtcagactctttagacacagatctgattctaaggctacaaggttatagctcatttaaggtttttttgctattgcccactgaactgtgctgttcttgccggaatcaatcatttccttcacagataaaccgtgcaggtaacctctataagcatgatggaaacctatgacaaggaagatcatgaacaaagagtatgagtgaagatgtgcatgttgatctaagcagggggtgaggtaatcagtaggtgtggaaaagatggaaaccaggcaagtttttaataaatatgatcttatcattttgttaattataacaaaataagcaatgtagagagaactgggctgaataagaacaaggcagaaaatactcaagcatggattatattagtaggcagtagtcaaatacacattttccttcatccctgctctcctaagataacccagaaaggagtggtcatatactttggaggatagccatatagatacttatcagtggcctgtgattctttcctccagccccattcttcctagatgattggaaaaacacttaagggagcattaagaggctctgattgctactcagtgatatacgtcagtctgagaggacagggcctaggtaaaaaagacttgtaacgatgattcacaatgacccttactgtcacttcatgtaagttatagagggctcaggtataccaggctggcaactgatggataaacggcattatgctaaaatacaattttggatttcatattaaagtatctctagatacccaggaataccttagaggaggaatggcttctgaccagggctgggacctactcttagttgttagtgtccttatgatagttgcaaaccagaaaggagtcaggttttcttgagtgtggaaactcctagagggaaaactgaacgaagagtcgatgacaagccaatacacccatttttaatgctcaagaagtaaactagccaggcacaatggcatgtgcctataatcccagctacttggcaggctgagggaggaggttcccttgggtccaggtgtcccagaccagcttgggcaacatttggagacttctgtctcaacaagaacaacaaagtcaactagctaaattggatgtaatgactaacagtaaagcatccatcttgtttgattaacaaaagagatctttaacgaaaaggttttaagaacattttcgcaaagaggaaatgacagctctccagcgtataggatattcaataaaggatgtaagagaactgtttatccatttgaaaattaaagttatatatccatgtcgtaccacatgcaaaacacagctgccagctaaatatttaatgtttaaagtattttaaaaatcaagaaaatataagcaagtatttatataacctaggggatgaaaacctttctaagcatgacaccaaggaagaaaccaaagataagaagatggatttggcaataaaaagaaaacttagaggtggcaaaaacactaagcagtaaaatgagaaaatacatttgcaacatactttctctttaatttgaagggctaattttctcaatataaagaatttttagaaattagtaagaaattccaacatccaacagaaatataggttaaggaaaaatataatttactaaaggaatgtatcgctaaatacatttaaaaagctcagcagtaataacacaaatgatactgattttttacctattattaaaa

SEQ ID NO: 46311 - DNA, 1141 bp, Homo sapiens
ccttctttctctttaaaaataccattctgatttagttccaatgtgcatttttcctttaaccaaaacttcaaacccaaccaacaaaagcttttgttgtcacaggttccctctcctaaaaaacaagctcaagatcagtctttttttttttagttatctcaaggtataactacttaaaaaactttcttgaatattcgacttcatctccattttctttttaaacaaatttcttttccatttatttatcaacaaactacaattgagcttttcacctcccactaaaattgctcttcctcacatcaccaaggtctttttttcctcttcatcctcactgacccccttcctgaaacttaaatgctactaaactctttcattgtcctggcttctctatttctttacatctccttttctactacttatacctaaaatatttttaaagggtttcctttaggccacttattatatataaaaacaatgctgctgcacacagtggctcatgcctataatcctagcactttgggaggccaaggcaggaggatcacttgagcctaggagtttgagatcagcctgggcaacatggcgaaaccctatctctccaaacaaaaaaacaatcagccaggggtggtggtgcatgcttgtagtcccagctacttgggaggctgacgcaggagaatcacttgagcctgggaggcagaggttgcagtgagccaagatcacaacacgccactgcactccatcctgggcaatagagtgagaccctgtctcaaaaaaaaagtttctctgaaagatcttatctacactgttaatgactacccttcaactaatcccctgacaagcataccctgtgatagctgtattcatgctcccaactatctcctgctctagaccagcactgtccagaagaactttctgagatgatggaaatgcttgctgttctgtactgtacagaaacgtagccactggccatgtgtggctactaagcacttgaaatgtggttcacgtggccgaggagctgaatttttaaattgaactttaaatagttatatatgcctaatggctactttactgaaccgtgtagctctagattagctattacaatgaaagacattatcttttacctagaagaccaaactataagcctggg

SEQ ID NO: 46312 - DNA, 1030 bp, Homo sapiens
agagagagagcatttctaaattcagttatcttccttgcagtattgatggagtaaaatacatttgttttaaaaaagtgttttttttttaaattatctaatgaaatattttatttttgacctgtgaatagaacaaatgtaaatagtagaatgtgaatctggttttcttttgcttgcaaattgccattctttttttttttcaaatttaaaattacacatgctgtttttttctttgatggggagaaagaactcattccctgagttcattcatttttgttgatgtcatcggtaatcttcaagacttattgaagtagagttgtatttggggaagatacattttatattcacttttttttttctttctgtagtctacctcttttactcaaactgtataaggaaatagtgactgattgttcaggtttggcattttcattgctacctgcctgcagaattaatgccctcttccttgtctaagatattactgtgttaagtgtcctgttaattataaatagttcaaaatggacagactgtcaacttgaaatttacttatgtaaaaagcttaggtgattcttagggtttccatgttcataactttacaaagctttataaaaataaaattgcaacttaatagagctaattaacttgtatttgtataaaaagaaaaaagaattgcagctcgatattgtgaagtttttcaataacttcattaaaccatatttatgatgggagggaccagacattctatagtaataatgtatagtgctgtgtataattccatggtttcttcaacatcttatcaaccaagtaaaattaatacaagatacgcaaaagatagtaaaataagaatctaattataggtgcaaggggactcaggcttatgctggaagaatctgacaagtggtatagtttgtttttctaggaagaatttactgatgagtcacataacttgcatgtaatattaggttctcattttttagcttcgaaactgtgtccatgcaaagactctataactgttaagacttgtgtggttgaa

SEQ ID NO: 46313 - DNA, 1033 bp, Homo sapiens
tgatcagtatttttgtgaacttgtatcttgttttcatttataaatgttgaagaaagcaggaaccaggtaattattaagcttagtttgggctaaggtacttcaaaaataagacttgctattatgtgtacctttttgtctgcaggtcattattgctgtggtttgagctcagcatggctgtagtcatccgtttactggggcttccttttattgcggggcctgtggatattcgtcacttcttcacgggattgactattcctgatggaggagtgcatataattggaggggaaattggggaggcttttattatttttgcaacagatgaagatgcaagacgtgccataagtcgttcaggagggtttatcaaggattcatctgtagagctctttcttagtagcaaggcagaaatgcagaagactatagaaatgaaaagaactgatcgtgtaggaagagggcgtccaggatctgggacatcaggggttgacagcctgtctaattttattgagtctgttaaggaagaagcaagtaattctggatatggctcttcaattaatcaagatgctgggtttcatactaatggtacaggacatggtaatttaaggccaagaaagacaaggccattgaaggccgagaatccttacttgtttctacgaggtttgccttacctagtaaatgaagatgatgtacgtgtctttttctctggtttgtgcgtggatggagtaattttcttaaaacatcatgatggccgaaataatggtgatgccatagtaaaatttgcttcatgtgttgatgcttcaggaggtcttaaatgtcatagaagttttatgggttcaagatttatagaagtaatgcaaggatcagaacaacagtggattgagtttggtggtaatgcagttaaggagggtgacgttcttaggagatctgaagaacattctccaccaagaggaattaatgatagacattttcgaaaacggtctcattcaaaatctcccagaagaacacgttctcgttcccctcttggattttatgttcactt

SEQ ID NO: 46314 - DNA, 1024 bp, Homo sapiens
ctccgagtttgctgcagagccgccccctcccggcgggggcgctgacgtcacggaaaagccccgcggcgggtcggctgggctggttataaaccgcccggccgcggcggctgcaggcggcgggcaaggacggcgggcacagcgcagcactccccgctcgttggcccgggtatcccagcgcggacccacgcgatacgctgacgccccgacgccgatccggccgagccaagtaagggggacggcccgagacggagaagggagagagtgggagtttcccagcccgcagaactttcgaagttgagaaaagaacccctggaacgtgcgctcagcactgggattttctggtaggggtcagagcttcaagtgcaaaggatgtcgcttctcatcagcaggttccttagttcaattcggtagaagggtcacctccctctacagatcgagtggtcagagagggcagcccttaatgatgctttatgtatttgttgtttgaatgtaagtctgccaactgaggtgctgcttttgagactaaaaaaccggctggtcgtcctggttagtggcgagatgttggggtacggagtgtgggggtgagggtgggagaggagtgtttgtgcatcttgctgattgcaacgtaagtacttatactttatcaccagtagccggaaaaacagacctcccggctaggggaggcagtctgcaaagggaaagttgtagagaagttgttgaatatcatttaggggagtcttcagccttctgatttgcttcaagaaggggatctgagaatggtggctcaggcctgtgatctcagcactttcggaagccgaggcaggaggatcacttgaccccaggagttcgagaccagcctgggcaacatagtgaggccactgtctctaccaaaaaataaaaataaaaataaaaaaactagtggacgtggtagtgcaggtctgtagtcccagctacttgggaggctgaagtggaggatctcttgagcctggcagttggaggctagctacagtgagctatgatcgtg

SEQ ID NO: 46315 - DNA, 1069 bp, Homo sapiens
atattctctttgcccctttttctctttcttcttgtttaattctgacaatgtgtatattaatccacttgatggtatccaacatgtccctttggctctgttcacttttcttcaacctttttttctttctgtttctcagactagataatttccattgtcctgtcttcaagttcactgattcttttttctgcatgctcaaatctgcctttgaattcctttagcgaacttttaattacagttattgtacttttcagcttcagcaattctttttggtatctttttaggttttctgtctctactgatatttccattttgtttatcatcatttttttgactttctgtacatcttcctttagttttttgggcatctttgagacaatcgttttaatcattgtctagtagctcttccatcaggtctttttcaggaacagtttctgttgatgtattttttttcttttaatgtgctaaactttcctgtttctttgtattccttttgatatttttgttgaaaactggacatttgaatctaataatgtggtaactctggaaatcagattctctggaaaactccttttgccagggtttgctgtttctgttattgttgatttatttatttttttattgtggtaggttgtctctttaccaaggatcatcctgaatattaaacttaaggttttctcaggtcttctctgagcttgtacccttccctggacatgtgtggtcactttctcatttttctgatgcagttgtttttgaaagtcatagtctttaaagtctggatccaaaaaaagacaaaaaagaaaagtgaagaaagaaaaaaatggtgctggccttttaaatccattgaaagtcacctcagctggagggggaggggcttgcaacaatgagaaggagtgaaatagcaatggtcacctgccgtttgtctgcaaatctgtgatcagaagcagctatcagtaatctgaacacagatccctagtatttggagaacaacgcttgttttgcccattctggctccagcaagctgtgtaagctgctccagcaacacgtacacagctctcagctatggttaaac

SEQ ID NO: 46316 - DNA, 1045 bp, Homo sapiens
ggtggaagggacaaggagtctctcttgggcctcttttataaaggcattaattccattcatgaggactctgccctcatgacctgatcacctccccaagaccccacctcctaatatcacattggtaatatggtttcaacatgaatttgggaaggacacaaacattcagactatagcaaccccttatccccttctcaggccttcagactcagactgggacagcagattttgggacttcttgccttctataattatgcgagtctattcccataataactctctatatatctatttatctctggacaattctgaccaatacagatgtataccattgtttagcatctgaatggaacaaaattacaactgctacatttgtttaaagaaaatctataggaatgtcaatctaatgcttctgtctcttacataaatataatgatgctaagtaaaagtttagtatttataaacctctgtttattatgtatgcagtatagccattatggactaatataaataaatgagataagataggatcaatgattttctgaagcagaccaaaatgaacacgtgaaaatcaggtgcttgaaacatgtgataatctacatttatttagctctttacagataagtggtttgctcctcacaacaatgctgagagttgaacagagcaaatactctattatctccgttttatagatttaaggcttacagagattaaataattattcaagatcattcagtgacagagctgaaacttgaacaccagcccctcttttaactcaaaatctgaagctctttccagtgcactgtcctgccttttctatgatttcaccatgccaggttcctgagacagatgtatatgtgagaagaaaaatgaactaatgtgagtgtttcatatcatgttctcttttcaagtgaattaattaaagaattgggttttggattagggtgtgtgaatttcatgagatctgaatcttatgtttatcctttcacagaacaatagacatggtattttacaattgaagcagttgatttgattgaccaccctttct

SEQ ID NO: 46317 - DNA, 1043 bp, Homo sapiens
cttcacttaccatttgtgtgttcccttgtaatttcctttaagagctttttctttgcattcagaacttggctaactaatgcaagagtcctagcttccagcctgtcttggctttcaacatgccttcctcactaagcttaattctgtctagcttttgacttaaggtgaaaaatatatgacttttcctttcacttgaacacttagtggccattgcaggattattaattagccgaatttcagtatcgttatgtctcagggaatagggaggcccaaggagagggagagagatggggtaaccaacagttggtggagcagtcagaacacacacaacatttattgattaagattgctatcttacatgggcataagttatggtacatcaaaacagttacaatagtaacatcaaagatcactgattacagataaccctaacatataataatgtaaaagtttgaaatattgcaagaattactaaaatgtgacacagacatgaagtgagcatgttttggggaaaagtgtcactcatttgcttgatgcagggttgtcagaaaccttcaatttaaaaaaatcacaatatctgggaagcacaacaaaatggggtatacctgtattgtcttgaggtgttaaatactcagttatgtataatcaaggatgaattcttttaatttgttagtgccatacctgggtagctagctgtacatctaggattcatgaacaggcagtttgggaccaaattcgtcagtgaggaagtagccaactagtaataagtaaaaatggtatttcttggccccatgtatatagacttcatgcatgaggctttatatacaacttttttttttttttaagagatagggtctcactatgttgctggactgaactaaactttcaatatctatcttgcatcgtatccttttcaggcataaagtacttaaaaaacattgataaagggcaggtaattctgcctgtctttttaaacaaaaatttatgtatgtatgtatgtatgtatgtatgtatgtatgtatgtatttattttattcacatagttc

SEQ ID NO: 46318 - DNA, 1269 bp, Homo sapiens
agaccagtctgggcaacataatgaggccctgtctctttaaaaaaagaaaagatcacccatctccctgtactctgatttaatattcaccagacaccttctgttagtggtttgactttccctggggacgttctttcataggacagaatgcacgtgcatagactgattggtctaaataggcaggtctcataggtcaatacattttcattctgacttattcagtctcttaatttggttaatatgaataatttccctagagcttaagcatattcaagtttctgaagatgaaaaactgtatactagaccctgggcctgtggtcctttgatgatctttccaagttgtaggcagagctaacctaaagcagccagcagctacttctttctcctcatatgtcccagtgatagaaatattttagagttcctagtatttttaatcaaatgactacacctaaatattgctgtattttgacagtaagccaaattaaaattagtactctgtgcccagcatttttatacatttcacataggattcactgcccttaaagtgtttctagtattactaaagagggggtgcaacacacaggaaaacatttgtgaagtataaaaaaaagtcattcgatcttaaacaaccctggggttaggggggctgacccctgtgtgtgctgttgaaaatccctttataacttgtatgacttttgactcccccaaaactgaactacgaatagcctactgttgaccagaagccttaccagtagcattaagtcagttcacacatattttgtatattatatactgtatttttacactaaagtaagctataaaaagaaaatgttattaagaaaagaatgaagaagagaaaatatatttattattcagtaagtggaagtagatcctcacaaagctcttcacattgagtaggctaagaggagaggaggcagaggaggggttggccttgctgtatcaggggtggtggcagagatgggagaaaatctgcatataagtagacttgcgtagttcaaacccatgtgttcaagggtcaactgcatatcattaactgctcaattagataaagtcaaacctgaaatgtactgtgtaaccataaaggttaaaactcagtgcaaacaaaggctatgaataatcaggtataatttgcactgggtcctcaagtgtttataggattgggataattgagcagcaaaataaaaaagtattccagacaaggggtttaggttgaacaaagtttcaaaaacagtgataaatctggtaaatatg

SEQ ID NO: 46319 - DNA, 1051 bp, Homo sapiens
tgtcagcagaataaagaagagaattgtattcattactaatatttacaattcccctattttctacttggggcttcattttccctaccatcttcagcccttttggaaggaatggtcaggatatgattattcttactgtgtcatcgtcattttttccttcatgtgtcgtttatgcatgtcacagctctctgaagttaaatgaagagagagaaggagtatgaccaaaaacttgtacctccttcctatactgatagggtggaaatatgccccagaacaacagagaggagaaaactcctcctcttctgttcttactgtgttggggtggggaagactatccacctttaagaaattcctcatgatttgacttccaatttgtataggaggattgtattaaccattatcaaaagcgatttttaaaatgatctgtgctttaaaaaaatgattttgggaaatgctaaatgacctttttattttttgaatttaatcacgatgataaagacaaaaggactagggtcaaatttcatagttatacccccaagattttctggatgcccaatgaatgtttgtcagtaatagtgaagtggaaaccaaagaataggaaaactagtgttgaatatttataaaatgccatttttaaaggaaaaaatgagtcagggaaataggaaccatactctgaatgattttcatatctttggctgtttgagaagctgagtggattcgttatacttgatttccagtgctgcagttcagatttctttactggcctttgatcttgagatcactggagccagaaaagtaatgaaaaaaaaaatgagttagctgaatttagtaacactgagttagaagagaaaaagactgtttcttcttactgcttaaggatgggggtcagtattgcttatttaaagaatagttgcagatataaagtaaaaatgtttagcactagaagggagaagaaaaataaataaaaaagaagagtgagaaataaaatatactgaaaagtactgaagataagaaataaaagtagttcccttcctcacttgaaaatcataatttt

SEQ ID NO: 46320 - DNA, 1027 bp, Homo sapiens
gccaaagtattgatctaaaacagccacctaaatagtagccgtaatttatgttggtaatttttttctctataccttgaaatggaacacatatataaaattgcatattggttcttaatttctactaagaagaaatacaattaactgacaaactacagttgactcttgaacaactcaggagttaggggtgctgacccactgtgtagtcaaaaatctgcatataacttttgcagaaacttaactaataaactaccgttgactggaagccttactgataacataaacactcaatttacacataatttcatatatgtattatatactgtatttttacaagaaagccagaaaaaagaaagcatgaagaaaaccataaggaagagaaaatgtatttactattcattaagaggaaatggatcatcataaagctcttcatccttatcatgttgagtaggctgaggaagaggaggaagaggaagggttggtttggttgtctcaggagtggcagaggtggcggaagaggtggaggagatagaagggaggcaagagaggtaggcacactcatttataacatttattgaaaaaaacccatatataagtggactttcacagttcaaacccttcttgttcagtggtcaactgtatacttatgtattttggtaatatccttaattcccttggactttcttaactttaaaaatataaaacatacacttctaaggtctttaaaaatataaagtggcataaaaatacatggtcttactaataatatctctaataacatttaattttaaattatataacagtaggtctgtaggataacaacttttactaaattatatgtattatatcaagtgtttagtgtttaatttttttatgatgcagggagctatttttgttgaggacttcatttactgacagaatcataaaatacagctcagtagatcttgctgattaaatataatacaacaatatattttaaactgttttgatatctgaaaccaataaaaatcactcaactcttagtgatgag

SEQ ID NO: 46321 - DNA, 1039 bp, Homo sapiens
gcccaggaagtggaggtttctgtgaaccaagatcacaccactgcactccagcctgggtgacagtgagactctgtcttaaaaaaaaaaaaaaaaaaaaaaaatcaagttttctttggcgcttttactacagcatgtcgatatattgatttagagtacaatcatgttgcttaatgacaggaatatgttctgagaaatgcattgctaggtgatttcgttgatgtgtgaacattgtggaatgtacttcctcaaacctagatggtatagcctgctacacacctaggctgtgtggtatagcctatggttcctagactgtaaacctgtactgcatgtgctgtgctgaatactgtagacagttgtaacacagtggtatttgtgtatctaaacatatctaaaaatagaaaatatacagtaaaaatatggtattaagatgttacgggaccaccatcatatatgtggtctgtggttgatcaaaaccttgttgtgtggtacatgactgtatactaaagtgtttaataatttctagtaagtgtgagtgggcttatttcaacctcttttattttactctgttaaattgttcatgttgctttttttttttttttttttttggtgggggccaggctgtgagagaagagggaggagtttttaaatgacctgggtttatttaaaatattgtaacagccccgtaacttagtacctcctattaaagaaaatattaaatggattcttaattcttccagcacagtcaacacttgtgttccatgtattttgtagcattttacatattaaaattcagtagatttattttttgctttaattttattttcatttatttatttatttttttgagacggagtttcgctcttgttgcccaggctagagtgcagtggcatgatctcggctcactgcaacctccgccttctggtttcaagcaattctcctgcctcaacctcccgagtagctgggattgcaggtgcctgccaccacgcctggctaatgtttgcatttttagtagagacagggtttcaccatgttggtcagg

SEQ ID NO: 46322 - DNA, 1039 bp, Homo sapiens; identical to SEQ ID NO: 46321

SEQ ID NO: 46323 - DNA, 1063 bp, Homo sapiens
ggaatatataggggaaagtttgctagtacaatggaatgtacacttggctttctatctgcaggtttcacatctgcagattgaactactgtggattgaaaatattcaggcagaaaaataaataacagtacaacaataaaaagtaatacgaaatttaaaaagacggtataactgaggtaggagttgggctaatccccagttttggggctcacttgtcctgtatcctaacaactatttacatagtatttacattatattagccattgtaagtaatctagagatgatttaaagtatatggaaggatgtgtgtaaattgtatgtgaatacaaacattttatataagggacttgagtatctgtggatcttgatggggtagggggtgtcctgaaaccaatcccccttggatactgagggatgactatacacttaagccaccagacatcttgcatatcatagacaattgtttggggtccatgagctttaattacaaaatgtaatgctgggagaacatagagaagagtgattttgttttttaaatgtagacttgattctgtagaaatatactacatttgataaatatactaagtatatagattatttcatccaatatattagtaatttagatagtggatagccactttcctatctttctcttatccatatgaatgtaatggatatgttgttacaacttatgattttctaaactagctgtgatttataatgacatcctgagaaaagtcagtgaaactcatttctaacgaataccagatttcttaaaatagtcaagtatttttcttttgtgtatgatgagatattaacttggtgttatttcatttttttttttaaggagtcattctaccctgttctatctttacttatgtgaaaatgtttaaactatgagtttttttcatgtgccttcttttggagtaatgtcaacttttaaatacacatgtttaaataacttagagtgtaataaattgtgtttaatatatactgtagataatgatggttaaatgctttgttaacacatgttcttttaaatacaagatactactttgtactgatt

SEQ ID NO: 46324 - DNA, 1049 bp, Homo sapiens
agataaggtattccattgaagctattatatattttggctgtgtgatttaaagacatgtcttaattcattttgaatgtcctgttctggaaaaaatttctttcacagtaaaaatcagaatgaacaaaattaaaattttatgtattttataagtattgttattttagtattcatggaaataaaacctcaattcttaaagcatacatattaaatttatattaaatctctaatatgtatgttacttaagaatttctatttttgctggggttttgttgagaagggatttttaagccaagttgtagaatggggtgggtgtaatttcagcagtgaaggggaccatgggtgtttgaagtcaagagtgagacgctggaaaaaagacaaaagaatgggaaaaagtggattgagtatataagcacaaatgcagtgctaagccattgattttaagtgaatgtagagagagtcaatttgggctgtagtatcctggactaggaaggacatctccctggactaggtagggtagctgctgtttagctccagcagaattttcacatgcggggataaaccagaaatctgcattttttaatgaggaatcttccaattttaaaatgtttgcaaataacacaaaatgcttttaaaacattatacagacaacatgtgagtgggcctcactgagccattgggcttccactttgtggcctttggagtagaccaatggttttccaagtatgggtcctgaccagcagcatcagcatcacttgagaacttgttagaaatgtaaatccatttccaagtgaattagaaaccctgggggtgtcagcaatctcttttaataaaccctttagcgattctgatgcatgctaaagtttgagaaccagtgaaacagagtattttggaacctcgcttggtgcctaaatcatactagtctcaaaatttttgtcgaagagtagttgaaagtgaactgagggatataaatttggatgatggttgataccagattatgaattacattaaatactttttttttttttttttgagatggagtcttgctttgt

SEQ ID NO: 46325 - DNA, 1045 bp, Homo sapiens
gtttttcactctcagacagcacagtgattcttcataaaactctatgactacaccaacgagcattggcaaagaacaaaaaattattcgatgtcttttaccagttccataaactggcagtgattcatagcatttacacatatattcgtaatattcttaacaagtatatccatgataccttttcatagtctgctttagaaagtcctgcatagtattttccacttaattctgcatcagtagtatagcttcttttaatttaaaaacttgtccattctatttttaaactagaaagataattttattgtaatataatcaaacagtaataaatatttcagattaatcatcaattacaatttacataggttatcactaatttgtgctgtctgcattgaggactaagctctgatttttttttttttaatcttgcctaaattcctatctaaggggtctggggaatcatgctctgtaaaccatacattctcatcagatggttttatttaaccctgtatatcatgacttactttccgatctgactctggcataacatggaagaaaataaaaatattttaccccaaaacatgtttctctgccatatcttgaaatggtcgtgcaaagccatcccttgtgggaaaaatccacattctatagagaatccactttccccttgttttccttccttcctttctagatccaggagataatcaagtaagagccaggcactcttttaggtctgataataaacaatatacaacctgttctctctgaagtctgctatctgagagcttcctctgcacaataaaacttggtgcctacaatcctttatctttacctgaacatacatttcctttctattgatcccaggtcttcagataaactcaaccaattgtaaaccagaaaacgtttatagcctggaacaccgcccccgccgccaccccgcccccgccttgagttgtcccgcttttctgaactaaaccaatgtatttcttaaatatatttggttgatgtctcatgcctccctaaaatatataaaagtaagccatacgccacc

SEQ ID NO: 46326 - DNA, 1045 bp, Homo sapiens; identical to SEQ ID NO: 46325

SEQ ID NO: 46327 - DNA, 1005 bp, Homo sapiens
aagtttcaaatatgagtacgttttcctcaaaataattcatgcaattcattaagattaatgtacttaagcctaagtgtggtggttcatgcctgtgatcccagagctttgggaggctgaggtgggaggatcacttgaggccaggagttcaagaccagcctgggcaacatagtgaggccctgtctcttaaaaaaaaaaaaattaatgtacctaaatacattcttttcataaaactatctaaaatactgcagatacaactcagctgttattgtgggtgctgtgcttcaaataaatggtgttattcagtatttatctgcttacaactttgacacttgtgaataaaaaaatcaagacaattaaagtggtaaaaacaaattttattcagtaaccactggcaataggggaaagagctgagctccatgatttgtgcagtcatgactgggccttttaaagggagaatgagggagtacggaaggggagcaactgagggctcaagtagcgtcaggaaagtgaaaattacaaagggctggtgctgtggtttgaatgtttgtttttcccccacatttatatgttgaaatcctaacccccaaggtggtgatattaggaggtagggccttttgggaggtaattaggtatgagagtggagccctcatgaatgcgattagtaccctttaaaataggcccaagagatctcatttgttccttctaccatgtgacgacatactgagatggcgtcatctaagaaccaggaaatgggcccttaccagacaccaaatctgctggtgtttttatcttggacttcctagcttccagaaccacgagaaataaacctgtgttgtttataagccacccagtttatgatactttgttatagcagctccaggctaagatagttggtcattgtaaatgtgagtgggtcaggtgtgcctgctcgctgacagttatcaaaattaggattctgtccttccacagagactgggacacagagatccaaaccttcctgatgat

SEQ ID NO: 46328 - DNA, 1005 bp, Homo sapiens; identical to SEQ ID NO: 46327

SEQ ID NO: 46329 - DNA, 1098 bp, Homo sapiens
aagataaagtcatactggattaagatagaccctaaatttaatgactggtgtccttatgaagaaagagatagaaacacagagggaaaaagaccatgtgatggtggaagcagagattggaataaccacccatgattgctggaaaccaccaggggctagaaagaagcaaagaaagattctcccttagaaccttcagagagagcatagccctgctgccaccttgattttggacttctggtttccagactgtgggagaataaattctgttgtttaaagccacccagtttgttacaggagtctcagaaataaatacaggaagccccagatctcttgggtattcagagctatatagtttctttagaaaaagagaaagtttttttattctttctgattctttctcattctgaagaactgtgagaggagactatgccatcttctgttatctgtttacctgaatctccttcacaaaactgtgacatgcaaaggcaggaatgttctcttgttaaggttttaaatcaaactatatagatttaaaaatgttttgtgactgaacaaagagatcctgagaaacttacagttttctctagttgagtctcttggctgtctttggcttcagagtgcttcagggaagtcaagtagccacaaagaggctattggaacattatagtttgcaggctctggtaatatttgagagaataatttcacaagtgttttggaacaaaagtcatgctgtaatggatatgtgatgaatggaaataggccagtggaggaagtgaatgcgagtaagtatgtaaataaagtttgtaagtaaataaataaattcggtagtgaaggaagtagtatctcgaggaatggtagggggctagagagttttgttgtgtttttgttttaaggtagtatgttgtaggctgagaggaaaaaggtagtgaagagtggaagattaaaggtataacaggggagtgataaaaatctttccccattggagaagttagctaaatgtttcttaagtgggtcttaggtccttggagatggttgggcatattctcaagggtttataaattctcagataagttagacttttgtgttttcttttaaatgata

SEQ ID NO: 46330 - DNA, 1091 bp, Homo sapiens
tatatatttgtttcttttagggtgttgcaattaataacacctttctcccgtcacaaaatgatcttagaatatgcagtttaaatctgcctagtgaagaaagtactagagaaatcaataacagagataattgcagtggaaaatattgttttgaagcacctacactggcaacattagatccacctcatacaggtaagactgctttttattgataaggtttatgcttgaccaatagtattacagtattctttaaatgatgttttaagaatgaatatgttatattagaaaattgttgatgtaataccactacattgttggtagttcaggttttttgttgtcataatttatctttagtgattggattaataactgtgtgattaaagtgctttatagtagatgtatgcttaagactgttgattataaacttggtcaaatgtgatcttttcctcaagaaccaagattgtgtttaaagataggatttatacattttttttctaaaaagcatgttaataggactaaaattggagagttgaacttgaaagtagttacttgttaattcattagagtctggagtacttcaaatcagagttgaattattatgatacatacttgcatgaaaaccaagcatttaacaaatgctccatccctctattgttgaactgagttaaaataatgattatggttctttttgtatatgtaagagaacactatttgttaggtaactaaaaaaataattaagatggttcatagatgtttatttggtcttgtgaaagccatcattagactgtatttttccaaattacattttattcatgttttggttgaatgaacagattcagccagccggccccatctgttgggctacagaatagtaactgccatccttatgataccagtgcaaatcaacaaagtgccctaagcaccattttgaaggaagttcttggacttcctgatgattaatgaattttacctgtgaatgggtttgtatcttgtccggacagaaaggaattctgtatttacctaactggccattatcttggtgccatttatgtgctcctcataacttttcaaaagctgtgactggtgtcagaaca

SEQ ID NO: 46331 - DNA, 1033 bp, Homo sapiens
tgagccactgcgcccggcctcttgtttcatctttagttttccactccagctcaagtccctcccttcttattttgatgcaaattccaggaatatgctttcatttgtaaatttttagaatatgtccctaaaatataagagctttttaaggccgggtatggtggctcacccctgtaatcttagcactttgggaggcctaggcaggaagattgcttgaggccaggagttcagaccagcctgggcaacatagtgagaccccatctctacagaaaaaaaaacattagctgggtatggtggcacatgcttgtagttccagctactagggaggctgaggtgggaggatcccttgggcccaggagttgaaggctgcaatgagctatggtcgtgacactgcactcttcagcctgggtaccagaccgagaccccatctcttaaaaaaagaggtgggggcttgttaaaaaaacccaacatagtgagattaccattatctcacctaaaaatatttaagtattgattttagtattgagaaatttaacaagaaaaagagcattttattatgagaatggcatgttatgatttgtttaaaaacttctgatatgtttaaaatacactataattataagcataatttttcattctgtcatatcattcagttttagtagcataatttaaaatagttctaaaaacaagcaataaaaattagattttaattaattagttaattttttttttttagatggagtctcactctgttgcccaggctggaatgcagtggtacaatcttggctcactgcaacctccgcctcctgagttcaagcgattctcctgcctcaatctcccaagtagctgggataacaggcacttgctaccacgccaggctaatttttatatttttagtagagacagtgtttcaccatgttggccaggctggtctcaaactcctgacctcaagtaattcacccgcctcggcctcccaaagtgttgggattacaggcatgagccaccatgcccagcagatattaatttatttttaaat

SEQ ID NO: 46332 - DNA, 1078 bp, Homo sapiens
aaagaaatatactaatggattatagcccattgaataatacaggagtcagaatctatactaatatatgtaaataaatgaataaataaataaatgaagattaaactcttccttacagtggaatgctaaagcatagaagtagaagtaatgatggtgttagagagtctcaatggatgccaaaactagtgggtaaatgttcaatgaggaaataggatatttgaatatattcaagtatctcctcacaacatacttaaaaaaattacaaagggaaaaatactttggcagacaccaccttaatcagtgatcaaagttaatacctctggtaatggaacaaaccgatattatgtgcctcctaatatgatgaactgttgtattcttgccccaaattcacaatctgaaactaatcatagggaaacatcagacaaatccagattgagggatattcagcaaaataactggccttattttgaaattttgaaatttcaagaccagaaacgatgaatgaagttagagattgaaggaaactaaaggaacatactgactagatgtaatgtgtgatctaggattggatcctgatttggggaaaaatctataacagacgttattgcgataagtgaccaaatttgaatatagactgtggattagatactggtattataccagtgttaaataatcaattttgataattttactgtgattatggaagagagtctttggaaacacaccttgaagtatttagaggcgaaggagcatagcgtctgcagtttactctcacgtgtgtgtgtacacacatacacagagcaaaggaggagagggaaatggaagaaaatgtaaaccaatggttaatatgggtaaaggtatataggaatactatttttggaatgttaccatgaatttgaaattatatgaaaataaaatgttgcaaaaaagaaaatttgtgaccttcattagttgacttactttaatatctgatcagatataaaaaatataaaaaaaatttatcaggtttttttttggaaaatttatttactaaccatgaaatttattaagatgagtatttatggccgggtgtggtggctca

SEQ ID NO: 46333 - DNA, 1095 bp, Homo sapiens
attatgtttatccatccattcatctatttgatgcatgcttgggcagtttccacctttttgctatggcgaataatgctgctgtgaacattggcatccaagtttctgtttgtgttcctgttttaattcttttggattataactagaaatggatttgctgggtattatggtaattctgtgtttagctttctgaggaaccgtcaaactgtttttcatagctgtaccattttacatcttcatcaggaatgtgtgatggttgtagtatctacatcctcaggaacacttgttattttccatttaaaaaatttttttattattggcatctcagtagttgtgaagtggtatttcactgtggttctgatttgtatttccttaatgactagcaatgctgagcatcttttcatgtgcttattggccatttgtatatctttggaaaaatgtctatttaaggtctttgcctggtttttaatggtgtctttttttgctgaaaaaaccttctaatttttgactgctttttttggtctgtatgtgtttgttttatcctatatttctttcccaagtagattgtttagcacttaccaatgtaaaaattctggcacactgtaaggagaaaacataggcttttgttttcttaataaggtttctttctttctttcctttttaaaatacagctttatttaggtttgatagagtttggatatttgtcccttcagaatctcatgttgaagtgtgacctccagtgtttgaggttggcctaatgggagatatttgggtcatgaggggcggatccttcatgaatggcttggtgctgttttcatggtaatgagtgagttttcgctctgagtccacatgatatctggttgtttaaaaagagtgcggcatctcccccctccctcttttgctctccctcttgtgattgagatgcagtttccccctttaccttctgccctaattataagcttctggaggctctcatcagaaacagaagctggcaccatgcttcctatacaggctgcagaactgtgagccaaaataaacctcttttctttataaattacctgtctcaggtattcctttatagcaatgcaaactaataca

SEQ ID NO: 46334 - DNA, 1622 bp, Homo sapiens
attctggtcattgtcctgtatgttgaactaccccttctctatctccttcacaggaccttcatcatttctactctccgataatactaattataacagataacattgagtgcttactatgtgtcaagttttgttctaagtgctttacatatttcatttaatcctcccaacagtccggtgtgtaagcatgattatggtaccccctcttaaagatgaggaaactgagacacatggagccaaagtaaactgtgcaagaccattagaaagtgtcagtccacatttatattcaggcatttgctttcaaagttgtgttcttatttaccacagtgtagtgccaagtacttgtggctatctggtgtattacagttgtcagcttggccttaccattttacttggaaggactgaaactaataggtgttatagaagttgtagcatcacatcagggctaccaaatggctttatttctaggacctggggaaagggctcagacagcactaattaattaattaatttattatggacaggacaatatgaacatacagaaccagtttaaaaagctataagggtgcaatggtcttttggggggaaatgtactgatttctgcattttactttgtatcaacaaattaaatggcttgatggatgcccaaggtcatatgtaagtagcagagttgggattctagccaggcagcctggctggctccagagtcagtctgttttcttaaccactgctctgtgctgatggttgtatgcttgcattatcatttttattagtttacaaaataggaggattgaaaaatcagaaatcatgtattagatgtagaaggatttagggtagtaattcttcgcatttagtgttgaaagaaattttagcatctagttcattctttattttataaatgagaaaattggtgtctagagagttaaatagcttccccaaagttaagcatccctgaaatagcagaatctgaactacactctggtttccttcatttctactgttgatgtttctaactactgtattttttaagtgttcctttttaaaaagtgtcagaattttcacagtattagaggggagtctgactaatgtagagaacagaactgattacatttcatgatgtggacatcatatttttattaatgctatctagaatttattagtttaagaaggctcattatcttatttcagttgagctatagtcactaaaatctttagttttaaatttcagcttctattgttctatttcatttgaccattaagtaactgagtctaagtgcaaggcctaacatccatgtcgtcctgtgacagttaccgttaatcaatttcaaacttgtgtcagttatatatttagaggcctgtagtattctgcttacccattataaaaaggaaattagtttaatgaagttattttggcatgacttgtttggtcagaatttgtactgacttctggtattggtaaatactgcttctaaagcagtcaaaaaccatctgtttcataatttgctttaagattaaagattatactaatagagatctattttgtccttgaataagaaacagaagagagtgatctctcctactcattcctcaaactatataaaggctggttatatataaaatattta

SEQ ID NO: 46335 - DNA, 1025 bp, Homo sapiens
gaaggtttgaataagaagtgaactggattattttaaaacattgttattcataacaatgaaatgtgagtacttttcttagctagtttgttatattatcccagaagtatgatagatacttgcaaagttagcagaattggagtacaaaaaaactgaaatataattttgggtattataaagattatttttgctagaaacctgaaagaaaaatgttttatggcatgtttttgttttaatagtggaaaatctgaatacattgaacctgccaaaagagctcatgttgtgccaccaccaagaggaaggggcaggggaggatttggacagggtatacgacctcatgatatttttcgtcagagaaaacagaacacaagtagaccaccatctatgcatgtggatgactttgttgctgctgaaagtaaagaagtggttcctcaagatggaatacctccaccaaaacggccactcaaagtatcacagaagatttcttcccgtggtgggttttcaggcaatagaggaggacggggtgctttccacagtcagaataggtttttcacaccacctgcttcaaaaggtaactaattagtatgtattttctaatgggttagaatattggaatgttaaaatattgaatgaaagtgatttagatggaagagattcagataaacagttttcctgttgctgcagttgagccacctctggactagtggtactgtttgcagagtactctattggatagaagaaagaaactttttttcaatgaacctttcatgcattgtacttttaataatgagtttagaagtcttggctaattattccccccggccttttttttttgagacaagagtcttgctctgtcgcccaggctggggtgcggtggtgtgatctcagctcactacaaactctgcctccctggttcaagtgattttcctgcctcagcctcccaagtatttgggactacaggcatgcaccacaatgcccaactaatttttgtatttttagtagagatgggttttcgccgtgtttgccag

SEQ ID NO: 46336 - DNA, 1034 bp, Homo sapiens
aaggaaagacctggctactattttctatttcctatatggcatctggaactggtatttcactttttacattggagtgcttttctagaaacatttttggtgatagaatataggagttatggtatagcttctgggagagttttgagtttgtttgcagtaaatggcagattgtatttgtgtttattctataaacaaagtttgctgtcattcttttggggtgatagtaattttataaaggcaaatttggaagttgacagaattaaaatttcatgttagaggaaaaggcactcagcaaaatatctccccttgggtttcattcctttagaaattaataaattttgtttatactttttttgggtgggtgtgagaggcagtggcagagataggtgaataaacactatgttacattaatttataagcagtctattttgtaggtatgtacattttttttgagacagagtctcgcaccgtctccaggctggagtgtagtggtgtgatctcggctcactgcaacttcctcctcccgggttcaagtgattcttctgcctcagcctccctagtagctgggactacaggtgcgtgctaccatgcccagctagtttttgtatttctagtagggactaaagtagggatggggtttcaccatgctggccaggatggtctccatctgtcgatctcgtgatccacccgcctcagcctcccaaagtgctggtattacaggcgtgagtcaccacgcccagccctattttgtaattttttaatgttgtaaattgttataaaaattcattttaattatatagactatttaagcatgtaaacatctaaatttgcataaaccagataactaagagtaggcatttctttcattttaaaactaaattgtttaagctgggcgcggtggctcacacttgtaattccagcactttgggaggctgaggtaggtggatcacttgaacccaggagtttgagaccagactgggcaacatggtgaaaccccatctctacaaaaaatacaaaaattagccagatgtggtaat

SEQ ID NO: 46337 - DNA, 1047 bp, Homo sapiens
taagtaatcgattccatttttaaggttttgctttcaaatattcaaaagtatcagagcacactttttttaaaaagagcttatttgaaaaaaaaaaaaaaaggtccctgctactattgctagatacagagaacgattctgtgatcttgaaagtgattagtattttagactgcagatgcattttgttattactgtccttcttcgacacctggtgtcttctattaccagaattgcattttgttgtctaaaacatcctattactctttataaaaatcaatatgagctatatggcttgtttataaaatgtgaatgtcaaattagctatattgccatctatgttagctaaaattatgattctttagacatattagctttcatttatgaaagatccattacaaaaactaaggttttccttgcacaaattgatatttttctttttttttatgacagaattgttggccacctgtattatctggggggatcagtccttgcattatcattgaaacacctcacaaagaaataggaacaagtgatttctccagatttacaaattacagatttaaaaatctttttattaatccttcacctttgcctgatttaaggtaagaaaaatttcagtaattttatttcaaagatataaagttgtgctgatttaatacatggcactattttgtcttttgctttcataaagtagaaaaacgtgtaaaaattgtttactaatatttaatcatatgtcattttatctgagagtagtgctggttgcaaatgatatgggtatttaaaacactgattctataaaattattttcatttgcttgctgagtactataaagacttaacaggactgaattagttttttgttaagatagaaacatttttacatgtacagctttttcctttaaaatttttattcgtgtttcttgcagcttcaactcaaaggaagcttttccaattgatgtatcaaccctatttatttcttaccaaacttaataaggtctatacttaattcttttttctagtccatgagtgtaactaagaggtacagcttata

SEQ ID NO: 46338 - DNA, 1085 bp, Homo sapiens
tcactggtatgcaaacagatttgattttgcatcctatcatttaaaaagaaattatgtctgcaccccaacataggcatacttaagtaatatacatactcctgtgctaacatgtatactagaaaacaaaaagatgttagaaaaataaaagtataaagacaaatcatactgtccccatatcccagtgacttttccactttggaaatgattgttatgaagtttaagggttggatactagtcagttaaaagttttaagattatagggtaatttttaaaaatataaattagaatcattggcaaggcatggtggctcatgcctgtaatcccagcactttgggaggccgaggcgggcgggtcacctgaagtcaggaatttgagaccagcctggccaacatggtgaaaccctgtctctactaaaaatacaaaaaattagctaggcgtgatggtaggcacctgtaatcccagctactcgggaggctgagggaggagaattgcttgaccccaggaggtggaggttgcagtgagcctagatcacaccactgcacttcagcctgagcgacattgactgtctcaaaaaaaaaattaggattattcaatgttgtcatcatttccactcctaaattctgaaatgctttctttggtagaggtgagagtgtggagccacagctagtagagaaggaacagtaggacctgcagcctccctggttttccaggacaagtcattgctgtgtgtggcaggaatgccttacctcaaataacaaaacagtgtgaaaaacgaatttgtgttacatttaaagtttgtaaagcaatgagaaatgtgtgtatcataaagagcatctttaaatttttgctaaaatattagcctcttaaattctctaggaaccccctcccccgcttttttttttcctttcgctggtcgttatttttctaaacctatcctgaaatcatgtcaattttcttttgtatggttgaagacaactagatcacttgataatggttttgctcaggtcacattgtgacaaggttttaatgtagtcctactttgcagaaggaggccaagaagatgggctgtctagaaccccctttaa

SEQ ID NO: 46339 - DNA, 1032 bp, Homo sapiens
aatatttagttaaatgtgaagtctgaaccctttatgttatttttagagcatccgctcccccatttatcacagatttttggaactggttttcatcttatttatttgtccatctaataattggatttatttttctactaatattatttttaaattacaaaagaattacatccggttgtcaaaagtgcagatattataagagaaggacctcttaccctctcttcgtccccagttccacttctcaaaggtaaccactattaaccaaattgtggaatagctttccagacctttttctacactaggttttatactattctgtagttaaacgtaattttttttgtttttctagtagagttaatgtatgtttagattctttatctagaattaatttccgtataagatataaagataatttttttcaaaagtatagctaatggtcccatatattttaacaaatagtctatctatttgatttgaaatgcattattgtttgtataataacattttttagtttattctggatctgtttctcatcttcattgagtgtgcgtattattctgttttcacactgctgataaagacatacccgagactgggcaatttacaaaaggaagaggtttaatggacttacagttccatatggctggggaggcctcacaattatggcagaaggtgaaaggcacgtctcacgtggcagcagccaagagaagggagcttgtgcctggaaacccccctttttaaaaccatcagatctcgtgagacttattcagtatcacacaacagcacagcaaagacttctccccatgattcagttacctcccacctggtccctcccacgacacatggggattcaagatgagatttgggtggggacacagcctaaccatatcattgtgtctgtgtatttaatctattttactgttcatgggcatcttaatacctgtttaatatcaagaaatttggatttataattatatttggttctaataatatttggagttataatgaatatgacgatttttttttgactgtgtg

SEQ ID NO: 46340 - DNA, 1023 bp, Homo sapiens
atgtgtacttttagccaagttaacaggctatggtaaactcaatctctgtttcaaaattcacttgaaagttaggtgatttttagcattctcacctactgattaagtgaaggaaaggcattgtgtgctttgaaatttaccaacaaatttctaatctcagaggaacagtagttagtctgtctaaatagttgtaaccttacctcttaaaaggtgaaaaattagggacttggatgtttaattctaaaatgatcccaagatttaaccactgaaagaagcaaacaagggaagagctggtctttgcagaaatagttttaagtgtgcatattagagcactaatttgtttctctctttcaaagaactggatgaattgcctccattgtctccaatgcagccaatttcagaggaagaggctattcagattattgcagaccctccattgccaccagcttcattcacacttcgagactatgtggatcattctgagactctgcagaagttggttcttctaggtaagtttgactaaactacaagtactttttgcatgtactcttcattactttttttacttttttaaattaacaatttaatctatactaagtagtatacaaacataagcaaaagtctaatagcataaaggcttctagtgagaaaccgtattccctgcctcatccttggtgatcttgcatcctattccccagatgcatctacttaacttgtatcattctttctgtttgtgttcaacctcctcattttaaaatagttgtttgtagtgctgttgtttggttcatcagttttagacatcatttgatctcttgtatgtacacatgtacttttcctgtattcttttcaattctcctaatataaattacaattttagataaatcattagtcagtagttaaattatgactataaatattgctatctgccctaacaagaagtatgctatcattatttaccttcctgtacaacttttcatttttccggcagtaatagttgccttgttcttcatttgatgaattgttttg

SEQ ID NO: 46341 - DNA, 1080 bp, Homo sapiens
ggccaaggtggtctgaggaggtctcaaggagatgtacctctgcaggccaggagggcgaggtttggttggagtgagtgagaggcatacctgcatgacctaggagagcagtggcatgagaaagtgtcacatctggctagaggatggcgcgtgccacatacctgagatagaggaagcacattaaaagtaagtcatggacagaggcctgggtgaggactaattgtggtgagctggtatagcagtttattgtttgatatagtagactgcagagaatcattttaggtttttgaccaggggagtagtaggaaaatttagcccatctccagtggagatcatagaaccttagaagtaagggatttctggaaacatcttatccaatatcccatttttacttaggccagagaagtgaaataacttgctcaaaaggtcacccagttagaaaagagcaaatctgtgtctcagatttatcctttaccttgtagtccgatgatctttctttcatatcacagtcctccaaaagatattagagaaaagaaaataaaaagaaaggatacgtaagaagcagcatcttgattggaaaaacccgaataactatttaactattttatttattttagtaaatgaggcagaaaaatatctagagaattcataaaggaccaagtgatttcttaaaaatagtgttcgaaaaaagtgaaaaactaattctaattaaatcctattaatatcccaaacctaccctgggaaatgggtgctaggctaaagctgaattactgaacaaatgaatgaacacctaaatttgtcttttttcttccagtaaatatcttacaagtattatttaaggaaaacattttcttttacagattcacctttttggagttttgctggctattttaggaaacttggtgatcagtatttctctaaatattcaggtaagaaaaaagcttatttttctaacactatagattgatccagggacacattatgactctcatgggcattgggcacttttgtctttgtggctcttttctccataaaaattataaaaaatatatattttatgacctcattggtataaacacaaat

SEQ ID NO: 46342 - DNA, 1029 bp, Homo sapiens
ctgggtcgtgatggccattcagtagacaggcttgctgtgcaagtccagaacttcagaacagcagttggcctgcagcctctgaggttcagcagggactcagtatgatttctaagggtttcctatcctcatcagcttcccatattctggccttcctgttgctcttgggagcctctaaccagaagaagagtggaagggggagcgatccaaagattatttctatccctaagcactcacccccactgactcactcatctcctgctgggattctaaagccaggataaatgggctggggtaaggtttgactttttaagaaaacttttagcaactgctgcctgcttcttattcaaatttggctgatgattattgaatacttactatgggctaggcattgtgctaagtgctttcacatatctaatctcacacaattcttataacaaccctgagagggagggatgaatatccccattttacagatggacagattgtagaggtagagaatgctggaaaatgaaactggagagccaccaacactttggagacagacctgagttccagtctctactttgtcttttactaactgtgtgacatgggaaagttactcaatttctgagccttgatgtccggattggcaaaataggcattgacttacagggcagtgacaaacaaatgaataatgcatgtgtagttggcatgctgcctagcatacagtgggcatgcaataaattaggcaatgatgactcttggaaagataggtctagtagacgtgtgtggggcaaaactggggaggctgatgttggacatgggagtcaggatagaaagccatgggttttatgtgacagtctcagctgaagccaggtgggggtgggtggagcaggaatagacagatagatcagtaaaacagaatggaaagctcagaaatagatccaccataaaatggagcttagtttatgataaaggaggcgttataaattagtggacaaactgaaccattcaataagtatgttggcttcctatgtggaaaacaaaaac

SEQ ID NO: 46343 - DNA, 1030 bp, Homo sapiens
cctgaaaatcaaaaaccctctctcttgagattgcaaatcggacattagcacatccaatcctgatagatatgcaactgctttaagaaacaggagctttgtgcaaggaatgaggaggtcagtgataaggacagttggactcattcacattgttgccctgctgtagctgggaccacctccccgggagcacaacagctactgtaaggttggcaatcaagttggctttgaaactgtttatacaagctgattgctactagaaacctaagaaattcacaggaagttccatgcaaggaaccagagaaaaaggctttgagctgtgttagcggctccatttgaaggtttcaggggtggtatgcagcaaaggcagaggaaagatgttgttagatgaggcctgaacaatggagactgtttgcaactctaacgcagccagatgtctgttctagtggccaaccacctcactgccctagagacagtagagggtagagaggaggttagctaggatttatgtatttaattcataagtaggaatctgttactggcacaaatattttcctgtgttgtggtaggaggagctactatcgcaggcagcacctcgggagcaatagaagctagcttggataatgagaagcacttggatcaatccttgcgggagatagatcagcaacttttggcaaagagtggctgtgcaatttgagagctgattttaaactggaggggccttttgaattccctctgttgatgtggctaatcaagcccaaggaacagaaagaggcaaaatggcagcttctgcaagcaagatggaataattgagtttaaactagggcagtggggtggtttgggggctgctgtgtcttaagctgagaagcaagacgaatgggagagaagctcccttggtcccactcagggaacacttcagatccagcctgggacttagtacaccctgatttgtccctcgaggagtgatgttggtcacacataaggcatttctcaggcctcagcataaatgagacagtgtcgcccccctgggtacatt

SEQ ID NO: 46344 - DNA, 1028 bp, Homo sapiens
agtatcgtgaatgtaactgaagctagtgaatcagggtttcatcttgctgaaaagctagtatcattgtatatattgtcctgtagatgataaagttttttctttggtgtaatgaacttagatgactcatttctacagacttaaaatacacttagcttattttagcagaaatagttttatgttcaaagtatgaactaatttggcaaatacaaattggagaagaaagtgtattcaaatggatttcaaaataataacacctgttattcggggcacttactatatgtcagacactttgatgaacaaccttaaatacattacttaccgctgttatatttttcctccgcttatttactgaatcacctccccagtgttcaaaatcatgctctactcactgaaggatgtgcagttctgtaacaaattatataatacattaataagatgttttttaacttagtcacaggaaatcttttcaaattactgattagcattcaataggattgctattttcatttcctatcctgtatgttaaagattaatgattaaaataaatcctgaaaatgctaataacattctaagtagaacatcattaaagaaaaataattggagttatatcgcattactaaaccattattaggcataggcatttaattagatatttcatcaaaatgcaattttggagtaccagggtttttttttttgtttttttttttttggcctgaaagactaggaatctggaatctaatgagaactatttttctttgccgtttgggcaacatgatgggacctggacccaaggaagttttacagaccctggtcgggcagtctgatgccactgagtggtgacttccagggagtcagtcagttttgccctgttccatacaaaccaccttcaacctcagccaactaccttctacttccttttggggtcccagaaagactccaagaggggaagcagagaaccagctcaattcttccaccaatcttggaaaaacaattcctacttcatgctcttctcacactggaccacatca

SEQ ID NO: 46345 - DNA, 1083 bp, Homo sapiens
taatatataggcaacaaaattgtataactgactgaatatgagaatgaaagatccgggataattccaaggttttttgtttgaacagccaggatggtgttgcctataactgaactggggaagactgtgggtggaacttgttggctgggaagttcttctgcatccaggtgggcataccaaatatacgattgtgtgtccaaattgggagttcaagggagagttctaggctggaatttgtggtaatcagtatatagatggtatttaaaaccatgagactgaatgggatcttcaaaggactctccaaagaaatgagtatatatagagaagaaaaggggtctgtattcatttcccatggctgctgtaacaaagaaatgagtatatgtagagaagggaaggggtctgtattcatttcccatggctgctgtaacaaattaccacaaattgagtggcttaaaacagtagaaatgtgttgttttacagttctggagccaggaatccaaactaaatcttaacggggctaaacctgagttgtagcagggccacaccttctctggggaaatttgaactaagtgttatgaggctaaatcatgctatcagcagggctacaatccctccaaatactctagcagagaatctcttttacttttcagtatctggagctgcattcgttgagtctttggttctttctccattttctttcttttttttttcttttgatggagtcttgctctgtcgcctaggctggagtgcagtgtggtgcaatctcagctcactgcaacctctgcctcctgggttcaagcagttctcttgcctcagcctcccaagtagctgggattatgggcatctgccacttcacctggctaattttattattagtagagacatggattccattccaagatggccaaataggaacagctccggtctgcagctcccagtgtgattgacgcagaagacggtgatttctgcatttccaattgaggtacctggttcatctcactgggactggttggacagtgggtgcagcccacggagggcaagctgaagcagggcagggcatcacctcacccaggaagcacaaggggt

SEQ ID NO: 46346 - DNA, 1050 bp, Homo sapiens
cacttaactgaacacttgaaaatggttaattttgtgttatgcatttttttgcataaaaaatgcataagagaagaggggaaagaatttgcacagtgtcactgttgtcatagtctgttgtcaaaatatgtcagaagtctagtcctaattcataagatatggaaataaatttcacctcatgatggaaggaacagcaaagttacatggcaaagggtgctatgagatggaaggaattattacagtatactttgcagacaatctaatagaaagggtgttaattaaaattcaacagaaattagaatgttgaatttaggaaatcagagttcattaatgattttgataatgaccattgcagtactctactttcagatttttcacatacacacaatttttgacatgtagccttctactgtctgtcttagactcattttagttttgtgaatctatttttccaatggctaactcctgaaagtaacttttggaaacatttttagcccctcatagattttgtagtcattctatctggaaattccaaaatttgttagaaaacattaagctaatttaacaaatattttactttggattgtgctaggcactgtgggtaaaaataaattatactgatttattaagaggacaaggtatgagttaatgaagtggtaaattgtaatccagaacaataactcagacattgccatgtggttttgaataagagggagatttgatgaaggctggagttgtatatgaaattataatgtggaagaggactttgtctaagcattgataaatggatagcagaaagagagaaggcaggaactacaaggaatgatgtgtaataaaaagcttagcagtaggaaagcataatctgtgttgggtggcaatgaaatagagaccttcaagtctgtggtagttaatctggaaaaatacgagagataaaatggaaaagtagatccagatcagagggtgaaagcttgcaaggttacagagtctgaatatttatttaatagacagtggaaagccactgaaggttttaagttggaggatgacatgatgaaa

SEQ ID NO: 46347 - DNA, 1042 bp, Homo sapiens
tctgaggttacaggccaccatgcctagccaagtcctcataatttcttacagctgaaaatgtacaataacaatagcaatgcaggcttaaatgcaaagaaaaaaagcccaccaaaaacacctgagtttttaaaatttactttctttgagaaatttgaaataaagctgaaatgatttttaataaaattctgataatgattttactaaacttctgaaatgtttctacaatctaaacattccagacctttgcctaatcatcagcttaatttttatttggtctgggtattttttaattcttattttatttcactttgttctttatgaaattaattatgttggccttgaatctgaccagtgcaaatttattatatggcttcataaaaaaatcatacttcaaagaaaatacttccttaaatgtaagaacttataccttccttatgttctttgtttacctaaggaaatgcaacctcaccacaagtacaaagaccatctttcatggactactttgataagcaagacttcaagaataagagtcacgaaaactgtaatcagaacatgcatgaacccttccctatgtccaaaaacgtttttcctgataactggaaagttcctcaagatggagactttgactttgtaagtacattttaattcttcaatttatgttttctccttctatattttatcatcaaattgagaagcatagttcatatgtatatgaactgtgtgtatgtatatacaattatagaccatatgttaatattcattatacagccatatacatggttagagaaattgtgaaactgtagcttgcttatagaaatgtacttgcagagaaatacttttttatagttaaataaatcatagctcaaatttaaataaatattcaggactccttaaaactaaaatgacaactattttaaaagatgttttcaataatgcaaatatgagatacttctgacattcagtaaactcagttgccaaaattaatgaagcaaaggtatttatgacatagagtttgagaatttgcttcaatttttaaagtata

SEQ ID NO: 46348 - DNA, 1024 bp, Homo sapiens
aaagtgagactctctttatctctctctctctctgtctaaaaagaaaaaacatatatatatttatatatttattatatatttatatttttacaatatatatttttatattctttaatatttttatttttattaatatgtaatatgtatttgttctttactggttttcctaaatataagtatagatatgtatatttgtatacatatatttgaaaatgtgtataaatatacatacacacacacacacacacacatattttttttttttgaggaaaaccagtaaagaacatttacttattctcattcctttacatggtaaaaagtaaattttatttaataagaaatatttcagataaaattatttaccacaaattgaaaacttgtaaaagaattgattacttgttatgtctaatttttcctatgtaatcacaattaaaacaaattcttatatagttataactgtgtaaatactgttcacttatatcatattatcattacatgttatttctttttgtgattttcagaaccaataattgtctccgtttttgttactgttgttgtttttacagttttctaatcactagtttgttcccaaatgctatattcccaaactctctgctggatctctgagctcctctgtgtatgttcaaacacaatttattaatgccgtacttttttttttttattgattcatcccttcaatagtcttctgtcctttactaatcggaactaattcctctttaggagtgttgagcagctgtcatcctaagacttcctttcaacatcaacctgtggaatgtcctcttttttttcttctgtaatctctttatccctgatgctgtcttctgtctttcttgttttacttccttatttttatgtatcatatctcccagtagcttcctgacagcagcagtttttttcagtcattgcatatctgaccgtgtctttattgtacatttacccttaattgattgattgattgattgggtgtaaaattttggattgaaaataactttcttttataatt

SEQ ID NO: 46349 - DNA, 1039 bp, Homo sapiens
gagaggaagaagttgttatcaccataaatgggcaggcggatgttgcagtgagccgagatcatgccgctgcactccagcttgggtgacaagagtgaaactctgcctcaaaaaaaaaaaaaaaaaaaaggtgtgcttgcttccccttcaccttccaccatgattgtaagtttcctgaggtctccctgaaacagaagctgctatgcttcctatacagcctgcagaaccatgagccagttaaacttcttttctttataaattacccagtctcagatatttctttattgaaatgtgagaatagaccaatacagaaaatcagtgccaaggagtagggcattgctataaagatacctgaaaatgtggaagcagctttgaaagtgggtaacaggcagaggctggaagagtatggagggctcataagaagacaggaaaatgagggaaagtttggaacttcttagagacttgttaaattgtgaccaaaatgttgatagtgatatggacaatgaaatccatgctgatgaggtctcggatggagatgaggaacttactgggaactggagcaaatgtcacttttgttatgcattaacaaagaacctagtggcattttacccctgccctggggatctgtggatctttgaacttgagactgatgatttagggtatctggcagaagaaatttctaagcagtaaagtgttcaagaggtgacctggctgcttctaacaacctgtgcccatatgcatgagcaaagaaatgatgtaaaactcaaacttgtatttaaaggggaagcagaacataaaagttgaaaattttgtagcccagccatgtggtagaaaagaaaaacttatttgagggtgcaaaagccagctgcagccattttcataactaaaaggaaggcaacagttgagacttgggaaccccagcctagattttagaggagatatggaaaagcctgaatgtccaggcagaagtctgctgtagggctgtagctttcatgagaacctctactagggcaatgcaagagggaaatatggggttagagtc

SEQ ID NO: 46350 - DNA, 1049 bp, Homo sapiens
ctttgatcccctcaggtttgataacttgctagaatgactggcagaattcaggaaagaactatacttagaatgacaggtttattataaaggatgctaatcaggaggaccagtcaaatgaagagacccatatgattgtctgagagggaacacagagcctgtgtgacttccttttgtagaatcaggacatgtgaatgtgtttgccaaccaggaggctctgctaagcctagatgtacagagtttttactggggtttcattaagtagtaatgattgattaaacctttggccatttgtttgagctcagtctttagtatccactcaccagaggtcaggcagctaaatatactaacctgctaattacatgcttattctttctgctgaccatcctgtatcctgaagctatctaggggcttcagttggcatgtgtcaactccttagcataacaaagacatttatatctctggaaattccatgggcttttgcagcctcttggaaaagagcttcaaaagtgttcagaacactgcaaaagagaaatgttgtgttggacttccagggagcctgggtaaagagatctgattaatactctatattgccattcccttccccttttttttgagttctggagtcagtgtgtggtaatgttcaaccacccatcttaaaccatgaagtaaattggaaggtggagaccacatactgatggcactacagcagtatcatactagcctgatactgcccatttatggagataacagcttcttcaagcagttctcttgcctcagcctcccaagtagctgggattacaggcacccaccaccacacctggctaatttttgtatttttagcagagatggggttttgccatgttggccaagctggtctcaaactcctgacctcaggtgatccgactgcctcagcctctcaaagcgctgggattacaggcatgagctaccgcacccggccacaaacatatctttcatggctagagcaggaggaagagagaaagggggaaggtgctacacacttttaacaaccacatcttatgataactcac

SEQ ID NO: 46351 - DNA, 1026 bp, Homo sapiens
gcttgattttcctattatgtctctgttattgatttctaatgtgattccattgtgcttggagactctactctgttcagttctttaaaatttgttgatgtatgttttatgcctcagtatatgttctctcttggtatatggtccatgattacttgaaagtaataagtactctgctgttgttgaggtggggtattctataaattttgttgatggtgttgttgatttcttctgtatccttgctgattttctgtctatttgttttatctcttgttgttagaggatattgacatttctactgataatggtgaatttatctatttctcctttcaagttttagtttttgcttcatatattttatagcttgttggttggtacatatacattagtgcttgttatattttcttggtgaattatgtctcatcactatgtaatgtccctctctgtctctggtaattttctttgctgaagtctcctttatctgttattaatatagccacttctgctttggtttgattattgtttgcatgttatatttcttccatcatttttctttcaacatgcctgtatttttatattataagttagtttcttatatactacatataattgagttgcattttaaaatctaccttttcagtttttgccttttaattggcatatttaggcgatttacatttaatgtaattattaatatgttatggctaaagttttgcatttttttaatttctgttttctttttttttacttcctgtgggttacttgattttttttaagagttttcttttgatttatctatagtgtttatgaggatatttctatgcaaaactttttggtggtttattttagtattattctatatgtacataaattatcacaaggtactggtaaagctgaggctttctatttttacattgtttcagttattttcatgattgttcattgaagcatttttttaaagactcttaaaatatttgtcagatacttctgacatgtctttttttggtgttgacttttatcttttttgttttt

SEQ ID NO: 46352 - DNA, 1053 bp, Homo sapiens
attttttcatctagcacaactgcaactcttacccattaagtaaccactccccattgcttcctccctccagcccttggtaactaccattctactttctgtctctatgataatttaactactttagatacttcctgtaagtgtaatcatagagtatttttctttttgcaatgggcttatttcacttagcataatgtccttaagcttcatctgtatttagcatgtgattttcttcctttttaaggctaaataatattcaattatatgtttataccacgttttgtttatccattcatcgtcttcgttcattttttggttttgtttttagtatagattatctttcctttttacccactaaatttctttatctctaggcttcagcttatttagggacataaaccatttgcctggtttgttctttggaagtcattttattttttgtttttgtttttatttttatttgtttttttaagctacttcctaccgaaaggatggaagtcattttaatggttatattttccacctgttttgcagctatattgctaacttatgtattgctatgttaattatacatctagaaaactttgagttattttattagttttcttagatatttaattgattggaagtgtttttaagaaaacttggagtttgctagttaaataattatcaacaatgtagctaataaattcttttctactagcatgcaaactctacactgcatcggttcaaattatagcacctaatgctgcctcaaggcttgtgacattataacttttcaactgagcaatgcttaatttgttatgaaagtaaaaaaaaaaaaagttaagtaattccatcaaaattgtattgctgacatctgtttctgataaaattttagtaatatgataagaattaaaagcattgtgtgatactggtttctgagtctcatgatagtaaactgtagaggacttgtcttttgtgaatcatttgtatatgtaaggtgttattaagtccaaatggaaaagaaatttggtgctgagagacattaaagcaataactgagtttctttttgac

SEQ ID NO: 46353 - DNA, 1049 bp, Homo sapiens
tatttatgaagtattttcaagcttagcaaacaattctacataaattataatctttaaattctcacagatagttaaccctatgagatccgataggaactgtgattgccattggacagatgaagaaatgaagacccagaccggggtagcatctgatcactcatattgcaatccaggattgcgattaagtgctgatccccttttttttggtggtggttaaattttcataggactttattagtgaagtgatttaagagtcaatccacagcagaatactactaaaatctttcttcaattagatgggaatcagtagaaagaaatgggggcaggtttggtatgtagatatattcattaatgaatatagacttatctgagtggtgtgttttcttttcctttgcagagtatactgctgataactttttgggacttggatatgtcataataattatagtaataataacacctaaacatgtaaaaagtttttattgtgcatgaggcaaaagtgtggtacgtgaattctagtcttctcaacaatcctttgaacaaaaggtactatttttgctgtattttatatataaggaaaagtttgttgtaaaggagaaagtattaaagactatgtaacctttctcctaccttagaaatacaacttgtgttctcattgttcagttcccacctatgagtgagaaaatgtggtggttgcttttttcttcttgcaatagtttgctgagaatgatggtttccagcttcatccatgtccctacaaaggacatgaactcatcattttttatggctgcatagtattccatggtgtatatgtgccacattttcttaatccactctatcatttttagacatttgggttggttccaagtctttgctattgtgaatagtgctgcagtaaacatacgtgtgcatgtgtctttatagcagcatgatttataatcttttgggtatatacccagcaatgggatggctgggtcaaatggtatttctagttctagatccctgaggaatcaccacactgacttccacagtggttgaattagttttca

SEQ ID NO: 46354 - DNA, 1033 bp, Homo sapiens
aaggttttaattaaagtagaattgactcatctttttttgatgtgcctctgagaaggaaatttgtaacacacttcagttgatggttggctttctctgactttgattaatcactttcaaagtaagcaatagatgagtatagtaattttataattatatgcaagtgagattattttaaactaactgtaaaggaagttttatattgttcaacattatataatgctgtatatttttcttttactattaaaatacatgtagtaatctgaaaaaagattttgtattatttttataaatacaatttaatggaaactttaagctagaaatattagtttcaaagacatttatctattaatactgaaactttaagcttttttgaaaactagttgatgaaactaataaatattggaaataatccaactggtggagctgactgtaagttatgattccacactagtgaaccaacttgtgcctccctgaagcactgctaaaaataaaactttgaactgtctgaaagatttgaaatgacaatggaatttgattattcacagtcaagataaaaggactctcctcagtgcaagattaaatgcccctaaaagtttaagaagttttcacctgtcaaaactaatacaaagagaaattaattctgtttaaattaataatactgaagaatgtacacctcatcttacctgtatctagaatcctcactgggtaagtatttaatccattctgaaagaatcttaaacagttttattaagaagaacataaccaatctgcaatattacctatttaaaaatttcttatatgttcatttcttaattaaagcttttaacaaaagtaagtgtattttgtcactgaaactgtattaaacaactgagaaagtgtctaatactctaatgtatttttaagcattgattaacttttatatggtgagtcacttgcttcatcatctcttttaagagtaaaaataagtgctatttaatggtagaaaccaagtatttatactcttttcattaccaaaataagacacaaaaattaa

SEQ ID NO: 46355 - DNA, 1325 bp, Homo sapiens
ggacactgatatatacatgtgcagtagggaagcatacttctgttgccagcttcttagttactggggtaggcagaattgttctccaactacctgactccttctgcaacctcttgtgctgatggtattcatataaaatgtaaaaaacattttcaaatgttttgcgaagttttgagaagaaaagttctgaaaaattcctaggagagggaagaaaaagggtgaaggcagaatgacaagtacccatatttggagatttggtggaaggagataaaagagaccagagagtaagagaagaattaggagagtttcagccaagggagaaaatagttttaaggaggttgtgattgatgaccttttacaaatgtttgtcctcttctctgtctccatctccatctccgtctccttctccttccttcttccttcttccttcctcttcctcctttgtctttcttcttctttcttcttttttgcctttagtttgggtagtatgaataataggttatcagattggaggtcatggttaactttcaggagtgtaattcagtcaagtagcaggctgaagtcaattcctgggggatccagaaatgaagttcggtagccaagaagaggagtaagttgggtggcggtgggggcggggggtgggggtgcggtgagatttgaaggtttgagagtccagggaagattttaatggcatgaggagacttagtctgattttagaatgagatgtaggacccagaggagaggattaaagatgtaaggagtagggccaagggcgacagataatgaaacaaggccccagtcaggtagcagggaatgtgactgaggatttaagtctagtcatcaaccatggggaaagtagatttaagcatactatgtctataacctgctcctgccctggacatcaagtgttacatttgaagagctcactgcttattaatgcagaagcagtatcaagcattttatatggttgccagacttaggcagggccagtgggttgaaaggcagtaatactttgctaggcaataattggtttaggggtgctggttagctgtagtggtggttcagttgcttacaaagtatttagaagcctctgagcaactatattctgatctgccttaaaaataatttagagtgaagctaattactgaaagaccttaaccagcttttaaaaatattgtggaaataagcataaattcaccattttaacatttttaagtgtacaattcagagatgttatatacacatttacactgttgtacagccgtcactaccatccatacacagaacttatttttttttacttttttattgtggcaaaatacacttaa

SEQ ID NO: 46356 - DNA, 1030 bp, Homo sapiens
ctgcctcagcctcccgagtagctgggattacagatgcgcgccaccacgcccagctaatttttgtatttttagtagagacggggtttcaccatgtttgccaggatggtctcgatctcttgaccttttgattcacccaccttggcttcccaaagtgttgggattacaggttttgagccactgcgcccggtgctgctttgcccatttttaaattgggctttttgtttaacctctctctagtactgacctgcttgttgtttctatgctggtgaaggtgtcctactcctttaactttttactgcctgtttattgtctttccagttgtccccatatcactttctccaccccaattataatacacagtctgagtccctttgtatgtcttctttgtaatcactatattgagagatctttcaatcagaatgcttttcactgtttctatgcaaatgacttagttgtctaccaagtagaggattatttttattaaatcatatatatgtactttgcattatgcaataggtgtgttctgaagaagttgtgtaaatatttaataattgtaaatcagcatttcatattctttggaaattattttttaaaaatattttttcacagtttgtattatttaagtttccatttttattttagggtacatgtgcaggtttgttacaagggtatattgcatggtactgaggtttgggcttctgctgatcctgtcacccagatagtgaacatagtatccgataggaagtttttcagcccttgtcctctccactccttccttccttttagagttcctagcgtctgttgtttccatctttatgtctgtgtgaacccagtagtcagcccccacttataagtaagaacatgcagtgtttggttttctgtttctgtgttagtttgcttaggactatggcctccagctgcatccacattcctgcaaaggacatgatcccattatttttttatgcctctattctgttccattggtctgtgtgtctatttttgtaccagtaccttgctgttttggttacag

SEQ ID NO: 46357 - DNA, 1047 bp, Homo sapiens
tttgagaatgggtctttcaaaggtgttaagtctgaggtcatttgttttatatgctttagtttatcagtttgtcagagattgattatttcttttatcattcctgggcagaataaggaatatttggaatatagatgttcaaggagaaattttctaataagaagaactattaaaaacactggatttgtttgatggcaaggagttaaccaaatttgttagtttccatacaactttttcttccccccaaagaaacttgtagtatatgtaaaccgaatcttcactgtggtagacagtaatgattatctgtttagtaaagggaaatgatgatgtacacattgaaacatataaagcttttaaacaggagagggataaaagtgcttataaatttatattcagctatgagattaaaattagtgagtagtggcaaatgggagtaagtctaatcagaatgttaagtgaaacaaatttttttaaattaaaactcagtttattttataaagttaaatatgaaaccaccaaattaattttgatcagttagataaatagaatagttaaaaaaatttagttttgaattcagttaaccacatacttttgaggagatcagtcttctctttttctcaggcctttaggaagtgagtgtgagagagagagagtgtgtgtgtgtgagtgtgtgtgtgtatatatatgtgtgtgtatagatatatatatatatatatttttttttgagacaaagtctcgctctgttgtctgggctggagtacggtggcagtcttggcttgctgcaacctctgcctcccggtttcaagcgattctcctgtctcagctcagtctcccaagtagctgggattacaagtgcgcaccaccatgccaagctaattttttgtatttttagtagtgacggggtttcaccatgttggccagactgatcttgaactcctgacctcaagtgatccacctgcctcggtctcccaaagtactgggattataggcgtaagccagtgcactcagccttaggaagtatgtatatatatgtatatattttaaatcagg

SEQ ID NO: 46358 - DNA, 1579 bp, Homo sapiens
cgcccaagtaaatttctctttttcctcatattttgtatataggcaatttcttcacagtccagttctttggacagttaatcaagtgttgcctcgtgcatttccaaacataatatagtttatttcctatttaaataatatcattatttaacttttcttgtgtttgtgagctgtcttacaaagtagagtattgaactgcaagtattggaagctgttgagatcatgtaacagatagttttatcactggtaacaagtactgccttttgttttccttgaaatgacaggttcacttggttcctttttgagaaaatgtctgtcaaatacccaagtctgtgtaaccttagttttctgttagttattcttcaagtaaaaatgatgttctttgaaaagagccttgtagtttatttagcttgcagctcagtcacacaactgctttttttcagattattgttgttctttgatatgtggggaagtgctttatgcatattttccattttgtcaatgtagaatattaaaaatacatattcaagtgtagaaatttaatagaattaataaactttactgtttcatcaaggtttacagtagttttgtggggggtatagtgagggcaatgaaagaaagagctgtccaagagagaaaaattgttgagggcccagctaaaattggtaattgggaaagtatagtgtaattaatcctggtttgtgggccttcctatggtagtgtgctctgctgtgcagtagaatgcattatggccttgatatggagggtttgggttttaatgaatgagtgtcttagaaggatggggctatagggaatttaaggatgctgctgagagacagttcaaggggttactaacagggcacagtctggaaagaaaagagagagtgtaaggaaatggggtgatcaaagaataggtagtgttctccatgcttgctgcatagccgtcatgtggggagccctaccctaaacagattaaatcagaatctcaggaggttagagaggagataaagtggtagttaagatatgagaaagctggtaggatatgacactatggtaagtgagtgaaatattgaagttttttaccaacatttttttttgtactgtagtaattttgtgaaataaatattttatcctccattgggtggattggatgaaatggataagattatgttatttaagatgacataacttgtcagtggcagaactgagatatgaactcagtttgttctgtgtttttgcctagacaccaaagaaatatcctctgtgttaatatcccaactcagtgcaagtggaggagcggctaacaaaaataagacattttaaaaccatgtaatcacaatattataattactgatttaaaatctgaaccctctaagttttccagagtagcaggaaatatggtaacctaggtaagatttcaatttttaaagttttgttttccagccatgttttggtagacatataggctaatgaggtaatcaataatctacaaagttgccacaatgagacaaagatgtgattgacatgaagaccccacagctgataacaggcaaaaaacctgatagttattttaatataagta

SEQ ID NO: 46359 - DNA, 1050 bp, Homo sapiens
atttctctacttctttgccaacatttgttcttttctgtcttttgataatagccgtcataatgggtgtgaagtggtatctcattatgtttttgatttatatttgtcttatgattggtgatgttgaggatctttccacgtgcctcttggccatttgtatacctttggagaaatgtccatacgagtcctttacccatttttgaatttgatttttttattgttaagttttaggagttctctatatattctgtatattaatgtcttatcagatacgtaatttttaaatgttttctcccattctgtgggttgtctttttactctgttgatattgtcttgggatgcacaggtttttttttttaattttcatgaagtccaatttgtctgttttattcttgtgttctctgtgcctttttggtcgtatctgagaaatcattaccaaatctggtatcatgaggtttttgccctgttttattttttcccaagagtggtatagttttaggtcttatgtttaggtctttgattcattttcaattaatttttgtatatggtgctaggtaaggattctacttattctttagcacacggatatccagttgtgccagcactgtttcttgaaaatactgttcatttcctattgaatgttcttgacactcttgttgaaaataatttgattatatatacaagggttatttctgggttttctactctgttcctcccatctatctgtctgtgtttatgccaatatcacattgttttgattactatagctttgtaataagttttgaaatcaggaactatgagaattttagctttgttcttctattttcagtgttgttttggggccccttgagatttcatacaaattttaggataagtttttctatttctgcaataaacatcattgggattttgatagggattacattgaatctgtaggttgctttgggtagcatgggcatcttaaaaacattaaattttcttatctatgaagatatgataggtttttatttattaatgtcctaaaattttttttcagcagtgttttgtagtttt

SEQ ID NO: 46360 - DNA, 1005 bp, Homo sapiens
tatttaaagcttgattttaatgccacttcctctatctgttcctaattaattgcactcctttttggttatgtttcactttgaaagagctttttatgatcatttatgagtctctaagtctgtatttcctgctagattggagccccatgaggttaggttagagatttaaaaaaaaattaaatctagagtaggtgctcaataaataatttttcagtggatcaatgtttcctagtgcttcttggaaaatacttctgaattcttatgtcacttttacactctggtttacattctggttatatatgtgctgttattcacagcaatattgtaacccctggggtaattttatatttggtactttattgttttaatttgcctttctttgataattagagcagtttagtagtttccatgtatgttaattagctcttttttttagttttgtgaattttatattcatttcttaggcctgtttatttattgagattttattgtttttctgaaggttttatatgagctctatgttctaaataaataattatatatattaatatcttgctatgactatttttttctttttaaaaatttatttagttttttttagagacgaggcctcactatgttgcccagcctggacttgaacgaactcctgggctcatgtgatcctcccacctcagtctgctgggtagctgagactataggcctgtgccaccataactggctatttttctgagttttctaaggttatgtagaaccttgtatgtattctaagcttatgtattttaagtttttgtgtagacaaaactaataagttctcataattctttctttgctttttttgattagaaactatctttcctgcttagtgatttgaaacttactttggttttcttctaagtatttttaaaatgtttaaatctttgatttatatatttgttttagcagaattaagcatctgttttcaataaaatgctcataaagccacccattaatgtactcagggtgaaagga

SEQ ID NO: 46361 - DNA, 1122 bp, Homo sapiens
agttctcatgagagtgtgtagcacttcccccttcatcctctctcccgctgtgccatgagaattcggtgtttgcttcccctttgcccttccgtcatgattgtgagtctccatggcctccccagccatgcctcctgtacagcctgtggaactgtgagtcaatcaaatctcttttcttctaaattacccagtctcaggtagttctttatagcagtgtgagagtggatgaatacagcagttttatttacattttggttgaatggaaaggttcaaaacacatttattgatttaggcccagtgctgttcactagaagtacaaataactaataaatgttgctgtcttgcattcttcacacactagatgaggtaataggtatgtaaaaagccaaattctgttttgcaaagagttagagttctttaggaggaaaaaaggagatgcacatagcctaacaatttagaaaaagtttcattggtgagagaatccgttagcacagtggtcctcgacctttttggcaccagggactggtttcatggaagacaatttttctacggatgggggtgatagtttcaggatgaaactgttccacttcagatcatcaggtattagattctcataaggagtgcataacctagattccttgcatgtgcagttcacaatagggtttattctcctatgagaatctaatgctgctgctgatctgacaggaggaggtggagctcaggcagtaatgcttgcccacccgccactcacctgctgctatgtggcccagttcccaacgggccatggaccagtacccaggggttggggactcctgctttagcagattcttgaaagaataggagttattgaatataagcttcaaaagggcaggtgtttttcttttttcgttcactgttttatctttagctcctaggatgggtgctcagtaaatattgagagagtgaatgaataaatgagtaagtcagagaagagagggcaaagaacatcttggaagaggaaacaatgatatgctcaaattttatttctgtctctaaatatccagtgttgtacccctaggttacccaaagaagaatgttcccagcatgtggtctaaatggatttacttttctcacaattaattactc

SEQ ID NO: 46362 - DNA, 1205 bp, Homo sapiens
acagtaagtattttaaaattgttttgctaatatcatttctaaagattgatattttagaatctgactagttggtattttgttacacagaaaataatagcatgaaaaaagaaaaggttttaagtggtgtaaagatatctagtaggaggtgtgagaaccagccacatatctttctgtaacaaatttaggaattacatgattgtttaatttatttattaggataatttttggtgtgtcacagagaaactaccatggtacttctcttcttcatttggaatcagcgtgtgtgtgtgttgtttaataatgtgagtttcataaattatggctagaattttatttaaagtttataatattcatggtatttacgtatcttaaattttatgtattataatttatggctggaatatttgaagaaattatatacttctgaattaaaaaaaaacatttttgtatttattttcccaaatattgtcaggatgtgtgaaagtgatagaaatatatatatttctataaatttagcttagtgaaatgtattgtttaataaaagctttttatggttatgttttaactctaactagaagtgctatttacaaaattgtttactttaagctagtaatacatctagtttatttggacaatttgtatggaccaaagtgacctttttttcttgaataggaagagtaatcagtgaaataatttgtaattctgtagcagtaacattattatatgttgtcagccatgtttcagtaaaatacattcagaaaaaatacttcagtcaatttgtagttaaccagaatcattttaaagtttgatttgggaagtacactgtaagtttattttactaattttttttccctgttagagaaaagaaagtaaataggatttcttttaagggaagtgaaacagaagttgaaataatccctgttttgacagagtagattaagtgatctgtgacattctgctaatgatatattttagaatttctatggtgcttaactagcatttatgtaaatcagatgattcttgagtggcagaaaaatgcttcagtggaaagtaattatatcccagttagagaattgttttaaactcatttcagggctaaactcagtgcatttggtatttaaagttatcaggtaggaatatgaagtagtgtgtgaaatggaaaattttaaacatctctattttcttagttttaagtgttaatgtta

SEQ ID NO: 46363 - DNA, 1022 bp, Homo sapiens
caaggtttatttgctggaaggagggtggatgtgggaagaaaattgaagggattaggacatacaccgttggaggatgcgttttggccaaacgtgtagacaagttctcgcattctggtactttcacaaagcaatggtaaagtactccctagtttgctgatgaggggcgggggaagggatggtcaaagagaatattgcggggaaccataggattgcagtctgacgtgggatttagggaagctgcgggaataaccaaaatgaagacagaattgagagttctagagacaaagtgaaaataactgataagtaatgaattcagagttgtaagggtcggtgttggttttattaggctgtaatgagtataaaatattacctttccgtataatagcttacaagctaacaaagtcaagaaactcaaacattaactcggaaaatatacactgggcttcaaggaatcgcataggacatgctccccaagttttgcccagattgtcttatttttggttatcgctgaagaaaacacctacaactgcattttgaaactagactcctggccaggcgcggtgatgcatgcctgtaatcccagcactttggtaggccaaggcctccaaattgcttgagcgcagaagtttgagaccagtctggccaacatggaaaaaacccgtctctacaaagataatagtaatacaaaaataagctgggcatggtgccagtagtccctgctactcaggaggctgaggtgggaggatcacttgagccccagaggtggaagctgcagtgagccgtgatcacaccactgcactccagcctgggcgacagaatgagactctgtcgaaaaacaaaacaaaaaatcagaaactagatttcttaaaaggttattaaatacccacccatgcctaaagctctttcctggaattcaaaattaccatttcttgaaagagcttcagtaactgcaacagaaaagaggcctgaggatgccaaggtgtttaggtttattttgtgattgaaaataaggaaataagttt

SEQ ID NO: 46364 - DNA, 1034 bp, Homo sapiens
aaaaattaagttaaaatactaaaataattcttgtctatccaaaatactctctggaaagtcaattgaatcgaaattaaatcacttgcttggaatacatgagtctaagtggaactgatagtacattccacactactaaattagcataaaaatgaaatatgttgcttattattgctttttcaaggaatttgaatttcaggatgttcaacgttatctgaaataatgccaaaaactaagtagaaaaatttctaggtaatgactaatgcttggtgtcaattcaatgctgaaacttttaatgctaaaattctgagggccctgcatatcctttcacatttatagaatataatttcccacctaaaagagtaagtttaaataaatacaactgaattttatttttggaccctttgatgtagtttgttttggtaggaaaaagaaaaagagaaagtaagctcaactgagaaagcctttctaaatcattcagggtgtgatataatggaggctgcattgtcgtgatataagtgttggctattcttccacaaactatgggtgctgtaagttctctctcaagattatctgaattaactgaaggccacaaatactgtgcaattagcatgaaacaacctcttacaatagagggaaacctgacacattcataaaaagctggttggaataaaaattgtggctgaaaggtaatccttatataaaaaaatcttacttgtaatacctattgatgcatcaattctatgaaataatctatcctaaggtaataattacagatgtgtgtaaagaatgtatctagatgtatgtttatcccagtgctattttaataaaaatttggcagcattaggaaattggtcaaataacacagtaaaaataaaaacagctttcctttattagacattatgtgtcaagcactgggctaagtgatttttaatattacttattccttaaaacaatcttgtaaggtagacagatgaaaaaacaaatggaggtacacagaggctgagtgatttcttcagggccagagtgttgggaag

SEQ ID NO: 46365 - DNA, 1029 bp, Homo sapiens
ttgctgtgacacagagaatgtgaaactgctattttgtcaggcagtgttcctaaataagcatttcagttgcactacatatatgtgggttacattccaataaaccttatcatatgttgagaatatcgtaagtcaaaaatgcatttaagaccctggaaaacccattagaaagtcaaaaaaattgtaagtcaaaccatcataagttgggtaccatgtgtattaaggaaaaaaaatcaagaaaatattaatggttgtttataatcttaacatatctgctttaactttgaaattttcaaaatttacagtgagcatgcattttataatcagaagatgttaataggctaatttaaatttgttagatttttaccatttttaagattatgtttaaaaacctgtatgagagaacatatttggagacaggaacaaaaatatggcttggaacagaaacagtatgtggctataagggttaatggcaggggggtgggggcggtggtgggcatagaattgagaaggaaaaaagcagaatttgttcaatgcacacaagcaatgagagtaaggtgtggtatgcccaaaatggaaaagaggctattcagagtggtcagggagcttagaggagcgtaaaggagagtgaaacttggagtccaggtagcctgaactgtgctttttctgtggctgagggtgagtgatcaaggtgtgaagtctactagtaggaatagacctcagttgatcctcaaagatggtgagtattgagagagtgtttatctctaacttagcctttgtgtttctcttcacagaatttcttcaggttgaattacctagaagtttgtcactgacttgtgttcctgaactatgacacatgaatatgtgggctaagaaatagttcctcttgataaataaacaattaacaaatactttggacagtaagtctttctcagttcttaatgataatgcagggcacttactagcataagaattggtttgggatttaactgtttatgaagctaacttgatttccgtgttttgttaaaattt

SEQ ID NO: 46366 - DNA, 1050 bp, Homo sapiens
gaaactctgctgggaattatctgtacctattccatctttacttgaaaaaaaaaaaaaaaaaaaaaagacttagtcctctttctgttcaacagtgctagtaaatattgtcacatgctgtttttattgcatgcttattttagaagtaccatacatctggatgtcagacatctaaaaaacaaattaaaattagaagacataggtacactgctcttacatttagtattttgaccatcagcacaaaattactggattttctccatattttaagctgtttgagaagtgacagaagaaacctaattttagctgaataacagaagcaaaaactgttatttgaccatgtagtaggttttcctcttgggaagtaagtgttttctgtgtatgcaaactttttgccctgccttcttcatttccagaatacctttctaatgatgtgtaaatcatttaggcagataggtggctattagatgctgctgaagtgtttatggttagatgtttattggtgggatattataaatgtataattcttgaagttgtagtgtcaggatacttaacatgttttacgaatcctgaagcacttctgaaggtaaaaggttcttgtctttccacagttaaaaaactggatgtagtaaggccgtatggcttaaggatcacagagtaatagcaactgaaaagcatcattcattcatttaatactaagcacttgctataaggtacacattttgtaaagcactaggttatcttacattccatttcagctaacatttagtacggtgccgggtttgttaggcaggtttaacacatgtcaatttcatattattcttagaacatctatttgaggtgagtggtatcatccatattttgtggtcctgatcactgattcaggaatatatcttacctaggatatgataacaaaaaatagctgagccaggtcttttgactcccaagttctcttctttatacatacaatactggatgttttttgtttgcatgtccagatctactctcattcagccttctctaccctgctctgtgccccaggaggttgacctc

SEQ ID NO: 46367 - DNA, 1077 bp, Homo sapiens
taaattcagttttctcacttacaaaaataggttagattagaatgctagagtcactagaaggataggtttcacagccacataaagttggtgcagcctcttgagaagagcaagtaagtacatgagcacagggacctttacatgactagtttttttgtctgtgtgaaataggtccagaatttgtagccttttcactctttgtatcttcttgacttacttaaaagactcactctgttttttgatggctgctttttcaaattagtctttggattactgtctcccaggagttgactagttaaatatctgatacatctaatttaatagtctgttttagaattgtagttaaactgattatgttgcttttgtttttttattttttaatttttttctatttcatttttttcagagacagggcctcactgtgtcacccagggtggaatacagtggtgtgatcatagctcactgcagcctggaattcctgggctcaagcaaccctgccacctcagccttccaagtagctaggactacaggtgtgcaccaccacacccagctaatttgtgtagtttttgtagagatgggtttcaccttgatgcccaggctgctcttgaactcctaatttcgagtaatctgcctgccttgtcctcccaaagcgctgggattgcaagcatgagccaccataccatgcccagctgattttgttgcttttgaattctcagtaagaaaaccgtaacagagataaacctttatgattgtttacctgctgtgtaattattacctagatttttctgtctttagaaaatactcccttttctttccttatacagttaataatatttcctttgtacgtgagtttttaatctcattttcgggagacttgtgtaaagagaagctaatttgaatactacatacccaaagggaaacagacacattttgcttattgtgcctcttggttcccaagagatattattccatctgagaattaccttatagtttgaagaaaattttaaaactaagttctaggatctctaccaaacacctcttacagattgcactcttatctcctatgtacatatatcattc

SEQ ID NO: 46368 - DNA, 1061 bp, Homo sapiens
ctaaattaagttattctaatgcataatcacaaatgagactatgtgaaatgtgcagaagtataggagctaatgcaagctctgtgatggcagggaccattttctttgttcactctttaagtcttagcacttagcataagcctgacaataaaagatgtcgaataagtatttgctaatagaattaaagtatctacaatctaaggtatttattttataactatctcttcagcagtgttgtccaatagaaatacaatgtgagccacaaatataatttaaaattttctagtgccacattaaagaagtaaaaggaaacaggcaaaattagttttcataatgcatttaagccaatagatctgaaagattatcatgagtgactttacgtacttttattcatattggacagcgtagctctaggggcgttttgtatgacatgtttctttctgcagaacttgtctttttgtagtctttttctaactgattgatgtgtcttttgaggccaaatacagaattgcatacaccttcgaattggagttattgagttggattgaaagtcaggctacctgtcttctctcagttttacatctccgcacaaaatgactttgcgcgttactgtctttcccaatgtataatcctgtaatcccagcagtatggggagctgaggcaggcagatcatttgaggtcgggcaagactagcctgaccaacatggtgaaaccctgcctctactaaaaaatacaaaaatttgctgggcttggtggcaggcacctgtcatgccagctactagggaggctgaggcaggagaattgcttgaacttgggaggtagaggttgcagtgagctgagattgtgccactgtactccagcctgagcaacagagcaagacaccatctctaaaataaaataaggaaggatattcatcatctttttcattggattagtataagttaattatgcctttgaaacactctgggctactcagacaagactgttataaaagagatcctctaattattagtaactagtcagagcaaggctcagtgtaaaaaacaggatagaagttcccatga

SEQ ID NO: 46369 - DNA, 1049 bp, Homo sapiens
tgtttttttaatgccctttttgctctttcttcttccacagtgccatggaaagccattcactcctcaatcccaacctgcagcaaggtgaaggagtcctctccagcttccgaaccacgtggcaggagtttgtggaggatctgggcttctggagagtattgctgttgatcttcgtcattgctttgctgtctcttggcattgcttattatgtgagtggggtgctacccttcgtggaaaaccagcctgaactggtgcattaaaggagctcatggaagatgaggcaattaattgcctgtttcctggcttccaatgtttgttctcagtttctcagaatttttcttagcgcaaagcagtgagggcagtacatgttctttttgcatttttaattattgtaatccttttagataatgatgtgttcatttgaactaactacatactatgatcaagtatattgcatcctaacgctacctctgactcaacctgactttgtaggaaagcctacacgtagccttgtttgataaaaacacggaagtgactagagaatggaagataaaggaagaagctaggaagtccttgctatcaaaaccttatcctaatataggaccaattgaagtattcaaaaagaaaaacagtatcttatatgattagtttttgttggtggttttgttttcatttatttttgcaagagccactttttatttactttctctagggataagagataaaacttgaagtacttttttcaaatcttgtgtgcaaattagtattgttagcatctatttggcttattttagtatttttaagtctagtcacaaaccaaacaaaacttttgaaaatgagctatattttgttcaaagataattgatttgatcttatatttatttgtttttaggataatttttgatctttttgtaaactgctttgcttgttaatatctgtgaaaaataaatgagttcattttgttcactttccaattttcccgagtatcctagtcatcaaagataacagttcatcagaattacagtcagaaaatcctttttctactgaatagt

SEQ ID NO: 46370 - DNA, 1528 bp, Homo sapiens
tctatgaaatataaaaatgacaaaagcaattttaggtatctcatttatacaccatagaaaaataaagtgaatgtatttctctggcattccaagcaaagagttttattggactggtcacttgctcacctttaaataaaccacaatagctagggaatgtgatatgttacatggccttagataataaagactgacccctccaaagcatatgagcagtgaagagtagtggagttgggtaccagtggaacaggtaggaatggagtctaggtagacaggggacatctgaggaaattaaaaacacatagttgattttcagtcaaaataatatattaaattcatgtttgggcacctggcaataactgatgttaaaaaaaaaaaagcgccaaagtatagtcagaatagtaaataggataaccatctctatagagtacaagcacaaagtaatgagtgaggctgtagctgttttggaattggccaaaatggaaatcatccaatatctgatctcagacgaaaaggaattaaattacaatttgataacagaaagatagccggaaaatcactgaatacttagacattaaataacacatttctttttttttttttttttttttaagacagagtctcactctgtcacccaggctggagtgcagtggcgcgatcttggctcactgcaacctccacctcccaggttcaagctattctcctgcctcagcctcccgagtacctgggactacaggtgcacaccaccacacctggctaatttttgtatttttagtagagacggggtttcaccatgttggccaggctggtcttgaactcctgacctcaggtgatccgcccaccttggcctcccaaagtgctgggattataggtgtgagccacagcacccagcccaaaatgttttcaaaagacatatatgatgaagactgttatccaaaatacacaaagaactcttaaaactcaacaaaaagagaggtgggtatgggtgctggctgaggtcactcagtgctgaccatcctcttctcaaagccatgtctctaagacatcatggtgaaggtgaaggccagagtaaatagatttgggccatattgggcacctggtcaccagggctgcttttaactctagtaaagtggatattgtcaccatcaatgacccttcattgacctcaactacatggtctgcatgttccagtatttctacccatggcaaattccaccacaccgtcaaggctgagaatgggaagcttgtcatcaatggaaatcccatcaccatcttccaggagcaagatcctaccaaaatcaaatggggtgatgctgaagctgagtatgccgtggagtccactggcatcttcatgaccatagagaaggctggggctcacttaatgggggagccaaaagggtcatcatctctaccccctctgctgatgcccccatattcataatgggcatgatccctgagaagtctgaaaacagcctcaagatcatcagcaatgccttctgtaccaccaactgcttaatcccccggccaagcc

SEQ ID NO: 46371 - DNA, 1029 bp, Homo sapiens
ataagccaccatgcctggcctgccagttgatgattatattgaggtttctaggctatgagattattagcttaaacccttacatgatataaaacaatgatagctactcttgaagaggatgtagataagataggctttggtatgattttaatattaaagtgttaaaagttatgattagttttaaaccttattcttgtaacgtctttaatttggtagttcatgattgtggcttaattttagtgtaatacccaaagtacttgttaaaggtgaagatgtggggttcttttaggaggatggatttagaagatctagcctggagtatagggtatctgcataaaactgataacccaggcagtttacacttttaggttttaatttctaaccgatcattctctgtggactactgctagagttagctttctaagttaaacgtgtggttatctcattccatgctaaacaaacaattctattaaccttcgggattaaataaatctaaacaaaaccctagcttgtgacagtggcagccctcaatgctgatgaagcctagtgatgcttctgtacctagaatgcttttcgctttggcttcttgttttgaaactcaagataatacaaactccaccctcctaccctttagcatagaacagtgcatccagtggggatcctgatcattttgtattttgcctcacaacagacataccctctcaggggctgatgcttcattacaatttttttttttgaaagattttcttcattgtgttaaggcagagaaacaccatattttttcaaaattgtaatacaaaatggttcaaattttgaggttttaaaagagccggctattttgagacacttgaagtcaaatctataaagttcacacactagttcacacaccaaaatctagtgccaggttgggttcatagctttatacgttaggtagctgattgattggaagtcagtatttgttgtgagattcgaagataagtcatattcatctgttcctgaaatgtctgctttttcagatagagcaaactttaa

SEQ ID NO: 46372 - DNA, 1404 bp, Homo sapiens
tttttttttttttttttttgagatggagtttcgttctgtcgcccaacctggagtgcattgacgcgatctcggctcactgcaacctccacctcccaggttcaagcaattctcctgcctcggcctcccgagcagctgggattaacaggcccatgcctgccaccgtgcccagctaatttttgtatttttactagacttggggttttgccatgttggccaggctggtctggaacttctgacctcaagtgatccgcccacctcggcctcccaaagtcttgaaattacaggcgtgagccactgcgccctgccagattttgtatagtaatatatatataaaatgacctgtcacaggttggctttcatagttttacctttcctttttgggtggtgcccttgggtctctactactgtctttcatcactcccaagaaattgagtagtgcagccaggatcaggaccagggattggcaaatgttttttgtaaagggccagataggaaatattttgggctttgaggactgtgttatctctgaaatgatcttgttccagtgttaccatgtcaagacaaccatagatagtatgtatacaaatgaacaggtatggctgtgttccagtaaaactatggataaaaacaaccacattgcatttggctaagggctttaatttgctactgacaagtgatagtcctggtcttaatttgtttttttaacatttacagattgatcagggaccatgaaaagaaacttgtgcttcaccgaagaaaaatatctaaacatcgaaaaacttaaatattatggaaaaaaaacattgcaaaatataaaataaataaaaaaaggaaaggaaactttgaaccttatgtaccgagcaaatgccaggtctagcaaacataatgctagtcctagattacttattgatttaaaaacaaaaaaacacaaaaaaatagtaaaatataaaaacaaattaatgttttatagaccctgggaaaaagaattttcagcaaagtacaaaaatttaaagcattcctttctttaattttgtaattctttactgtggaatagctcagaatgtcagttctgttttaagtaacagaattgataactgagcaaggaaacgtaatttggattataaaattcttgctttaataaaaattccttaaacagtgcacggatttgctttttttcaaagtctttataattgccatgcataaataggtaatatcttaatggtgctgagccgacataagaatcttttatgaaaaatgtactgttaagttcagggggtctattggttttatgtaaaaggcacaagacaattcctgtagtgcattttatgagttaaggtttccatacggattattgaaacaatttgttacatgtatttgttacatgatcttaatatttcatgtaca

SEQ ID NO: 46373 - DNA, 1050 bp, Homo sapiens
ggatgtatttatttagataattaaatttcaatattgaaaatccaatcaaattcagtatctaaaatctttaaaagtttctgtgcagccttcacttctgtcagttctctgacctggctagggtaatgcatatgtgtagtttgcccttaataattgggtattaaggaaaaattgtgaactcaatgggtaaatacaagatgattaagcattaacagggtttagttatttgattcagtgatttataattgtctaaattgtaacgctctttttttgctcctcattctaccattacgttaactttttttttcttttttttaataggttatgatggagggtggtcgcagcaaagggtttggttttgtatgtttctcctccccagaagaagccactaaagcagttacagaaatgaacggtagaattgtggccacaaagccattgtatgtagctttagctcagcgcaaagaagagcgccaggctcacctcactaaccagtatatgcagagaatggcaagtgtacgagctgttcccaaccctgtaatcaacccctaccagccagcacctccttcaggttacttcatggcagctatcccacaggtaggttttagaaggcaaccagaaccatgaaggttttcgtatttggtcatttctagtgttttttgtgcccctcgccccgcaaatgtgaaacattaagaaaggggaattatgattgagtaggaaaaaatgcttgagtgtgaagtcctggtaaatgttttgaaaaagtacatataatttattgcattatttgcttttttcttcaactgataaactcatgtgctttttttccctgcagactcagaaccgtgctgcatactatcctcctagccaaattgctcaactaagaccaagtcctcgctggactgctcagggtgccagacctcatcgtaagtcttttttcttttaattaaggttggggattgagttaaaaataacacattgggtaaatcagctcttctatgtcaatgttaggttaactattgcatttcacataatttgtggttatggatgttcattttt

SEQ ID NO: 46374 - DNA, 1603 bp, Homo sapiens
tgaaactaatagcatagcgaagaccaaccatattttgtggagagataaggaaattatttttattttactttttattctaaagctgggttagagataaggaaatttagatgactagggtgagattatgtaagatggtttttccttctgctttgctgtgtattataatatgctatgacacatgtgctacctttttttcttcagtgatcgttgttctttttatatttttgagacatggtcttgctctcttgcccaggctggagtgcagtggtgcaatctactcactgccacctctgcctcccgggttctagcaattgtcgtgcttcagcctcccaagtaggtgggattacaggtgtacaccaccacacccaactaatttttgtactttagtagagacagtttcaccatgttggctaggctgaactcgaattcctggcctccagtgatcatcccaccttggccttgcaaagtgctgggattacaggtgtgagccactgcctagcccagtgatccttgttctgaattactactgttatattcagaaaaaattaagttttagtgtcattttgttgaaaatgctgcagttatgtcaggctgttgtgtgttagagtacacgattgggaagtttaaatttttattctaggagatggcaaagaaagcgcaagcgccactttaaaatgacgatgaaagctttttaatttgatagaggtctttttattggcatggtacacatgcacttccactcatttgtattgatgggagtgatccctttaaccctaggttagctagagaagagaagtgtgtattaaaagaagtggttttttttttgtgattgtagttagaggcttattcatatatttcatggtgtcatatcttaaattatggccctatttctattttgtagtgtgctttttattagggattctgaatattctcattaacagtaacaaaaccaaccatcaggcttacttaatctgaactttataaaatagaatctaatgttatagtccttgtatatcttattagatttgttggacgatttaagtctcgtaaagaacgagaagctgaacttggagctagggcaaaagaattcaccaatgtttacatcaagaattttggagaagacatggatgatgagcgccttaaggatctctttggcaagtttggtaatgtgtcttaattaaatttttacacacaaagctctgaattagtgctcagtgttaattttagctattactttatactaaaaaagtcaataaaattagacttacatggtactttaaaatatttgtggttatttgaattaagctgctggccatctattacactacaaagtagtataatgcaaataaatagaattctatccaggttaaaggttaatagcattagattagcacagtaaggtatgactaagtaattagaacagattttaaaatattttactacattaagaggctggagatatatatgtgtgtgtgtgtgtgtgtgtgtgtgtgtgtgtgtgtaattagagatcccatgtcatcagaagcatatatttgacacagccagcctacagtggaatgcagtctcatagaacaataaagctggtcagtctaagtaacat

SEQ ID NO: 46375 - DNA, 1372 bp, Homo sapiens
agcttgtagataaatctgttgcgtaatgtcttttatactgcttattaaacagattgtatgtgaaggaatttggattttgataactaggaaaaaaagtgctttagatttaatggcaattaaggcgagagattgcgtcaagaatttattaattattagcaatatggaattcttttatatgtgagaaatttcgggggcttctggtatttgtctttgctttatacaacttaggtcccacactagtgtgtgatacttgaaaggtctagccatcttgaagcttaaagaggaagcgttcaactgtgagaccatgtgtcctcccactccagtcaccatagtttatataatcttaagtagccagcaaaaattttgaagtaatattgactctgaaaatgtccttcctgcagcggagcgtgctttggacaccatgaattttgatgttataaagggcaagccagtacgcatcatgtggtctcagcgtgatccatcacttcgcaaaagtggagtaggcaacatattcattaaaaatctggacaaatccattgataataaagcactgtatgatacattttctgcttttggtaacatcctttcatgtaaggtaagccaaaaatgtccgatacacatgtttacattgttgagctacatttagtttagtgcttgaaataggaactgtgcagtaatggatatctttatttcacaaatatccaggttagatggctaacagattgtctctcaacactgaacaaatgttaaatcaatagcaaataaagaaaaatgggtatatgtttttccctaggtggtttgtgatgaaaatggttccaagggctatggatttgtacactttgagacgcaggaagcagctgaaagagctattgaaaaaatgaatggaatgctcctaaatgatcgcaaagtgtaagttataaatatctagctaatcatattttgaatcttatttttaataattccaaatccattcattttaagttaatatttgtcagggagaagttagatgcacataagataaaagaataaaaacattttaaagatgaataacaaaaattcatgtagttgtactggagtgaaaattaataagctaatcttgatttttacaattgaattttctacacagtaagtgtaacatacaaataacaggtttaatataattaacattcatgccaaaaggaaaacagaagataagtaaacagaaaaatgtagctttttcaaaatgagtgcattagtgaaaaatcaggaattcagacaaacctaatattcataattcttgaggtactggttaaattaacccattttataggtgaggaaactcaaagtaatttgcttttatgtactgtaaaatgagagacatacattactcaca

SEQ ID NO: 46376 - DNA, 1052 bp, Homo sapiens
aacttaggttactgatcagctcttcactgtgtaaagttgatactgattttggaagcagaatattgagtgacacagagccagaagttgtaaaactgcactgcaggtttcctgcccttttgctctgtaagcagtaactccaaatgtcacttcataacagttcttgtcaaccttaggcaggatgtatcaatgcatgtcagatgggggtagataactttggggcaggttatcacaacctaagagttggtggagaaaacatgggaatgaattctagagaccacaaaatgaaaacttgaaagtgttactctttctcagcttaacgtttttaaatccaaaaaacaatttttacatttcttgggattcgaagagttgaacttcaggttgccgtggttacagtgtacagtatatattatcagtctgtaccagtagaccagtaccctaactactgaaaagaatatggcagttttccatttgtctagtttctgtatgtacaatttactatccaattaattacttaagtggatttcttgttcttttttaaaaacttattgctacattgataggcagaatagcttctgaaagtgaccagttttcaatttcataggaagaggtgactcattgaaaaatagctcaagcaaagtcagctaaaaaaaaaaaaaaactagggaagctgagtaggtgtggtcaattgataatgagctaacagctgattatcactatattctagaaactggaactttcatttataaaaaaagaggtggccggaaaattcatcctgtcaataacttttaaatttacattggcatggaatttgtaggaattgtttcagggcttaaaagggaccgttttccctctcttcggggactagtctttttatttaaggatgtgttatttcatttagagcctttaatggtacaggtatacataattcaatcctttatagatcctgaaattaattgtagattttgaaattttctagcagtattcagaaataactaaatcagttgttaagaaaatcagcgatctaaagtgaaattgattgtatgtgtcaagag

SEQ ID NO: 46377 - DNA, 1031 bp, Homo sapiens
tttattttttttcttcctcttttataaaataacccggtgaagcagccgagaccgacccgcccgcccgcggccccgcagcagctccaagaaggaaccaagagaccgaggccttcccgctgcccggacccgacaccgccaccctcgctccccgccggcagccggcagccagcggcagtggatcgaccccgttctgcggccgttgagtagttttcaattccggttgatttttgtccctctgcgcttgctccccgctcccctccccccggctccggcccccagccccggcactcgctctcctcctctcacggaaaggtcgcggcctgtggccctgcgggcagccgtgccgagatgaaccccagtgcccccagctaccccatggcctcgctctacgtgggggacctccaccccgacgtgaccgaggcgatgctctacgagaagttcagcccggccgggcccatcctctccatccgggtctgcagggacatgatcacccgccgctccttgggctacgcgtatgtgaacttccagcagccggcggacggtgagcgccgggctccgcggtcggccgggcgggcgggcggccatgaggctcgggcggcggcggcgggcggggtaggccggcgggcccggggaggggggcgggagggcatgtcaccccgcgacggccggcgggaaggcgccggggtccctggagccgcgtttcccgagccggcggggacccgcgctgccggcagccacacgcccggctacttcctcctttgcgaccattttctcggcctcagacgctctcaaactttagggtgatgacgcgccgggagggtgggtgagattcggttcctccgcggcgctcccgccagtggccccgggattctggggcgttgaacgctgagctccttccgtgggtaagaggtggaggcgctcccaccacccggagctcctgccggcgccccagcctggggaggaagtgcagttctgtgctcgaaaaataccacgtgttgaaccctgtaacctcgcaggcccgaggcctgctt

SEQ ID NO: 46378 - DNA, 1052 bp, Homo sapiens
aaagttttatgaatggacttttcaactactttctctacagcttttcatgtaaattagtcttggttctgaaacttctctaaaggaaattgtacattttttgaaatttattccttattccctcttggcagctaatgggctcttaccaagtttaaacacaaaatttatcataacaaaaatactactaatataactactgtttccatgtcccatgatcccctctcttcctccccaccctgaaaaaaatgagttcctattttttctgggagagggggggattgattagaaaaaaatgtagtgtgttccatttaaaattttggcatatggcattttctaacttaggaagccacaatgttcttggcccatcatgacattgggtagcattaactgtaagttttgtgcttccaaatcactttttggtttttaagaatttcttgatactcttatagcctgccttcaattttgatcctttattctttctatttgtcaggtgcacaagattaccttcctgttttagccttctgtcttgtcaccaaccattcttacttggtggccatgtacttggaaaaaggccgcatgatctttctggctccactcagtgtctaaggcaccctgcttcctttgcttgcatcccacagactatttccctcatcctatttactgcagcaaatctctccttagttgatgagactgtgtttatctccctttaaaaccctacctatcctgaatggtctgtcattgtctgcctttaaaatccttcctctttcttcctcctctattctctaaataatgatggggctaagttatacccaaagctcactttacaaaatatttcctcagtactttgcagaaaacaccaaacaaaaatgccattttaaaaaaggtgtattttttcttttagaatgtaagctcctcaagagcagggacaatgttttctgtatgttctattgtgcctagtacactgtaaatgctcaataaatattgatgatgggaggcagtgagtcttgatgataagggtgagaaactgaaatcccaaacactgttttgttgcttgt

SEQ ID NO: 46379 - DNA, 1049 bp, Homo sapiens
aaaccagactcaccccaaagccacttatgtttataccatctcccatagttgaatgaataatacaatttgtgtaacaatgaaacttttgaaaatcctggtcatttgtttcttaaaaccattgtttttaagtggaaagactcacttgactattttaaatgcaagtgtcttccactgtttgaggcagatctccacagagcaaccataggtggtaaaaagcattgtattcaaaggacaaaacacttttgcagctaagagaactttgaatatgaaagtatgaatgtggtgtaagacagaggttgctatcctaaccaaaacgttcttctgatttccggccagtaattttattttatttttatttattttgagatggagtcttgctctgtcatccaggctgcagtgcagtggtgcaacctcggctcactgcagcctctatctctcgggctcaagcagttctcctgcctcagctgggattacaggcgcccgtcaccacgcctggctaatttttgtatttttagtagagacagggtttcaccatgttgacgaggctcacctcaagtgatcctgccaccctagcctcccagagtgctgggattactggcatgagccactgtgcccggcctcaggccagtatttttaaatatcggttaataattgcaggaaacatcatttcaggttgacttttctcacctttaacctctttatatagcacagtgcaatctggccctactgccacttcatctgggttatctgtagcttgagttgtaaaaaaaaaaaaaaaaaaaattgggggaagaagttgggttaaaactgttcacctacccagcattggaacataatgggtaaacaaaaagttggagttaccatttaaaagcatttttcaaatttatattttatatataagtaggtgctatataaactaatactttttttttgtaagaatggatttggaatttagctcagctgaaaattgacttcaccttgattctcagagtgtacttgaactttaaaggaagtggggtagtgagaatgggtggttggggtttttttgc

SEQ ID NO: 46380 - DNA, 1030 bp, Homo sapiens
gaaaccctgtctctactaaaaatacaaaaattagctgggtgtgatggcatgtgcctgcagtcccggctactcgggagactgaggcagaagaatcacttgaaccggggaggctgaggttgcagtgagccaagatcacaccactgaactccagcctgggcgacagagcgagacttcgttctaaatacggttgaaattgtgacacttagtgtatacttccttatattatggtgtgcccactccctcccctttttacttcagactttatttcagtcatgattgctttcattgtactattgtaggtgaacgaaatttaggaggtttatttctgtgttgagcaggatattctctgaagttattgcatattttgaaagtagctatcagccctttcctcccttccattctctacttggtgcacctccatgtttttttctgctttgttgtaactgctgcttcctttttcttttgttcttttattcatttttttctattcttcctacattgggttttatcttctggcttccaaatctggaaaacttggatttgttattcttcggtcagtttgacaaagcaacatacttaattgcctcttttatgttaccattaaattaattctgtgaactctgacttcccttagaattgaaaaagaccacgtgtacaaaaatccggttagatagtagaaataagttctagtattcaatagtacagtagggaaattatagttaacatttatttattctaccaaagtagctagaagaattgcagtgctcctaacacaaatagaagatcaatgtttgaggccaggtgcagtggctttacgcctgtattcccagcactttgggaggctgaggcaggtggatcacctgaagtcagaagttcaagaccagcctggccaacatggcgaaaccccattggtactaaagatacaaaagttagctgggtatggtggcacatgcctgtaatcccagctactcaggaggccaaggcaggagaaacgcttgaactcaggaggaggaggttgcagtgagccgac

SEQ ID NO: 46381 - DNA, 1047 bp, Homo sapiens
aaaacacaccccatggtgcaaaatacccattgaatcttttttaaggtatatgccttaagattatgattactttgtcaaaggttacaaactaaattattttgccaaagtgctttttaaataagctgcctctgtttatactgaataggttgcttcttcaaaggggaaaataggatcccagctctgtaacttgtaattttttttcgaatttattttcattagttggcttcttgtgttctagttggcaagcccaaatctcagcacatagcacggtggtttgagtgtatagtggcaggttggctattcttcaggactgaggtgaatgtacaaatacttaatgattgagttcttgttcataattttggggtttggtctaaggacccttagtttataaattctctgattactttttaagaaaaaaagtgatcttgaatttaaagaaatgtaagggatagtggtggggtgggaaattcattatgttagaggagatttcctggcattggaagggagattttgaaattaatgctgtagtgaaacacaagaagattaaggtgaggaggaggctggtcatagttttgtatttgaaatgcctgtcttgcctcttagttagtagaattagtaccataatctaggacccttgacttcttaacaagtttactctgccttgcaacctcacactctcttccagttctctctgcaggatttttcttaggttcttctttgttcattacatagaaacctggagcttatccatattaggaggtgcttagcctgcccctttgctgctgtttctgaatatatgtgtttagttcagcactcacatattttaaatgagcaatctcttaggttttcagagaagtagaacattgttgtgtctcttacagcagaatattcattattgaatgtagtgtcaacctgaatttctatcaggttttgtcttaactatttaggaatttggtaaggtaatacactcttgatgatgaagactttctgaaaaatagtttttaggatgttgagctattaaaatatcctccaagatagttttaaaat

SEQ ID NO: 46382 - DNA, 1074 bp, Homo sapiens
gacttttggattaatttctcaaatttttgattccaaaataagttactcttggcatatttatattgaatgtgtgtgtgagaatttttaagtcagaatgacaggtgttctgatatcaagtaagttttaaaagttagcatatagtttattgaaattctaataagtttcttagaattttttgtagaattcctggttccctattgtgatttcattctagttcccatagcttttgctttactcttgacagttccacatagagaataaacaccgctcaaggttttaggggacttagaactgctgtcagtttcaatatactcaaagccagcattccttttccttttgaaactgcctgttctttataactacccaattttagcatgttttctagacttaatcacacgacatgttggactcaactttgacttaattttcagattacaagctgttgatgtttcccatatcattggttccctatcctttacattcacgctgaattgtatagttcccaggattatactcagaaaagtgcacattgccaaataggaaaatgatactgtatggataaacttgatgtgcttttaatggacaaaagctaaattataaacatctttttactgctgcttgtggtcattcacttggacttgttactcttatttttcctttttcagttctatgttgcatgtatttcttattctaatctttctaaaatgctgatttcattccatctatttgcttgatccttgccagaattccctgcaagaggcttttagctttagtttggtcgtctcactatccctgatacaaactgttgctaattaccatctttatggcctgagggtttctgcttcattactcgatttaggacttattttaatcttgattatctgtctttcagcatcagaagattggctctgttcttttctccttgaaaacatttgtgtatttgtaaagtacactgaaggagtatatgctttgatatttagatggcacaaatgtaaattttggtgtgggaagaacggtcgtatcagcagttctctcttttttattatgtgtatttctatgtaaccgatcattcac

SEQ ID NO: 46383 - DNA, 1016 bp, Homo sapiens
gcattagtgataaccagattttttatattgagcacctattttataatagctatgaaaataaactttcttcctacaaaaagcagctaatctccaaagttctgagtttttctgaagagctctttagtaacccattctggttatatgtatttatctattgtttaaccatttaataagcaaagagcttggaccatgttgcatattacaagagtaaatagagcattatggcgggaagtggtcactggcatgctcttcacaatgtggactttgcattatgtaaaagaacttgggtttcttctcttccacgtgttaatttcaaactgcaatatgtgaactaatgcaatctgcctttcctgccagatgcttagacaaaagctctcttggtagttggggagggactcaacactagtacctctttaaacctgaaagatggcagccaaaaattgggtagtttttatcttgcacatgatgaaatgaataccaaggaaatacagtctaggaagcctctttcaaactcaaagaagtatgtcgaggtgaataatggagctcaagatactgagtcaaactagttttaccatttaatagatgcatggcctgaggaaatcactcagtccctctgagaaaactaagctcaattaaataggaataatactcatcccacagggttgtggggaatgagagtcaggtaaagcaccttgactaccttctgtgtcctgtttatcttagcttttcagttctatttaaaagtgtgagcctgcctataatagtgcaggggtctcttaacttacagtccatgaatggaatttcgaagattgaagaagcctttaaaattgtgtatttttgtggggcagaaggtccatgccaaccatcaaattttcaaaggtttcattttaaaatttaaaatccactgctgtaggcagagaatgactttatataggaggtctccgagaggaagcagtgtaaaattgtgtgtctaacatttataacagttggcaactgcagttgagtaatcttaatag

SEQ ID NO: 46384 - DNA, 1377 bp, Homo sapiens
tgagcaaggagctgaattatccaatgaggagaggaatcttctctcagttgcttataaaaatgttgtaggagcccgtaggtcatcttggagggtcgtctcaagtattgaacaaaagacggaaggtgctgagaaaaaacagcagatggctcgagaatacagagagaaaattgagacggagctaagagatatctgcaatgatgtactggtgagaatcaattcagtctggcttcattatactgtagggtccctatgagtatcagttacattactcttaactttttgtttggtttttcttttccttctaaacattgtgtgttccaaatttaaaagtcttcatggtgtcatgactaaaaagatgttaagacaattatagatacgtgtatgtaaaataattgcaacaatgattatgaaacagttcagttttgttaaaaataacagactttagtattgtattttatattaattgaaaatataaactaattgtgttactgttttacttatggttagaatatttgtagtagctctatagctggttatcttaaatgtacatctgtggataaaggaattttacatactttaggtaagagagatgtaataggatactcattgtagaaatagtactcttctcaggattagccgctataatgttaatgtaatgagtcaaccatgcagaaaactctggcgtcacaactatgaaacctcttcctgcattgaattcttgaaggtaaattttgaacactcacaaccatgatgaaaggttatgaacaactcaagcttgattttccagtttgaatcgagtattttaagtattcagtacttactgtgttgaagcactgcgcttaaaagaattaaactacattttggttaattttaatctgtcatataaagtagggctttttgatcaagaatagtttaaatttgaggataaaccagtagagaatccaaccaagctggcagtttttggaataatatttaaagtggttttactaaatggttacacttaaccagtatggaagggctctgatatacaaagaggggcagcatctcgatttttctggacagattactgaatctggaactcagtatggaaatccaggtttgttacttactatatgaaccttgtttatggaagaagtgctataatgagcaataggataatgtctgatgtggttgtgggtttggggtttttgttaaagttgtgatgatactatcatttctttacatttgtatttactaatggaatagcatcagttcctaaactgtaattttctcaaatgatacttacttgacactgtctttttaaagaatagtgattttttaaacatgcttatttgggttcacagccacaaactcaatgaggcatctgtcttggggcat

SEQ ID NO: 46385 - DNA, 1051 bp, Homo sapiens
aaccgaaataaaagagccatagacaattccatcttttaggtccacatggcagatctcaagtcaagcattcattttctacctgtgtggaactttaattagtttaagtgggaggtctgtgccaagaaacaggcaccacatcacagttggaatctgcagagcagattgttttctcttaataatgctctttcaaactcaatcccgcttgcagttttgataccaaaaacatgtgtgttaaacagctacgagtcgtttccgggtcattcgcattaaccatgagctctcctgacagtcttgacccataacagcagacctctgtgtttgaagtgctgtataatttacaaaggactgcacacacatcgtcacatgtcagctgcacacttagcctgctaggaaataatatcgcccccattttggtgatgaaaaaattgagtcgtggaatggttaagtgacagaatgaactgaaactggatccagtctgtctgtgttgctaatgtaagatgttaaagaactgtctatggttaaaagagaatgagtatctatttttaacaatgtgctaaatgttcttttcttctttccatggtccaagattgtcctaaactttgatttgatataattattttccacaatcctctaagtcaggctttgaaattcttctctgcctctgggtcttagtttgctttgaggtaaggatggccagtgtggatctttcttatataatctctaggtcttatattttagtttcctacctgaaaatttgtgatgccacttttaatctacgacggtaaaggaaaacaatttctcttatatgctatttaagagttaggtatttaagattaaaggaactatgtataaatatcacttatccagaagtcttctgaatatttcatttctcatggaaatgctggatgtttttaagcaacattatccattataaaacaattcaaaaagggggaagaaaatcctacaaagataacaaaaactgtgaggttttttttgtatgaagtagccaattttcacaaaaagtgctgttagcggtttataacactgctag

SEQ ID NO: 46386 - DNA, 1030 bp, Homo sapiens
gtgtacaatactttattaaaatagcaaatgagagagaaccagagttgcagaccgtatagtatataggaccaggcaatacttgaccaatgatgttttgcatgttactgcattacctttgtttgaatactagcactttttcctgaatttggtaggttaacccttgtatatttccttgatttctagtggagcaggaatattttaactgcatttgttagccagatacagttactattttgtgaattgtccattgcccatttatttgttggggccttctgactatattcaatctgctatccacagtaaacttggaacaactgagagttgccaggaaacaccagataactagagttatgaaacctgtaacttattttacacagagaacaaaattgtaggctctgtctgaaccacttgctggaagccttaactatcagataaagtataaatccacagtttgcatttaaggcatattttttattcaagactattgaaatatgttttttattgttacctgactactatgaagaaatagtatttttattagattaagtcagtttagtaagttacagtaacaaaataacctttcatgtttgggatctgtcttttattaggttctattatttaatatttatgtatgcggattttcatagtaacaaaatagactgtatttaagccttgctttgaatagccaggaacatttctgatagcaacagagtttcttacttaaataggatagaaaatggccaaacataagaatttaaagctgtagtcgaatgacccagtgagaaaaatggaaaacacctaagttcaaatctggctctgctttttcctttctcattttggacaggttacttcacctttctgagttgcattatctttagtcaccttataaaatgcaggaactggccaggtgtggtggcacatacctgtaatcccagcactttgggaggccgaggcgggtggatcacgaggtcaggagttcaagaccagcctggccaagatggtgaaacccagtctctactaaaaatacaaa

SEQ ID NO: 46387 - DNA, 1052 bp, Homo sapiens
agggattctagttaaaacagaaattgatccctggaagaaaaaaaaagtacatggaaataatcggtatttatgtgagtatcgggctcagcaagaaacagttggcaattcaagttagggtaattcaaaagaagtttggcaacaggacaatttagaaagttatggacaggaaaccataggaaatagtgtagtacatggggctaccaattaattacagggctgttaccacccctgcttaactcctcccttaagcttgagggagcagttaaaccagagggagagaattatgaataagatgtgatcttcatttagagcgagacagcaagcctaaggcaacttcgctgagaaggagccagaaaataaatactctcaccttgttcctcttgcctcctatctccttcagtggctccccattagccaaaaccaactaggagcaagagggcaagggagcttgatgccgtccttacagatcagcctccaggcgtagggtggaaaatggatctggacgacatatagaagatgtgtcacaaagagtgttggaaattattggtactttcctcaaagaattacaagaaagagatgagctcaggaaagaattagtgagtttgtaagaaaaaccaaaaggaaatcagactcaaaaaattaagtaccttgcaggctgaaaaagcaggctgattgtaaacccccaaaataagagttgggattgagaaaaattcttttttttttttgagacagagtctcactccgttgccaggctggagtgcagtggcgcgatctcggctcactgcaacctccacctcccggattcaagcaattctcctgcctcagcctcccgagtagctgggactacaggcgttcgccaccatgcccagtgaatttttgtatttttagtacagatggggtttcaccatgttggtcaggatggtctctatctcttgacctcatgatccgcccaactcggcctcctaaagtgctgggataacaggcgtgagccaccgtgcccaactgagaaaaaatcttgagataagaattcatcaagacaatcttggcaaagg

SEQ ID NO: 46388 - DNA, 1035 bp, Homo sapiens
aaaaaaaaaaaccaaacaaccaaactgtgaaaattgggtgttctctgtagctaacatttatacaagaagctgcacacagaaaagagactagaaagtaataatggttccatgagggagatgggattatgaatttattcatataaatatttgagtctgctttgctgttttggaaagtgccccagactgagtttatgttttcttcttctgatttcatatatttggtattgttcttctaaatattagttgatataccaaggactgtgggacaaaaaataagaaatcgtacatttaggactcactgtatgtcaagcacattggcaggtatatttcataaactgaccttgtaaatgttttggttaaatttgttttgagattttattataaaatgttaatacttaaaaaatgttagaacttataactttatgaatgtctaaacatcttatgaagtatcttaacattaatagagtgaatataattttttaaagcttttagatactctactaggtacactagtgaaagaactccaaaacaaatatacacctggacgtagagaagaagctattgctgtgacaatgaggtttctacgttcagtggcaagagtttttgttattctgagtgtggaaatggcttcatccaaaaagaaaaagtaaggcatcctttttgattttggtttagataccattttcactctgtttttgtgatagtgatttatgtatatgaaaagatagattgctgatatttctctttttgttctagcaactttattccacagccaattggaaaatgcaagcgtgtattccaagcattgctaccttacgctgtggaagaattgtgcaacgtagcagagtcactgattgttcctgtcagaatggggattgctcgtccaactgcaccatttaccctggctagtactagcatagatgccatgcagggcagtgaagaattattttcagtggaaccactaccaccacgaccatcatctgatcagtctagcaggtaaattgctaccaggtaacagattctgattaatccttc

SEQ ID NO: 46389 - DNA, 1141 bp, Homo sapiens
aatatgggagcatattcaccctccattagattggaggtgagaagtactttttagaactgcatctaaaatagactgaatccaggtgcttatgagcactatctgtaagcttttatttagacacccagactcattcttagcttagctttgcttgtaacctactgcactagtggtttcaaactaaaggaggtgatgatacagaggtagctgtggtctgaacttgatgtctagaaatagccttcatatcattttagaattcttgatgggttaccaatattgaaaaatcacaggatttacatttaaaatccagattttaattttagaagatctggtgaaattgggcctcgtaatctacatcccaaaaacattagactggtctttacaattcattgcagttctcactacttagagtttgttgctccaagtgctagtgatgccatttagtatacagcttctgttatctcttttacacacagcctccttcattcatttatattacttcaagtgtaggcatttgattctgtgacctcttcactttgtcaggatctgacaggtagagtcatcatcccgcaggtagggatgaagtgtgtcatgattagtctttatacctacctcagtgactagggcctaccacacagtagacccacaagaaattttttattgaactcactctgccttttgctataagaataactgacagatgtaacatacaatgatgcagagtaaacttttctgcttgtaacacaactaagtagtattgatactctcagtgtgagagcccatctactatagtctggcaggttggagataagagtttcctgtagagtagtagctgcttctaactaaataatttgctgttacttgaaaccagtgtatatgacagcaccgtacaacagaatatcttgattttagttgccctttgaaagtactctgttctttgttcttcagggagactttgacattttctctcaacacatattttgtataaatttccctatgttttggaaagtttagtattaagctcctcatgaactggagcttgctgttgatgaggtgacttcagagccatagttagttccacaatcaaagtggcctgtctcacgtgtagtggatagtgaaaatagttgtttaggtgtgttttctt

SEQ ID NO: 46390 - DNA, 1033 bp, Homo sapiens
tgtgcaatttacaatgccttcttctgtaatacctcctgaaggacctgccttaggctgttttagttaactttaaaaaaaatagatagaagaagtacattctaaagtaaccaaagaaagtatagtaaatactttagaaatcagtgacctagttttatcattatcgaatattatactgtacataaattgtatgtactgtacttctatatgattggcagtacagtaggtttgtttatgccagcactgccacaaacagtatgatttaacaacagctacgatgtcactaggcaataggaacttttcagctccattataatcttatagtaccacagtcatatatgtggtccatcattgaccgtaatgtttttatgcagcacatgactgtactaggtatctttttaaggtagaactaatagatttgctaatggctaaatgtagggtatcaaatagacgaagcaagagggttaatggttttggaagaatgaagttgtcatttaccgagttgaagactatagaagtgaagaagattcaagggtttggttttagacgtgaagtttaagatgtctcttctgatagaggaagtgaatgtgaagacattttaatagatgtctcttctgatagaagaagtgaaggtgaaggttcaggaatttggttttagacaggtgaaatttaagttgtctattagaagattatctgacagattcctggaccaagaggagatggcaagtagaaagttagatgtgtaagtctgactaagagagaaaggctcaagctggagaaatttacttgggagttgtttatttagaggaattatattgaacaagatcatggaggtggtgaggagaaaaggtccaaggactaagtcctgagaatagtctcaacatttaaatgttagggtgataaagaggaacgagcataagagatcgagaaggaacatccacagggttggaggaaagctagaatgagttgtgtcctggaagtcaaatgaagagcacatgtcaagcaggatgttgggaccaactgtgtcaagtgatgt

SEQ ID NO: 46391 - DNA, 2143 bp, Homo sapiens
aaagtcagcaccttcgtcacattagcttcatttcaagtgctcagtagccacttatggctaatggctgccgtattggacaccgccaatatagaacgttgccattttcaagaaagttctgtcagaccgaaggctgctttaatttaattaggagatgggaggatttcacgggctatatacttaagtttttcagttgattactgaaaacattcactgactgtaatcactggctgtgtgggtcagttttctctagcaaatgagccttgaatatagatgtcagtagcaaagctcagagtctgtctgggttgattttataacttggtgatcattgaagaaacatacaaagaattggattcctttaacattaaattagttcagtgaatagaatttgtatgttgattttatataagctattgctaatgttcattgaatttgcctatacttccaggtgctaaaagtagatggtgcctatgttgctgtaaaatttccaggaacctccagtaatactaactgtcagaacagctctggtccagatgctgacccttcttctctcctgcaggattgtaggttacttagaattgatgaattgcaggtaagtgtaaagaagttattcagcaagtgaatattggaactgactccgtgagtttattatggagtttgaaagcaaaattccttttgtgtcatgcaggttgtcaaaactggtggaacaccgaaggttcccgactgtttccaaaggactcctaaaaagctttgtatacctgaaaaaacagaaatattagcagtgaatgtagattccaaaggtaaattttgaaacttcttcagctggcatatcctatattccattaatacttgttcaggaaatgggaatatgataaaataattcagggcattggcatttttttgttccctatctgtaacattatggaatggcatgtatctgtttgaattgacttacaagtgtggccagagaagttaaaatattgtagatgtttattagagataagatgtataacaatttttcttctcatttatgtgcttctgaaggtgttcatgctgttctgaagactggaaattgggtacgatactgtatctttgatcttgctacaggaaaagcagaacaggaaaataattttcctacaagcagcattgctttccttggtcagaatgagaggaatgtagccattttcactgctggacaggtagaggctcatttttgcttttgaaaagtgataggacaacaatggcatttttgtgaggttagggggtctggctctggttagcttatcaattattcaaaaacctagaatatttagcacatttgaatactaggtttcttattactattactaaaatctaatttggaaataaatatgcctgtaaaaatcagatacattttttgattaggagtcaaactttaccattttcccattattataggaatctcccattattcttcgagatggaaatggtaccatctacccaatggccaaagattgcatgggaggaataagggatcccgattggctggatcttccacctattagtagtcttggaatgggtgtgcattctttaataaatcttcctgccaattcaacaatcaaaaagaaagctgctgttatcatcatggctgtagaggtaatttgagtattgaaactactgggcattttaattcacaaaacaccactaaatagtcttgaatagatcttgcaacaatcttaaatagatcattcattgcccctttcttccctaaaagagctaatggtctattaaaactacatagacaagtacatcagtgattatcgtgtaatttaagtgtttgagcaaggcatgcataatgttgtaggagcacaaaggggagagatataaatcatactgtgactgtaccaaagacttctttaagaagcgatacccggacagatcagataggccccttagacacagggatggagttgggaggtattatcccaggcaccaagagcaacctttgtgaatcttattaataagttgggagaaagtacttttttttgatatgaccagaattctggtagggatcctgtgggtcagtgagtagcaactgaaaaggctggagaggggcactagggtgtttgtgtgttcacctaacgctacctaaacttcagcctgaaag

SEQ ID NO: 46392 - DNA, 1024 bp, Homo sapiens
ttggttttttttttttgcataaccttctttgaatagaaagatggtatttacagtgttgactatttctgttgtttttcagaattagagttttaaaaagatatgtgaaattcatgatagtaatagaaggaaataattgccactagctagtctatctactcacttttgttgagactcttattattgtaaattgattatgtcttggtcacaacttttgctcaaaatttgtaaatttataaacctagacttactgccacaccatggatagaattttttcaaaaattccttaaaataaattttatggtgttaattgctttgcaatttaggaaattaaaagttagactttaatagttatgtgatagttttcttaaaactatctggcagatcttcctttttaaactctggttagatactataattttgggagtacaaaatacattttacgctatttctttgtacttgtttatactggtgttaatacaattaaacattaatggttacagttgttcttcactgtgaatttatttgaagtacagattgatcagaaaactccaattcataaagcagtagcttaggaaattgttgagaaacttcacttatgtatccctttaaagatagtctttcttataaatttagatgaaatctataaagtctcttttacattttctttttggtacttaccattttgttgttgtctaagaacgacgacggtcaacccctgcaccaaaagaagaggaaaaggtgaatgaagagcagtggtctcttcgggaagtggtttttgtggaagatgtcaagaatgttcctgttggcaaggtttgttcaagatatctaaaacttaattactaacagaattataatgatattggttatccagggatttgtggttgatatctgagtcctttcttcagggctgttttatttatcatcttcagtggtatctttagttgcacccctgcatctgatgcagatctgtcttctcagtcgctgacagatgaagagattatgcctctctttgagcatttgtgat

SEQ ID NO: 46393 - DNA, 1053 bp, Homo sapiens
caccatcttcttttgtttcttacatttaattataagccacaaaaaatcatgatcttcgtgtgtacctctggtcatctaccacatagtaagattgggatattggataaataaaagatatctccagaaaaaatgttcctatctaagatggagatactgttggtatgtttaacagtgctgtcttgaaggccattggttttcggagcatgacctgaggttagtcccctgacagagttttttttttttttttctctgtaagttatttactcctaaacccagttaaacttcagacactaatgtctacatattcttttttaatttaaaagaaaaattattcatggaaccttctggctagcaggaaacagtagtcttctgggataaagaaacatctataaagttatggagcctatcatgaattaagggaaaaagttatttcagattgtaggaaacagacaagaagtgtaattttttttttcacattttactttttaaattataatgccttttagtttcttctctgctgtttctgctctgttttttgtttgtttgtttgtttgtttgtttgtagcagaatggatgggatatttgctgcatgaaaatttaaagttaatgctaaatttttagcaaacatgttgaaattattccttttccttaatattagaaacaaattttcttttctttttcttttttttgagatggagtctcactctgttgcccaggctggagtgcagtggcatgatcttggctcactgcaacctccgcctcccaggtttaagcaattctctgcctcagcctcccaagcagctgggataacaggcgcatgccaccatgcccagctaatttttgtatttttaatagagacggaggtttcaccatcttggccaggctggtcttgaactcctgactcatgatccacctgccttggcctcccaaagtgctgggataacaggcgtgagccaccacgcctggcctagaaacaaattttcttaatgaagacctttaaggtggtgctttttcagccttattgattgggtaagattatactgggaaacctag

SEQ ID NO: 46394 - DNA, 1095 bp, Homo sapiens
gatcataatgtgatcagtgctaggctgaaagtatgagtaaagtgctataggggttctgagtggtaaatgaccaataccacctgagagatctggcaaaggcatcgcagaggagatagcatttaagcagcatttttaaggtgaggtgggcattgaccaaggcacaaaggtattccaaacgtatctgggcatgggcccagagtcacaaaaggtcatgatgtgtttgaggaaccatgaaaaattcagaattgctgctttgtggtggggagtaggagaagagatgggatggagatgactagacagtttgccaagcaagaagttaggatattgttttgcagcaattaagaagtcaacagagtccgtagagaagtgacttgatgtgattggtggggttttgctttgttgtatttgatttgttttaaggaggtgaacattactggcatgatgggagaaagcaacaggaaaaatcaaaagtcggttatgagaatgctacagttgttcaaggaaattgtgaggatctcaaccaaagcaggggtatggggagagagaaagagaagaatctgagaggaatttgagatcagtttagacatgggaacctgggagcacgcctcatctcttccttttctctcatcagtcaattcgattgtcgtgtctcccattaccaggtgggtggtgatgtcattcatagagataggaactacagggaaggcacagctttgcaggagatggcggattcattttagggatgtcattgtgctttttaagacagctgtaggtaagtctggagatatgagatttacacatttaaaagcatgatgctctggtagatgaagtcactgaggctgaaggtgaagcacaatttgaatacagggagaaacacagaatcagtggcagggagtgcatggtagtaccagggagatggagggaagaccatgcatggtagtgccagggagatggaaggtaggtggaagaccagtagagaatggtgacctatgaattagggagagaaggatgggttccagaacagataatgaacagaggcaaatcatttgaagagtttaaagagaagatggactgattacgtacattgagcattga

SEQ ID NO: 46395 - DNA, 1147 bp, Homo sapiens
tactgcataaacatgaattggtagtgtgcatcagcaagtacagaagctcgtcaaaaggatgacaacagcttttctaggtttattttttcattttactgaggaaactatttaaacagttttttatttagccagagattgggctttccagtcaagtgagaggagaaaccatggaaatttgatgtatattgatttgagaatcattattggttaatgtattccaaactttttaaggggggaaatggtttggaaaatcaaattgaaatgaaatctgtttgcattgggagtttgaaggtttcagccttaggcgagtacggtaggaactgagagtaaaatacctctctctaggtcatatgatctccaattattagattcattttgaagagaaaagacactgccctaatttaaaaagctgaagtgacttgtgtgaccattttctttaagatgtgattaagtacagaaggcaatcatggttatctagatgacttgatttaatcttcttgatgttcatgtttggacagtaagagaagatgtagatgtcatgccctttctaagttgttttctcataagaaaaaattaacttatttaaatagcagctttctcttggacaaggtggttgatagtgctgaatattaatgcagtactatctcagcaaatgaatgtttatttcatgtgaagcactttgaattctaaactctgaattttactttttgtgtaacagtgttggtagttaagtctgataggtctttcatgcaaaggcaagatgtgttcattttatttcatttaattaattaatttatttatttttgagacagagtctcgctctgttgcccaggctggagtgcagtggcgcgatctcggctcgctgctacctctgcctcctgggtcctggttcaagcagttcttcctcaacctcccgagtagctgggattacaggcacgtgcaccatgcccagctaatttttgtatttttaatagagacagggtttctctatgttggccaggctagtcttgaactcctgacctcgtgatccacctgccttggcctctcaaagtgctgggattacaaggcatgagccaccatgcctgaccaatgtgttcattttatagttgtgattagaaatacataggtggctttaaaaaattatttt

SEQ ID NO: 46396 - DNA, 1736 bp, Homo sapiens
tcggcctcccaaagtgctgggattacaggcctgagccactgcacccggcccattatttatttatttatctatctaatttgagacagagtctccctctgtcacccaggctggagtgcagtggcatgatctcagctcactgcaacctctgcttctgggttcaagtgattctcgtgcctcagacttctgagtagctgtaattacaggcgcccaccaccacgcttgactaagttttgtatttttagtagagacagggtttcaccatgttggccaggctggccttgaactcctgacctcaagtgatctccttgccttagcctcccaaagtgctaggattacaggtgtcagccaccgcgcctggccttattttttattctatttatttctttttctcttatgttatttacatcattatagtctcatggatatttgttttattctccagtttataacccatttctcttattatgttgctcaaattgtcttaggcttaaatcctcttaaaacttggaaataaccaattataatagaatgtatgacagaatgactaaagtaggatggtagaattttgtgactttgttaataaaaatatacaacaaatataataatgtttgaataaaacctctgtagacctactctgaagaagattagggctaattttaagactttaaaatgcagacagaatccttagttttctgagtccccttacccatttcttacactccccgtaaacccctctttgtgcctctgttctctctgccagaacagactgtgtaagcgttctttaagcattaggtccatgattgcaatactgtaaaatgtcatagtgcctcctgaccaacttgatgccagtgatttgtttacttatatttgagtttgcagatgtttacaaagtataagcagttaaattctgattgtttctcttgggctgtatgaaaaatctttgcagtttgttgaaggtgaaattgtgattaagttattttgtaaatcaaattttttttttacagtcacacatattttcctttatagtaaatgtgtttccttgatttgtacattgctctttttttttttttttcaatttctgtgttaattacaattaactttagagaagcttgcaatttataacatgtattggggaatctaggacaggcaaatcttgtgtcctcaaaggggagtctttaaaccacagatttaccaaatacaatgcaatatgaaagagactgtccccagagaccttggtcctcactcctgtcctgcagagtctaggcctgctcacttttgctgctgggagttgtcctggatcaggaagtgaatagtctctttgagagccacatttttaaagagtttgggattattggtacagttttttagcatggattttttttttttttttttttttttgagagacaggatctccctctgttgcccaggctggattgcagtcatgtgatcttgacccactgcagccttgacttcgcagcctcaagtgttcctcccacctcagcctcccaaatagctaggactacaggcatgccccaccacaccctgctaatttttgtatttttggtagagcagggttttgccatgttgcccaggctggtctttaactcctgaccttgaacagtctgcctgccccaacttcccaaagtgctgaggtaacaggcatgagccactatgcccggccagcatggataattgagaattgatcatttattttgactgattatttttaggaatac

SEQ ID NO: 46397 - DNA, 1038 bp, Homo sapiens
tttataccttgattcttgaatggccagattttctgaaaatacccagttaatgattagattatgctacttcagtcaccacgtgtttgaaggctgatcacagaaaactagaagcaatgtaactagtttcaaaatataattaaatggaggaggaagtgtttggcttttttccctccagaccacaaattggtaggtaaagtaaaagttagatttgaaaattgggcctgggtgtggtggcttacacctctcagcacgttgggaggccaaggtgagtggatctgttgagtcccagagtttaagaccagcctgggcaacatggcaaaatgccatttttactaaaaatacaaaaatgtagctgaatgtggtggcgcatgcctgtagtcctagctacccaggaggctgaggtgggaggatcatctaagcccaggaagttgaggctgcagtgagccatgataatgccactgtatgccatcctgggcaatggaaatgagagacccccgtctcaaaaaaaaaaaaaaaaaagaaaagaaaagggttgtgggggggataccaaaatgattactttctttgcgtttgtgttttcatgctgaactaaatttattttagaatgtgaggaaagtttttagttgagtacatcctttagctatactaaatatagctcttgtctttattaaaatgttatatgtgctcttttaatggtcctaggcacacagtatatgataaagaattctgaaaatagcatgtaataacatgaaattttatttcatgtgataaaactgaaaaatttttgattatatttaagaataagtattaccggttatactgttgccaaatagtacctttcttaaagatgaacatttttttgtttagtttaaggatcagtaaagtatagcctgcatgccaaatccagccaccccagtttttattgaaagacagccatacttattatctgtggctgtctttgtactataacagcagagatgagtagttgggacagactagcctccaaagcataaactatttatgatttggccctttaca

SEQ ID NO: 46398 - DNA, 1040 bp, Homo sapiens
gttatcaacagatgtaacccacataaacaaaagatttttggggtcttcagtagtttttaagagtataaggtggtcttgagatttaacaagtttgagaatcaaaccttgtaagaggtgaagaaaggaagctgctgaggcaactgtgttaaataatattatatgcattttctaccacaaccaaaggttctgatttactttcagagaaaaccctcctaggctgggcatgatggctgacaccagtaataccaggtctttggcagcccaaggcagacgggatcatttgaagccaggagtttgagaccagcctgtgcaacacagcaagacacctcccccctaccctcacccaccccactcgtctctacaaaaaataaaaattagcctggtgtggtgacatgtgcttgtaatcccacctactcaggaggtgaggcaggaggatctcttgaacccaggagtttgaggctgcagtgagctatgcttacaccactgcaccaccactctgtctgggtgacagagcaggactgtgccccttgggaaaaaaaaaaagaaaacagaaaaccctcctataaagagctagaaagaaatgaacatatatggtctttgctttcttgaagcctaaattcttttgttcctggtaacatttttagttcctgtttggccatcacaacagtcttactcattggttcctcattgttaaactcttaagtttcctgtggtcaactgtgagatgaaaaaaattaaggacaaaatggggagttttaaatatagctaattttgtgtttatttattgcaagattatggccttactggcattttttgatgtgaaaatgtagtgatttttttttctgtgtgtgttgtcaaaataattatattacatctctcattttcctaccttcaccatgaaatcccaaagttggagtaccgaagatcagggttaaattcagatacaagcattaaaaaatggatttttaaaaatgtgtctgaaaattgagtgtctaattcaactttcaggcatataatgagcaagtttttcatacacagat

SEQ ID NO: 46399 - DNA, 1033 bp, Homo sapiens
gatcacaccattgcactccagcttgggccacagagggatactaaaaagaatatccataatttgagaagcatttaaaaggtatataagtaggaggttattttggttggcatttgtggctgttttagtaagaagaatgaattattactcattttccccccaatgtcgatttagtattggtcactttaatggcactgtgcatttagagtatggcagttctcggagtgtggtctgtggacctccaagagtcttacaggggctctgaggtcaaaactgtctttataataaaacggaggctttttcaccattttgacatctgtgctgtggtttaaaagcagtggtgggtaaaatactggctttttggcagaaatcaaagcagtggcaccaaactgtacaactaattgtcattgtattctttgcttttcttgtacttgtaggggaaaaagccagtttcacttcaaagtgtccttgatgaaacagtaggagttattaactgtattaaatctatacctttgagcataagatcgttttaaaacaagcccctttcttcatggaaaccatttttatttgagactgactgacaaataatggttattcagacttggatatttaacagacattttcttgaaaatgaacaagtaagcctgttaatttacagaaaacaatgaaggtatttgtttctggtgataaatttgaactttcaagcaaattttagaattttgggaaacttgtacccattactgtgagtttgacactgtagattgatagtaacattagcaaatgtgatttttgagtatctgtgtcagtcaataaatcagtgttttccaaatgaccagtgtatcctggtccagatgacaaaatcatacttgagttattcaaagttcattaataggtttcagatttccacattgctctcaacctttaagaaatcacttgctgagttttggtataatatcaaagaataatacctgtggttatctggaaaggatattaaaatgtacctcacttttccgtaacttttctatctagggccagc

SEQ ID NO: 46400 - DNA, 1036 bp, Homo sapiens
aaactgataactaaggggaatagttagaagttcacattaaaaaagtttatatccctttatgaagttacaatatttatttagaaacttcattttcttctttgaatgcatcttgaaggtgaatgttcttatttagggtaacatgaatgcattatatataaactggcatttatcatcttcataagcattaataaaagtgtaagtcctccttacaaactatgattcaagaagccaacagatgaaacttacctcacaaaaaccatcttttgttttgtctttctgtgttttgttttgtcttttgtgtaatttggggtcatttaacccaagagtaaagtcagtcagatgtttgctacttggcacagatttatttgggtaggcagtaagtgagaaaagtgagaccactgatttagaaattgttgatgcaaatttaaataaaatgtggttaaggcttgtgactgagcattggttaacagggatcaatgtgcaagctgaaatctgaagtataagactgtgatcagattgcttttcaccaaagaaataaacttgtagcaattctttaattcttatatgtcaaacccggaggcctatagttgctaagctctgtgtccaggctggagtgcagtggggcgatcatagctcacttttacctcaaactcctggactcaagagatccttctgcctcagcctcctgagttgatgagattacaggcatgagccatcataaccagctgctacaccattttataatctgaacagattcaggggctgggtgcagtggctcacacctgtaatcccagcactttgggaggccgaggcagacagatcatgaggtcaggagttggagaccagcctagccaacaaggcgaaaccctgtctctactaaaaatacaagaattagtcaggcatggtcgtaggtgcctgtaattccagctactcaggaggctgaggcaggagaatcgcttgaaccagggacgcagaggttgcagtgagccgagatcgtgccattgcactccagcctgggcgacagagcgagactccg

SEQ ID NO: 46401 - DNA, 1043 bp, Homo sapiens
gcctcagcctcccaaagtgctgggattacaggcgtgagccaccacgcctggccagtattgtacattttttaacgatatgattttaggcacagtggattattatgctctttaaaaaatcctttcagttgattaaacaataaggaaattgggaaaccatttttagacgaagagaaaagacaggaaaagcagtttgtcactgttgagctgtgccttttggaggaggtttctatgttctagatacactctcttgggttctagggtagagatgactaagacttgctctacttcaggaaccttagctctcaaaccagtgtcctctggttccccaagatcttactagcgagtgttccatgttcagcttcaacttgggaagcataagattaagcataaacaggccttttcattgtagggcttattggaggcttaatggaggtgtatgaattgtgaatttctaagagggggctgtcctaagcaacagtctccaaacttgaaatagtatgcttacttactgcctccctaaacagacccctacttttgtgaatattttaatccttgtgtgtatttatggtgttttagagtgagtagtgagttccaaacctagttgagccatcagaattactgtggatgcatagacatttttttaaaaaaattttaagttggtaatatgttcatgtggtctaaaaataaaaagttgtgcccgtaatcccagcactttgggaagcctaggcgggcagatcacgaggtcaggagttcgagaccagcctggccaacatagtgaaaccctgtctctactaaaaatacaaaaaaattagccaggtgtggtagcgggcgcctgtaatcctagctacttgggaggctgaggcaggagaattgcttgaacctgggaggtggaattgcagtgagctgagattgcaccactgcactccagcctgggcaacattgcgagactccgtctcaaaaaataaaaataaataaataaataattgtaaattggcatacagtgaaaagcctccctccctcttctgtttcctggccttctactt

SEQ ID NO: 46402 - DNA, 1050 bp, Homo sapiens
attgtagctatgatgatggcgaccgcgttttacaaacatttgtgttctcctaacatagtgattaattactaggacaggtttgagatggtggcagttacaaagagcatctggctggagatgagtttagtgttcgcatatacccctactcactcctccaccatcttcccctttcagaaaccgagagaggaggtagctgatgataccaataaacttgttatgctttgagatgtatctctgtaactagcaagtgatttccaggcatttttaaaaaaaaaaaaaagcacggcaaaaaaggcagcagtattggggaagataattagggactggaaggtaggcagctcttcttcatagtctttcccaagattagctctcttactgtcatatccatgcactatctaaaaggccaagttgtcccccaccgctacccctaacccccctgtatctactgggagaagatgagagtgggcgttgagatggggtgagatgttacttggtcagtaatattagtctgtaaactaaaatattaggctgtaaactaagtcagtaaactaaaatattagtctggaaccgcttgttgagtctgttgagtcagcgtacattgagttattaggttggtgcaaaagtaattgcggttcttgcaatttttttttttttttttttcctccttttttcaagaccaagtttcactcttgtcacccaggctggagtgcagtggcgcgatcttggctcactgcaacctccgcctcctgagttcaagtgattttcctgcctcagcctccctggtagctgggattacaggcgtgcgccaccacacccggctaatttttgtatttttagtagagacgggatttcaccatgttggcccggctggtctggaacttctgacctcaagtgatccacccacctcggcctcccaaagtggtgggattacaggtgtgagccaccgcacccgacctggttcttgcaattttaatggcaaaactgcaattacttttgtaccaacctaatatttattataagacaaagaactggaagcattttctggtggat

SEQ ID NO: 46403 - DNA, 1073 bp, Homo sapiens
gagtggtgcagtggtggggtctcagctgattgcaaactctgcctcctgggctcaagtgattctcatgcctcagccttcctagtagctgggattataggcgcacaccaccatgtctggctgatttttgtatttttcatagaaacggggtttcaccatgttgaccaggctggtcttgaactcctggcctcaagtgataacacctgccttggcctcccaaagtgctcagattacaggcatgagccaccatgcctggtcgagagctgattggtttataaggcagttttccctgttctcgtttgctttctctctccagctgcaatggaagacttgtctcttccccttctgccataattgtaagtttcctgaggcttccccagccatgtggaactatgaatgaattaaacctcttttctttataaattacccagcatcgggtatgtctttatagcagtgtgaaaacagactaatacagaagtatatgttaactttctctgctgagcatgttggtgcttgcctgtagtcccagctacttgggaggctgaggtggaaggatcatttaagaccagcctgggcaacatagggagatcctatgtccaaaaaaaaaaaaaaaaaaaaaaagcatgttaaatttttcatcagagttgacagcttctcaaatggtcagtttttgttatatacattgttgaggctgtgtgttagaaactttcagattcatgaacattattcaatgttctttgtagtttgttccttttattgtaatatagtctctatccctattaatgctttttcgctactgatacctgacttttttccccttaatctttgacttgtaatatgtgagattaatctatttgaataagtagacttatttctgctctctgaattttatattttctgatccatttactttgctgtgtgtgtgttttgtttttgtttttgttttttttttttttttgagtctagctttgttgcccaggctggagttgcacgatcttggttccctgcagtctcagcctcccaggttcaagtgattgtcctgtgtcaatctcccgagtagctgggactacaggcgt

SEQ ID NO: 46404 - DNA, 1026 bp, Homo sapiens
gggtatgtagtggcattctaaagaaatcttaatgccacttccaaaaggaaaactccaaaaatcttttgggtgtggggcattattgttgaaataaatgtgtagcttgccagtatgattaatacgaagaagacacatctgtttgcatgtaaagtttattggaaatagggcttattatttcatagctgtgcctaagagagtattttgatattatttgtggtcagttttcaaggggttattagtcatatgtgccatttttcttgggtattttgcagtttttattgaatatgtgatgaacttgcaggatcttttgtgtgaatgtgaaaaagagcgtgtgttttacacatgttttatacatcacatattttgtttctaatcaaaagaggccttatatctgaaagccttcttgttactcataagacaaggatgtgagactagacagtttttaagggtctgcctaggtctaacagaggggaaggaataagttctggatgggaaagttggtagaaatgttagcgaagtgtcaaattaagtagaattagtttttagattttcttgaagccaagacaaaaacaatggctaaaaaattacaaagctcagtgtatcacagaggagcttttccttccttccttccttccttccattttttttttttttttttttttttgacagagtctcactctgttgcctgggctggagtgccgtggtgtgacctctgcttcccaggctcaagggattctcatgcctcagcctcttgagtagctgggattacaggtgcatgctaccacgcctggctaatttttgtgtttttagtagaggtgaggtttcgggttttactgtgttgcccagactgatctcgaactcgtgggctcaagtgatccatctgcttcggcctcccaaagtgctgggattacaggcatgagccaccacccctgaccaggaactttttgttaatcatggtttgatataaatgttggagaatcttttacattagagatattttaaaaacctaatggactgtgagtttta

SEQ ID NO: 46405 - DNA, 1037 bp, Homo sapiens
atttcctgcctcagacctgctcttctgctttttttgtacttactctaataggtatttaggagtagtgggcagaaaatagagctttctaagctcttgccgtctggttagtttaactgaagaggagctcttaaaaaacatgcccaggtcttctgtattgctcccccaccccttccccctttatttgattttatttttgacatggagtctcactctgtcactcaggcaggagtgcagctttatcaagtatatgataaagcaaaagcacattgatgatggcatatcaccttctgagtttgaaaatgtttgtttacctttgatttctaatggattaagagtgttgctcttgttttttggaaatgctgtttattaggtcctagtactgccacatgctcaatgagaaactttttaacttctgttttccaggaaacccattgttctgtgtattagactgtaatagatattaccttgtgacttgacactgctgaatagaatgttttgagatgtttcatcaaaactttacaccaaggacgattttaggattttattttatagctgaggaaactgagggccggagtgcttagattagttaagtggcaaagactccaccctacattaacttagccttattgcttttcctttgaaaagggtagaggaagttacttgtttttctatgtgtgtgtgtatgtaattatatattaatgtgaacacacactgtttgtgtgtatgtatgtttgtgtatatatgtaattataaatatgaatacactgtgtttgtgtatatgtaaacaggtacgtgtgtgtgtgtgtatatatataaatagatatatgtgaaatcattaaaagagtgtttattcagcaagatttgggggcgtctgctgcctgtcagttctagtcttgggtgtctggtggtggtgtttggttcatgaaaaagagacagttacaggacagtgtgacaagtacagtgaaaagggaaagttcaggattcttcactagaagcaccagttcagtcttgggcaggggaaaagcttacctgaagaa

SEQ ID NO: 46406 - DNA, 1052 bp, Homo sapiens
gatttgaagacatagtttaaagaaaactttgcctttttagatgtgattgtaaattgatgagatataggctgggcataatggctcacgcctgtaatctcagcactttgggaggccgaagctggctgatcacctgaggtcaggagttcgagaccagcacggccaatgtggcgaaaccctgtctttttactaaaagtacaaaaataagccgggcatgatggtgagcacctgtaatcccagctacttaggaggctgaggcaggagaatcacttgaacctgggaggtggaggttgcagtaagccgagatcgcgccattgcactctagcctgggcgacagagtgagactccgtctcaaaaaaaaaaaaaaatttgatgagataatatatattatgtagtgatttaaatttttagacagtctgatgtggtggtagatagaatgtaagttggagtaagcaggatcgtgaatttgttctttgtatccgacactaactggccatatgatgatatgaccttgagtaaatgatacaactcatttgtaaaatgagagagttgggctagatcatttggtctttttttaactcctgtttccatgcccttgtgattgtggtagggaatagctttttttcatcatatacctgtttgccatttatatgtcttttgggaaatgtctattcagaccttttgctcatttttaattagattattagattttttcttgtagagttgtttgagctccttagatattctcattattaatcccttatcaggtggatagtttgtaaatattttctcccattttgtgtattgtctcttcacttggtggattgttttctttgctttgcagagctttatatttttattttttgagatggagtcttgctctgttgcccaggctagagtgcagtggcgcgatctcgcctcactgcaacctctacctcctgggttcaagtgattctcctgccttagcctcccgagtacctgggattacaggcgcccaccaccatgcccggctaatttttgtatttttagtagagacagggtttgaccatgttggc

SEQ ID NO: 46407 - DNA, 1476 bp, Homo sapiens
aggattttgtcactgcctaggggatgcagaaacagaaatgagtgacttctgtagtgtaggttggcaggccatggtttgcaggtcagagatgacatgtggactgattttgttggcatctgttcatctttctgctacttttgagagctgagagctactgaagagtacatacgacacttgcctgcagagacaggagtcagtactgtagtacagtacaggaattagcagccaccccataccatccctgaatgtttctggtttcatgaaactctagagtggcagggactcgaggacagttggtattttgcttttctctagggtctctctgctcttcagagggctctgggaatgtaaaagcttcttcaattgacatgtagattcagtctttgtcttcctttggtcaattttaagacattattgagaggtaatagcattttttggggatcggggacatgatatggttaagcttttttaaagtagaaggtttttcggacagttgaattgaaattattgtatgagtaacataacctagtcaaattgtagtaaaatcatggattgtggtggcttttcccagttaggaggtctcttgatttaaaacagtgcttctcatgggatggaccgtcatcaggagcagcaaaacttgaagaccactgagtaaaaaggctcttttaccctcttttctttgtcttaacattgattgatgatggcaaatagggccaaacttgccagttcttcactgcctccaaccttccttttccccttagacttacaggttttatacctgtctgtttgagaatagggtattttcctgttccttgattttgtgtgtctctctctaagctagagtagtttatttttgttcgcttctttttttttaaccacgaaattggaaaaatttagattaagttacataaattctaggtcctctacacaactgtgagatactgaaaggatagctttttaaaatgcatttcggtgcttgtaaggtcacagtctagttgggagaaatgaggctcatccatagatagtagcactatgaaagactgctacaagaggtagagtttgggctgtgtaaatatttgccatgctattgcttgcacagagtttgagaacagtgttagattagtttttcttgttgagtaaatgcttgtgtgcttctcatgtgcaaaaagtgtgctaggccagggatagctggtgtgtttcaattgccacaccaaaccgtcctgaaacttcgggttgagacgtgtttggaactttttctggctcagggagaaagcttggagaagagtgaggttatagattagcgagctcagggagtggcatcaggtgggtatgccatgtattgtttttctacctttctttttttttgagacagggtcttgctgtgttgcctaggctgatcttgaactcctgggctcaagcaaccctcttgcctcagcttcctgagtagctgggattacagacaagtagctaggatta

SEQ ID NO: 46408 - DNA, 1026 bp, Homo sapiens
cgaactcctgggctcaagcaattatcccgtctcagcctctccaaggtgctgggattacaggcatgaaccactgtgcctcgccttatttatttctttaaaattagagacatggtcttgctgtgttgcctaggctggtctcagactcctggcctcaagctgtcttcccaccttggcctcccaaaatgctgggattacaggcaggagacaccatggctggcctgaagtttttcttggcttcaatttatcacaatgtttttcataggaaaagtccactgataataaaaacctagatttttcttgacagcaaatttttgtgttaattaaaaaacatactagtatatgtaaaaagattatattttagaattccattaaatgtaatggttgtattctagattgctagttataaagatgatgatagtggctagtcgacaaagcactgtgatgaatggatcagtagataagtttttattttcttccccatgagttcaggctccatttctgtgatatagaagtgtcgagaacctgccgtttcaagaaattggctctgctccagcatgaatctgctgttcagaattcaggcgatgaggtattccaggtctttacttgaattcagataccaggtctacctcacagacaacctggaactccagagatggccttaactgtgtctccaagactcttacttagggacatggtggaaattcatttgggtgttttccgtgacagcctccttgttatgaagtgagaagtggaggaagatggttttttaagccttaagaaaagctaaatttgagattaggaagttaatttgatggagaaagctaagaaagcccagacaatatggtagggttattttaatttctaaatgatgaaaacagagttttatatggaaggctttggggagaggggtattagattgttcagctgattatctgttctcttatgttgtagtagtggctttgtttcttgtccagaagtaattcgaacttgtccaattattgctctgtaacatcatctgcctctaca

SEQ ID NO: 46409 - DNA, 1048 bp, Homo sapiens
ggttgtgtgggatggagcatcatattaccaaatcagtgaaaaatctcaccatttgattattgagattgttacctaaaagcaatactaaatgcattatgccaggtgcggtggctcatgcctgtaatcccagcactttgggaggctgaggtgggcggatcatctgaggtcagaagtttgagaccagcctggccaacatggtgaaaccccatctctactaaaaatacaaaaattagctgggcatggtggtgcatgcctgtagttgcagctactcaagaggctgaggcaggagaattgcttgaacctgggaggtggaggttgcagtgagccaagattgcgccactgcactccagcttgggtgacagagcgagactccatctcaaaaacaaaaacaaaaccaaaaacaaacaataaaaaaccaatactagatttattgtattggaaaagtacagtctggcctaactaaaatgtttaaatgaatttgcttaagtaagattaacagcagggtgtagaatagccaagcaaaatagaaaatcaaaacaaaggcagagcaattttataaatcaggatatctgtgactgaatcataggcctaggaataaacagacacttgtgaagaaaattacaggatacacaggaatacgactaggaataataggtgaaattaggaaaggtcagggttttttcccctaacaattagaccattaggttatttaggaaatagtttccaaaggaaaatttaattgctgaagactgagttacatggacgtagatcttataaggtatattaaaggaagcaattttatgttacaggaggatgtacttaatgtctcccctccctcattttatcatacatatttattttgttttttgagtctcgctcttgcccacgctggaatgcagtggtgccattttggcacaatcttggctcactgcaacctccgcctcccgggttcaagcgattctgctgcctcagcctcctgagtagctgggagtacaggcgcacgccaccatacctggctaatttttgtatttttagtagagatggggtt

SEQ ID NO: 46410 - DNA, 1032 bp, Homo sapiens
agtagtaagattagacaggcagaatggtactgcaaataaattgctcagctgaagaaaacttggtcctcaaaacagtagtgttttcttcaaatacgttttctttctttacccacatcctcttaaaaagtcaaatattttgttcagcatcatagtctgatgtctcaagtgtctaaaatgtacaaagcataaaaaagtatctttttttcataatttgtgttttcagacttgccaataatgaataataatgatgccaggatgaaattgacaaatacaggtggggatggctggggtggaaagaagaggatgttggctgtgacttcccagaatgattacaaggtgcctggcacagaatgctgggccctcaagcaaatattcattgagctgaattgaaaccattcagtgctcagatactttggacattttgatctcctttccaatggatttcttgagttagtactacgttcctgcttaaaacattgtctcagagaaacagtaaaacaatataaagaatgtggttcgtcgagcttgaggggagagctgaaaggcctgcctcactaatagcctggaaagtgcctcactaatgagctgaaaaaataggcacagagatttacagtgtttatgcagggatacaactactgagagacagctgaggtccacctgatgggtcttctgacttttctttaaagtccagggctccattccacttcacgtggcttgtattccagaatggttctgctgtctcagacatcccagccttcaggcagtgtggccacctgtcttagtgttttgattccgttttcccctcaactgctctttccagggctcctaatgggtttatgcctttttttcagaggctgacgctcttaaccttttcttggtactaggttaggataggtcttcttaaggtgatgtggttatggcatttattgtccttgtcctgaattattcctcaagatgcaggttagttacgaaacaaaccagttcttattgcttgtctgtatgtggaattttcctgtgagatttgccttttgg

SEQ ID NO: 46411 - DNA, 1052 bp, Homo sapiens
gcccgccggtctcctccctcctcctcctcccgtttgcccctcccccgccgctccggagcggagcctgcgagacggagaaactggggcagaagtgaagatggcggcggcagcttctcgctagtgacgcgcggtgcgggctcatctccttcccctccttcctcacctcccctagtccggaccccgtccgccgccgggaccagaccgtccccgtagcccgcagccagcagccgcccctctcctcccccggccgcccctctcccaacgcccgtctgccgctggccggcggcgcgcccctggtcccggccgcctgcctcgcactccgcgctgtcgccgggggagcgggtggcgtgtggattcgccctcctgcccgcccctccgggccgcggacacacgcccggcagggaggcggcggcggcccctgcgtatttgcttccctccatttggggactgggaggcggcggcggctgtgggttttggggaggggtagagggctggggggcgggcgagagcgggagggggccgccctcgagtggaggacgagaaggaaagcaccatgacgtccatccatttcgtggttcacccgctgccgggcaccgaggaccagctcaatgacaggtaatagggctggcgggtcggcgggcgcggggggaggggcgcccttccctccctcccctcccccacgggccgtgccgggcgggtgcgggtgtttacgcgccggccggccagctggggtggggtgcgggggtccttactgcctcctgctaggctccttccggggcaaacttctcatcccgggggcagggggccgcggggggagcgcggtgtagacgggactcgcggtgtagactggagagcgctctgtaaacccccttccccctcccgcaaggagcggcgttgaactcggcggagatgggggggtggtttctggctcccggggggcaggcggtaattactgcccggccaaggcccgaggaatccatattagtcaaagttgaattgagacagacaatgcggatgggggatggtggaggtaaaaagagagggaagaggag

SEQ ID NO: 46412 - DNA, 1050 bp, Homo sapiens
cttgagcctaggagattgaggctgcaatgagccaagatcacaccactgcaatccagccttagcaacagagtgagagcctctcaaagaaagagagagaaaggaaagaaagagaaatagagaaaggaaagaaagaggaaataaagaaagaaaaagaaaaagagaaaagaaaaaaagagagaaaggaagaaggaaggaagagagagagagagagagagagagagaggctgggcacggtggtgcacgcctgtaatcccagcaccttgggaggccgaggcgggcagatcccgaggtcaggagtttgagaccagcctggccaatatgttgaaaccccgtctctactaaaaatacaaaaattagccaggtgtggtggtatgcgcctgtaatcccagctactcaggaggctgaggcaggagaattgcttgaacctgggaagtgaaggttgcagtgagctgagatcgtgcaactgcactccagcctgggcgacagaggaaaactctgtctcaaaaaagaaaaaaaagaagaaagaaagaaggaaagaaagaaaaaagaaagagagagaagagaaatctactatgcaggtgcttttaggttttctccaagggtacctaaaagcagcagctgagggcgacagcttgtatttcttatgtctgcaatttagtgccttgtactgagtgctgcccactgcagggactaaatgttgatgaccatagaggacacctggcaaatctagatgacagctgacatctaataagcacttactatgtaccaggcatttttctaagctctttcaatgtgttgcctcatttaattctcaacaatagcctgtgatacaggatggttattatccccctttcacagatgagaacactaaggcccagagaggttaggtcactccacctagtaagtaggagaggtaggagaggtaggatttgaacccagcaatctcagcctgagactgagagctttaccacagggcttcctagtagatttagaaggtgagagatggaggaaacttgccagcccatgttcggggaaggcagggccctgctg

SEQ ID NO: 46413 - DNA, 1048 bp, Homo sapiens
gagttgcaaatatcacatgtgaatgatacggtaacttttaagaaatgtctgtattgtatttgaagactgtttgccataaatctgaaatttgaacctatgtatttcaatttggtatgctaaaaagttctgaattaatgtaaagttttttgttataatattgtaatctcagttcaaaagttaactgcaaatataaaacccaatgatttctatatagtaaattgaactgtaaaggtaacttgtgtgtgattctgaatacatagataaatgtttttattcctcatgttttactttggcttctatctgaaatagaggtaaaattttacatatcagctttatgtgtattaacaatcttgctttattagaaagaaaattgattctgctaaaaaatgctggaagttatatatagaacagtgaaattttggtaaagtccagtatatatgtgagcactgtttccaggacagccttttctagacacttcagttcactagcctcctaacaatttaaaacccggactaaatgaatagattgacaaattaagctagatttattccaagtaaatatgggcattaataccattaaatggaaatactgggttagagaagccacacattgcttaattccttttttcttctttttagagtatatattttagtttcctaacctgtcttggccttaagaagtcttctgaactctgctgaaatgaaaagcatcatctctttgttctttgaacactttagttaactgggtgacttaatattttggggagtaactttaaattcaaagatttacttaattattcaggcaatgcactagtatagggtggtggttaaaggtgtagaccttgcctccagtctgcttgactcaaatcctgcctctgccatttactgtctgtatgaacataggctagtcacctaacccttttgtgcttcggttttcccagatggaaaatcgtggtaaggccaggcacagtggtttatgctcgtaaatgccagcactttggaaggttgaggtgagaggattgcttgagctcaggagttcaagactagcc

SEQ ID NO: 46414 - DNA, 1474 bp, Homo sapiens
ctcaggaggcactctcatgaggcggaggttgcagtgagctgaaattgcgccactgcactccagcctgggcgacagagtgaaactccatctcagaaaaaaaagaaaaaaaaatttaaaaaatgcttcctatttttttccagttagagacctgctgggatgtaacaatgttagtaggaagaatgtttgcagtaaccatggaggtttagctagttagcacaatcaaagaaatttgaagacatttaaagccctgatatttttattgaaagacaatgatggcattgctattcaatttagtcttcctaggtggatttatggactgatggacttcatttgaaagtaatgtcgtctttcattacagagcccaaccaactcttgatgctacaacagagtcttaacttgctgcattttccaaaatcccatccttgtaagcttcatgctttaggccctaattgctagttttttctctatacaggattgtttttcattaggttcacttgattcatccgtcgctggatttgggagcactggcaacataatcaacacacttcctacaatcttcaggcttcacatgtgctgatgatgatgtaaaccaactctgccccaatcatctccccttctcttagggtcttactacatattgcaacagaagataatattggaggtgaagagggtaacatgaagtttggcactaccctgaagaactgtaggcatctcttggaatgtgctaaggaacttgatgtccaaataattggggttaagtgagtatttgttttaaacttttaaagctgtgaacattttatggtggtaacctgtctttctggttattgatttaagactttatttgcatgaaatctaagatgcaattttttctagtcttttaacacacatgtatgtgttttcttcttagtttaggcaaaacaacttaaatatgccttgtcccttttcatactgttttgtgactgtacctccttccccacaataaaaagaatagcaaataatattttgattcagttagtgcagagtaacttaaatcgccgccttttaaattggatgggaggggatttgctagaattcttaatgaaaataaaagtgtcagacttttttgtccttttaacgattactctgggggacttcaataaattagactttgctttagccttttaattttatatgtgaggaaaccgagactccaagaggttcaaatacttgataatagcctcagaactaattacaggcatagtaacactaagccctagatgttatttgccagcccattgctacttttactaaagtaaaaaggtcttgctttttcaaacactcacaaagatgtattgtgtatctttctttaattttattatttattttttgagatagtatctcattctgtctcccatgctggagtgcagtggcacgatcacggctcactgcagcctcaaactcctggctcaagcaatcttcctgccttggcctccca

SEQ ID NO: 46415 - DNA, 1057 bp, Homo sapiens
tggtattttgatttcttggatgcagatacttatttcactagctttctttactcttaaaatgggtaaaattatgtgtgttataggaacgcaaaacaagataataatacagattgggtctgcaactctgtaagtaaggtgaccatataggcttgtaatacattgtgtatatatgtgagttaccccttcaaattatattgacctttttgggtaaatgtattttaattcatgtatttgcttttttaaatgggcgttaaaggaaattaataatctgatgtttctgaaattgtaaaattgcgtaaattcctcactaaattaggcacttagcacactttcattgactcgtacattatgtctattgaaataatacagacttttatataacttatattttgacagtttgttgcatattctaaggacccagacataggcttggtggcccgtctcttgtctttcctggtttatgactttcggctttgtggaatacggctgagatgaaaggatttattgatgatgcaaactactccgttggcctgttggatgaaggaacaaaccttggaaatgttattgataactatgtttatgaacataccctggtaagtgccatttctcaaatacagtgtttgtcattttccaagctctgaaacgagtgctttttaatttccaagatggtaatctgatcagaagtacttggttcatatgctatctgatttaacttgaccttcctcccccacacccactccccttgagtagtgatccatttttctttccaatccacattattttaaaatcctccctatggccctttaccttctatgccttttagcatctggcacccacatatgttctgtttattctgttgatgtgatgccagccaaccttctaatcagtacatggcttcttactcatttttctcaattttcttttttttttttttttttggagacgagtctcacgctgtcgcccaggctggagtgcagtggcgtgatcttggctcacgtgcaaccctcgcctcctgggctcaagcagttctctctcagcctcctgaattagctagaat

SEQ ID NO: 46416 - DNA, 1338 bp, Homo sapiens
tttaattcgtgtctcttgctttaaagaaaagttaccttgcattatagttaatatttctactggtgtttcctcttagaaacttgagagactattgtcagtgagctgaatgattctgcaaaatcagggaaaagtagtctttagattaataatgtaggattcagaaagtctatagtgtctccctctttgtgggtaggagggaatgggagcagatagaagctaaagataatttattctgcaggttctggcagtcagaataactggcttttaactttattatgcccgggtacaatgcatattatgtcaaacaaatataacttctttaaatattcacatgtaatcttctcattttgcatgtctagtatttgatgctttgctataaagctacaggtccacaatccctttttcatagaattctgaaatccaaaaagtctttaaaaaaatttttttatagcttccttgatgtgaccttaactgatttgggaaaaaaaaaaaaaaacaaaaaaaacttgacctggatctgtgctgatttgaggctatttttgtctttacttatcccatttagtgttaatattcctaaattttgcttcagaaatattgtggttgcagggtgctgactcattctcctgaagaatattacataacatatgtaaagtatgtgtactacattatggttcaaaatctggagaattctgaattcacaaagatacctagtcccaaaggtttcttgactagaatttgtaaaattggcaagagaaaattccgcattccagaaatgtgttatccttacaaatcaataagagtttgctctattggacaccgaaatcctggggttaattttctgtagatcaacaatattatttgaaaaccattaaaaggagttaaaacagcttcatggaaattatttggcccatagcattgcaaagcatgtagctatatgaactctgcttgaactggtccactaggattcccgtgcaggtagtctgagatccagaattggcttcagagttaggttttaaatcaaccacctgaattttgatggaataaactaagtatctggaaattttggaagttgcttacataatccttttctttcataatttagaatgtgtgtatgatgtagtacgcaaacactgtaaaaatgtcttaacaaaatattttaaggtcaatatcaaagattaatgggcccctaattgtgaaaaagtttttgtgagccttttgagaaatcccctaggccaggtgaggtggctcacacctgtaatcccagcactttgggaggccaaggcgggcggattacatgaggtcaggagttcaagaccagcttggccaacatggtgaaac

SEQ ID NO: 46417 - DNA, 1083 bp, Homo sapiens
tgcagtgtttacatacaccattctaagtgaaaataatttatttttttccatactgccttttctccgcatttccatttaacaagtccttcttcatgcttttttatcctaactgtccggataaacattctatctatcctgtatgtaagtgcttataagaagtgcttatctatcctgtatgtgtttataagaagtgcttatcctatgcaccttttgggtcttgctgtgttgcccaggctggactcaaattcctgggctcaagcagtcctcctgccttaacctcctcagtagttgagactataggtgcatactgtcacatctggctcattttttcttttcttttctttttttggagacaggttctccctctgttgcctgggctggagtacagtggcacaatctcggctcactgcaacctccgcctcttgagttcaagcaattcttgtgcctcaggctcctgagtagctgggattacaggtgtgcaccgccatgcccagctgatttttgtatttttagtagaagatgggatttcactgtgttgaccagactgatcttgaactcctggcctcaagtgatccactggctcagagccactgcgcctagccctattttttgtatttaaataatgcctttcaaattctagagccttcattccctactagtatctttttgttaaatggaaatgttgtagggttctcactgaggaacattctggaatgtctgacgtttaatgtccataatgtttcacatcattgctcttgggttgcattaagcagcaaaatagctgtggatatatgtattgagaaaaagatgaataatgtcttacctagggtatctgatcctattccttaggataattgagaatgatctgtccccagcatgactcaactttttatttatttagaaaattacgttggtgttgaaagaatcagaatgttatggagtagtacattatttggaatctaatgtaagattattatcatcattgcatgtttgtaggagttctttcctcatcatccataaatgtcattcattgagcatgtgatcagcttctcctagatagatgaaacattttgcctccaccag

SEQ ID NO: 46418 - DNA, 1060 bp, Homo sapiens
aaaattcagtgagtgatctcccaaattggcgttcaagggaacaatgttctggaagatatttatagaaaagtcatttaaaaaaatgcgttccgtactcaaataagtttgggaaccactgaattaatcaaagtcaagcaggtttcttaataataggttttttgtttttttttggaaactgacgttttgatatgctttgtggttctctacaaaaagggaatacaaaactctgtgttcttagaacttaacttaccaccaaaacatttctgctgaggcatatctatgaataatatctgagttctgtgacacatggtttgggaaggatgagacgtggtgaactgatgcagatacagtgatgggagggcgcttcagtgctcttgtgagtaagagcatgtgtgttggtgctgggcagatgtgggtacaaatcctgtttctagcatctactggccacaggactttggagaaattacccaaactcactgagctttagtttccttattcataaaatgaagtgtatcaatttgaaacgtgtttggctccaagaatgaaaaaatctatcagaattacttagggggttatttttctgatataataagtccagggtcaggccatccatggccaatgcagctattcatggatgttttctgggtccaggctctttctgtatttctgctttatatatatatatatatatatatatataaagagagagaaggttaagtgagataatgtaagtaaagtgcttatataatgcctagcactagttagtgctcaataaacatcagttgttaatatgtataggcagccttggattcaatgtgatacaagtctgtaatttagagtacctggaaaggtgaaaaactgtatattcttcagccaataacaagtatctatcttttttattggggaggcttttgatagaagcagaccagactgtttgatgctactctctcttgcaaggctctggaatactggtagatagagaccctgtttgacagcagatgtcctagaaaccagacagtgaagaggaaggctggcatcctattgcaccagggaggaaccc

SEQ ID NO: 46419 - DNA, 1030 bp, Homo sapiens
tctctacaaaaaataaaaagattagctggtcatggtattgtgtgccgatacgcccagctacttgggagactgaggcaggaggattgcttgaatctaggagttggaggctgcagtgagctatgatcacaccactgccctccagcctgggtgacagaatgagaccctgtctctaaaaaacaaaaacaagaaacaaaggcaaaaaagtgcctttgaactcagctgtcataaggacaaaaggggattaaagtgaaagggccccaagggaatggtaaaaccagagttagcagcaagctgcactctggagaatgtgggtggggattagccgaagaagctgttcccttaagaagctccatgtagttttgatccatatgccctggttttgctttctaaaactatggatagcaagtccattcacttgtgcccttaatagtctttcttctgtttgaaagcagcacaccatcaaggggggcagttgtgaaatttgaagtcagtagatccaagttttgaaccttgaatccatcactactgctggattcattcattcattcattgaacaaatgtttatcaaagtcccactatattctcagccctgttcaagactacagggatttatcaataaataataataataaacatcccagccctcaaagggcttacaagttagtttgtcatgacaggcagtaaacaatagatatagtaaatgcattatgtaagtatgttcggtgataaattctatggaatacaatagaagatggaagaggaactaaaagtttagtggcagtatagaggaagccaattgtaattttgcatagagtggtcaggcttagtctcataagtaggtggcattgagcaaaggcttgaaggtagagaagtaagtaagctgtgcaggtatctatgagaagaccattccaggcagtgggtattccaatgcaaagcccctgaggcaagagaatgcccaggtctttccatcattctgttctgtcatcttcaatgggtcagttttaccctctggctttctccactcctgata

SEQ ID NO: 46420 - DNA, 1050 bp, Homo sapiens
tgttttcagttgatggacatttggattgtgttgacattttggctatcgtgaagagcgctgctatgaccattcatgttcaagattatgtttgtaccactgttttcagttcttctgggtacaatggctgtaccattttgtattcccactagcaatgtatcagaacttcattttctccatatcgttgctagcacttattttccattttttgtttataactatcttggtcgatgtaaagtggtatctcaatatagttttaacttgcactatcctaataactaatgatgttaagcatcttttcatgtgtctgtgggctcttcatatatcttctttggggaaatgcctgttcatttcttttgcacattttttgactaactagtttgtctttttgttgtcttaacagcctcgtaagctggccttcctctactctttatacctctaacttttgttttttaactcagctgttagaatgagtttttgttatataatgttattctacaccaaactgtcaatagctctccatggctctacaaataactcaggcattcatggcctccacagtatcttctcaacctcctttaccagatttgacttttttttttttttgcactgatgtacatttatttttcatatatatatatataattacactttaagttctggggtacgtgtgcagaacatgcagatttgttacataggtgtacacatgccatggtggtttgctgcacccatcaacccatcacctacattaggtatttctcctaatgttattattcctaccctagccccccaccccctgacaggccctggtgtgtgatgtttccttccctatgttcgtgtgttttcattgttcaactcccacttatgaatgagaagatgcagtatttggttttctgtttttgtgatagtttgctgagaatgatgatttccagcttcatccatctccctgcaaaggacatgaactcatcctttttcatggctgcatagtattccatggtgtatatgtgccacattttctttatctagtctatcattaatggacatttgggttgg

SEQ ID NO: 46421 - DNA, 1033 bp, Homo sapiens
aggtgaatgtgatctttattctagagcagggacacctttctttgactgcccttggacatcagaactccgggttctccagctttcggacttggacttaacaccagcacaccccccgccccaggttcccaggccttcggcctcaaactgaaaattacaccatgggcctccctggttctccagtttgcaaatggcctattgtgagacttctcagcctccgtaattgggtgagccaattcccctaataaatttcctctcatttattaagagatttataggtatataggcatacctttgagatctctgagatatttttatagttcagttccagaccactgcaaccaaatgaatatcacaataaaatgagtcgtgaagtttttgatttcccagtgtatataaaaattatgttgacattatactgtagcctatcaagtgtacaatagcattatgtctagaaataccttgtacatagcttaatttaaaaatactttattgctaaaaaattctgacaatcatctcagccttcagtgagttgcaatctttttgctggtggaggatcttgcctcatgatggctgctgactgatcaggttggtggttgctgaaggttggggtggctgtggcaattttttaaaataagataacaatggagtttaccacatcgattgactcttgctttgagggaagatttctctgtagcttgtggtggtgtttgatagcattttactcacggtagaactttgtttgaaactggagtcgatcctttccatccctgctgctgctttatcaactaagtttatgtaatataccaaatcctttgttgtcatttcacaatattgacagcatcttcaccaggagtagattccatctcaaggaaccacttttttaaaatttttaatttttagtggtacctagtagatatatatttatggggtacatgagacattttgatacaggcataccacatgtaataatcacattagggtaaatggggcatccgtcacctcaagcatgtatttctttgtgtcacgaacattc

SEQ ID NO: 46422 - DNA, 1035 bp, Homo sapiens
tgtttccatatatgaaagagatgtttgttcttcagtatgagactagttaaattattataggcagacatcaccatatttccctttaattctaaaggaacagaggagaacatttaggatgtttaaatttaattcaattcaagaaatatttaatgagcacctaagtgacaaatttctaggccgtattccatattattggcattaaggaaataaagttttatatttgtatgtgctgtatttaatgttggctagcatttatccaagctatgaggttttttaatgcctacattaggtcaattaaaactcctgcttgtacatacatttaaaagcatttgaaagatagctaattgaaagcactttttagttcagttttgaggtgtccctaccctctcttactcagtccatccataaaaggaatgtaaatccctacagatggcttataaactacattactttaggacattgaaaacatgaacttaaatcagagtaaggtttgactgctgcttgctccatgccttgtgtcagttagaacttccgtgttttcaagctagctctatacaaaattaagcattatctatttttccctctaaaggaaagaaggcgtcggtggattttacaagggaattgctcctaatttgattagagtgactccagcctgctgtattacctttgtggtatatgaaaacgtctcacattttttacttgaccttagagaaaagagaaagtaagctcaaagaggacaattccagtatatctgcccaaggcagcaacaagctcttttgtgtttaaggcataaaagaagaattctgcatagaaacatggctcatattcgaaattgctctatagtcattagaagccagagaactgctaagtctcctgcaatgtttttcttgctttttgccttccccatatatatggaacttggctacctctgcctgaaatggctgccatcaacacaatgttaaaactgacacgaaggatagagtttcacagatttctacgttttattggtggaagctgatttgcaacatttgctaa

SEQ ID NO: 46423 - DNA, 1098 bp, Homo sapiens
accacgcctggctgttatatggaatttcttagcagaaattattatgattactctgtgcagatttcaagaattttactcatgacaaagtggtaaagtttagaaaagttatgaatccctaatggtttaaaatgatttggtatagtgtttctttaaagtataattttaattttcaaattatacaatttagtagccttgtttaatcgcctcacttatgtatactatccagaaggaaaaaacagtaagagccgtaagtctttgtaactcctactttaataccttgatttcttaatgttgattagtcaaaacctaacttaatcatttttgaacacatagccactagcaaaaacctgagtcataacaggaccaaatatttgttgaataaaggactacttaggaaacctggcaaatgagaaacttaaccagatgaattttttaataaaattgtcactctataaaggatgtaaaatgtgacttactgtattacataattatttaatttttgaggggtagtagttactttggatttgaggaagattgtgataaagttggggtagatatatgtgtcacatgcacagattattggggtgccagattcctggttcttttcgcctatcttcaacccctctgggattataccatgtgctacacctaaggtctgtatctgcttaccatctgttctctgcaccaggccacgttgtttaggagtcaagacatttttgctatccttacacttcaaagagaaagcatttcacatttccatctcccttttaatttacctctagctaactgcatgaggaactttttatgactaccaaaaacaatgtctaccttttgaccctaagactgtgcctcagaaactacatttcacagtttcagatatggtcctgtgcattatctttttttttttttttttttttacataaatgtactgtttctaatttgggttgtcataagtgcgaaagtatctgtatgctgaataatcttattgaaatctcattttaggagccatgaccctctgcattacaaacccattatgggtaacaaaaactcgccttatgttacagtatgatgctgttgttaactccccacaccgacaat

SEQ ID NO: 46424 - DNA, 1051 bp, Homo sapiens
tttaggaggccaaggtgggaggatcacatgagtctgggagttcaggaccagcctgggcaacatagtgagacctccatctcttcaaaaaatttaaaaaagaattagtctggcatcatgatgctgcatgcctgtagtcttagctaattaggaggctgaggcaggaggattgcttgagcctagaaattcaaggttacagtgagctatgattgtgtcactgcactccagcctgggtgatagagtgagactctgtctctgaaataaaaaaaaaaagaaagaatgtgttcacttgacatcgtcatccaagagaaaagtagaaatcggcattaaaggaaataggctgatttgactcccttactctgaaacatttaatggatattttctaccaaataaaatgcaaatctcaatctaccactcaagtgtggccaattttccctgtcttcccacccacccttattacttttcaccatgctcatctttttccttgttgaaactgtgcctgtctcaatacccagctcaatactacctcctacacaaagccttctgtgatctcagtcataattcctgaatttcttctattgtctgtgttgtcttttattatgatttatttgtgtgccacttaatagtccttattaatttgttaagaaaaattcatcacttgtttatctttttatcatctattagaaagctaactatagtacctgaacgtaggtgctcagtatatatttgttaggtaccccttctttggtcccttttgtcttttatggccagtctgtgtaccactactgtactctcccctcctcccagtttccttgtcttttgaagttaattgatgagtgtctgattaaaatattttacatttgtattgctagccgtattcatttgagagggaggggtggtataatcttgcagcaaaccacttccagcaaattcattcttgaaaaaggtctcattttgtggttgcattatgcattgacttgtgcttttggggtactgctgttgacttacatacactttaaaacagacttaatgacacctattcaaattaaactgc

SEQ ID NO: 46425 - DNA, 1365 bp, Homo sapiens
ttacctctataagtacctgttatacaatggtttgaacattggaagaattttagacttgcctgcaggtgcaggcctgtatgacttgctgtctgtcttcagtagcattttatctaggagcagaagaggtgatagtcgaggtgatcattgaagaatagtgtggttggcctgatgagtttagacagtgctttgaagcatatcattcctgaggaaagggaattcttggtacctgagaagattaatagtcttgatgaattgggaagagtattaggagactagtggggctgaggtgacagataaaaggattgagtttggattggaggcctaaattaaagatccaggagtggaagcaggactttgtaataataaagctcacagtgtagctgtgaaatggtgataggaggaaaacttaagaagatgaataacgaaataaaaatttattgattatcaacatcagtgctgagtaacatactataatttttatgcttccatgtaattaaactcatttaataaagttaaaatctaatgatgacagggtgtgggggttaattctgaatgcatgtgctattaaaccaaacctggaatttttctgtgagttcaagtataaattggaactcagaggtgtccagagtggtagaaagattagaaattacttcatatgaaaaatgactggaggaactagtttagctcgggagagaaaaaaacctcaagatatttagagaacttacatgtgggaaagggggctgccttattgtgggttgatcctaaggtcagacacaggttgagtggaaattacaaggaagcagattttggtttggcaatgtggcagtgctcagaaatgaaattgatgatgatcagaagtggttcagatagtagttggatgacagaagttagaagatattcttgtattaggtggaaagattggattggatgattattcaggccccttctaactttactctgtaattttaaaccctcaagaatgatgagagagccccaacaaagaatgagatgtaaaaatagtaattttctcaaatacccaaaagcctaatctgcaagttaaagttgtgtgtgagcttttgtgaagaatgtagagactatgactacatccaaaatattaaggaaccaaaacgtaaaattcagtaacagtagtgccgagtaaagttgtgtaagtatgtggtatcgcaagacccagtagcataaataaactagtacttacagagtgcttgcaatatgtcaggcataattctaagagctttatatgtactaactgatttaatcctttataatttttagagttaggttctattattttttcctatcttacagaaaaactcaggcacagagcaatcaagtgacttactcagg

SEQ ID NO: 46426 - DNA, 1055 bp, Homo sapiens
catatactcatccctctctctccctttcttccacgtgttttccctagactgtcataccaatatacctactgtgcttatagatagcacttgtcacagtgtgttgtggccatttatttccttgtctgtctcgactggaccatgaattctttaagatcaagtaatgtgccttcaacttcagtttccccagggcttatcagagcgtctcatacattatagagactcaataaatgtatactgaaaaaatatatgagcagtcacaaaataatgagaaaattacagttgttagagtatgaagaaagggaggcaaagagttgtagcaaaagataaagctggagaaattggttgttataagattatgctacaatcctatatgctgtgctgaagaatttgaacttatatcattagacagtggaggttttttagtgagagaactgacatgatcagctttgattttcaggaggatatcctgccttcagttcttcacccatgtctaaaatgcctactagtagaatactcaatggacacagatgcataatggtttgggcctggagacacaaataacagaattttttgcttcctgctttcagaatttatttttgtagctattttgctcagtagattataacagcatgataatgaggccaaggtcatggtttaaatccctgagtgagtcagtcagtgcagtggccacagctgactgttaatctttgccagttgtcagatgacaacatgttatttcttgaccaggaattgggtgagagactatgactggttcatccaaagttaatcaccattattgtagaagcaactcaaagtacatggctattggttataggactataatttcattttaatgaaaataatagtattatattagtgatgaccaaagagcacaacctcagagagaaacatacattgtttgttcctggagaagaagctagagattagtaaaatttaattattggaattcaaggccaaaaaataatgaaaaacttaatggatgttagtgtaggtaagcattattaattactttttgtgtatttagcaatatagga

SEQ ID NO: 46427 - DNA, 1046 bp, Homo sapiens
tccagcttggcagacagagcaggactccatctcaaaaataaataaataaataaacaaacaaatagagttgcagaaaataccattcatcttcctttagtcaaaaacatagggctgagtatggtggctcacgcctgtaatcccagcactttgggaggccaaggcaggtagatcacctgaggtcaggagttccagaccagcctgaccaacatggagaaaccccgtctctactaaaaatacaaaattagccgggcgtggtggcgcatgcctgtaatcccagctactcgggagactgaggcaggagaatcacttgaacccatgaggcagaggttgcggtgagccgagatcgcgccactgcactccagcctgggcaacaagagcaaaactccatctcaaaaaaaaaaaaaaaaaaaaaaacccataacatagtgagtgtggtggttgtaggtaccattgacattaaaatttgatcaaagtaacttactttggcagttaacctctctgagacatagcttgtacatctgtaagattgaggtaatatttcctacctcatggagttcctgtagtgataaaatcatatatgcaagggctttatagtccagtgccaagcatattcaaattcaataactgactattccataaacaatgatgggggggaatcccacatgccaggcattgttctgatgagtactactcttgacttcaagctccagagccctgcttgagagcacctctccctggctctccgcaccacatgcttccctaagaggcaaggaatccacagggttatggagaaatgagtgctgctctttctcgctccacttctagaccacactcttggtacccagaatcctagattttcccatccaagtggcctaagtctacatgcaggacctccctcgtgtcttcctgggatctatcttcctggggctggatggaactgctagcatgaatatcccaggccccaggggagtgaggagcttggatggactgtggctaggcaggctgcggtgtccacaagcacgagcataaggcctctcatggtgcag

SEQ ID NO: 46428 - DNA, 1094 bp, Homo sapiens
ataggtaagagaatttaatttttccttcttagacccaaaagcaacaatgagtaacagaatttttaaccacaacacattcttaatagaagggtgtttttttttttttttatcttagtaccttgttgttaactatcttaagatcttttcttatttttgtaggcttctgttttggaaaatctgaggctagcggtacgatctcagcttggatttacttcagtcaggcttcctatggcaggcagatcaagcaacatttggaaccgtatttttaattttgcaagatcacgtcattctgggtcattggctttggtctcagcagatggagatgaggttgtccctagtcagagtaccagtagagaacctgagagaaatcatactcacagaagtttgttttccgtggagtctgatgatacagacacagaaaatgagagaagagatatggcaggagcatctggtggggttgcagctcctttgcctcaaaaagtccctcccacaacggcagtagaagcgacagtaggagcatgtgcaagttcctcaactcagagtacccgaggtggtcatgcagataatggaagggatgtgacaagtgtggaacccccaagtgtgagtccagcacgtcaccagcttacaagtgcactcagtcgtatgactcaggggctacgctgggtacgttttacattaggacgatcaagttccctaagtcagaaccagagtcctttgagacaacttgataatggggtaagtggaagagaagatgatgatgatgttgaaatgctaattccaatttctgatggatcttcagactttgatgtgaatgactgctccagacctcttcttgatcttgcctcagatcaaggacaagggcttagacaaccatataatgcaacaaatcctggagtaaggccaagtaatcgagatggcccctgtgagcgctgtggtattgtccacactgcccagataccagacacttgcttagaagtaacactgaaaaacgaaacgagtgatgatgaggctttgttactttgttaggtacgaatcacataagggagattgtatacaagttggagcaatatccatttattattttgtaactttac

SEQ ID NO: 46429 - DNA, 1035 bp, Homo sapiens
gaattgtactgctataaatatgcatgtgcaagtatctttttcatatgacttcttttcctctgggtagatacctagtagtgggattgctgtatcaaatggtagatctacttgtagttctttaagtaatctccacacagttttccatagtgcttgtactagtttacattcccactggcaatgtaaaagtgttccctgttcaccacattccatgccaatatctgttattttatgatttcttgattatggccactcttgcaggagtaaggtggtactgcattgtggttttgatttgcatttccctgatcattagtgatgttgagcatttttttcatgtttattggccatttgtatatcttctttaaagaattgtttattcatgtccttagcagacttttcaataggattatttgtttttttttttcttactgctctgagttccttgtagattctagatattagtcctttgttggatgcatagttagggaagattttgtcccactctgtgggttgtctgtttactctgctgattatttcttttgctttgcagaagctttttagtttaattaagtcccatctatttgtctttgtttttgtggcatttgcttttgggttctttgccatgaagtctttgcctaagccagtgtctggaagggtttttcaaatgttatcttctagaatttttatggtttcaggtcttagatttaagtccttgatccatgttgagttgatttttgcataaaatgaaagatgaggatccagtttcattcttctacatgtgacctcccaattatcccagcatcatttgttgaatagagtgtgctttccccacttcatacatgtttttgtttgctttgtcaaagatcaattgactgtaagtgttgggctttatttctgggttctctattgtgttccattggtctacgtgcctttttgtttgtttgtttctgtttttttttgtttgtttgtttttgatgaagtcttactctgtcacacaagctggagtgcagtggtgtgatctcaattcactgcagcctt

SEQ ID NO: 46430 - DNA, 1030 bp, Homo sapiens
cgtgttggcaaggctggcctcaaactcctgacctcaagtgatctgcccgcctcggcctcccaaagtgctggaattacaggtgtgagccactgcacccagcctaattttcttttttttttcataatgatagttttgtttttttagttagctatgcggtgctgatttgtgtctttcttatctcccctgattactccctccctgccctgtcccctactctcatccctacacctgagaatataagaattgtaggtcctttcctcagaaagtaatgcccctgcgcacattcacagaaaattttgtacataatgcgcgattctagaatgtctaaaagctcatttatgacctctagatccttgcttttcaaagtgctcttatagaaacagctacattggtcctgtctggtagctggttagaaatgctgaatctcagggcctgtgccagataccaaattggaatcttcattttaacagatcccttgtgatttatttgatattcaggtttgagaagcattgctgtaggaggttagaaacttctgtgatgtatgtgatatatattcttttcctgttgtgttaccttttacatatctggagtatcatctacagcacttttaaaaaaaaatcatgacttgatcaccaaaattgtaaagtagaaatattttgaagtagttacaatatagtatagtatctgaatagcaagctatgctatatgaagtagcaggaggcaagcagggactgatgtatacactcattcttgtaacaatagcaaacagttacatagtagttactatgagccaggcagcattctaatcattgtgtttttgtttatgtatatgtgtttgtatatatgtgtcttagtccatttggagcactgtaacaaaataccatagactgagtggcttataaagaatagaaatttctcacagttctggcggctgggaagtccagcatcgaggcactggcagatttgatgtctggtaagggctcactttctgattcatagacaatgtctttttgctgtgtcctcacatggc

SEQ ID NO: 46431 - DNA, 1040 bp, Homo sapiens
tcgcaggactccacagttattgaggaatccaaagaatggtttttgtataggagctatatatgtttttaagaatattaggaattaaaattgagtaattattaaaacattaattcgtttaaaatgacaataagaaacctattacatattaccgtaaataacatgttaaataaaaatatgtaagatgacaactatattttccaacagaaacaaaaattttttgagaatagtggcattgtcttagtttttgcaattaccatagggtcagatttatatgtaaaacatatttagtataatgccagacaatacttgttgaataaatgaattcatctatctataaatggagtaaattacatttatgtgattcctaatgttgaatcatttttgcattcattcatagggcataccaccttgctaatgatatattttaatctgctagaatacatttactgataatttttatactttgcatttatatttatgacatcagtccatagtcagtcttagctttcttctgccctctacctctttttttccttcctgtaacctaacctccctcttcttctgcttgattttcatatctgttaatccattcttttagatgcacttacgatcttttttttgttgagttcagtgtttagaagtagtataaaagattctagtgttccagttattattattttgccttttaagattagaaaaagagaagtaagtgattgtttatgaactatataggtactgtaacaggaaagcaaaaattaaaaattttgtactaataaatgccgaggggagaaatgttttcattcctagtatgtttagactttatttcactaaccaagataatacagatgagcctgtaagaagtagatcccttcttacgcatcagctataggattaagtaagccagtaagagacctcagtggagatagatcagttccattagaagtggaactcacatctgaaggcaggagctgtgtgggaggtaaaatggagatgctaaatgaggactgagctcaagtcagggggtaggactcctgtattct

SEQ ID NO: 46432 - DNA, 1052 bp, Homo sapiens
tgttcaaggacctgtaattatctttcaggggctactgtatcttaaccgcattcaatgtgcctaagagttaggagagagtaaaggttgacctctgccacctttgaaagtttgaagggataaaaatatcagtggtgacaaccacaagctttgctacgcattgtcctaggcttactgtaagaggaaaaagtgctttgtcatttttcacatagggatgtctcgcttttacaaatctatgggagtttccaaaacctctgtctcctagtcaatagaagctgttagtcttgctcacctcctaaaccacaatttggtaattctgacagttccgttgctttatcctttccacttctgtttgtctcccagattagtgtttcctaacttttactcaaacccacccttaaaatacacattgcttcgggtactatgtacatagagaaaaaagttaatgaaatcgtactcttaactacctgtgcactcagatgttttctatttattcctcctctttctcacccttcccttcttcatttgctggtctggactcattaaataaattttggatccactaataaattgcagtccttagcttgaaaaacactacccaagatgaagccttaaaatatagtttagaggccaggcgtggtgactcaagcctgtaatcccagcactttgggaggctgaggcgggtgagtctcctgaagtcaggagtttgagaccagcctggccaacatggcgaaaccccgtctctattaaaaatacaaaaattagccaggtgtgctggtacatgcctgtaatcccagctactcaggaggctgaggcaggagaatcacttgaaccaggaaggtggaggttacagtgagccaagattgcacgattgtattctagcctgggtgacgagtgaaactctgtctcaaaaaataaataaataaataaatgtaatttagaatgtttcttgtttgtatatcattttacaataaacttcaagagttgcagatggttaatttttggttacttgctgccagagcatttgatagtcgtagaactgttcacagcatata

SEQ ID NO: 46433 - DNA, 1058 bp, Homo sapiens
gagcagcctaactgggacgcaccccccagtaggggcagactgacacctcacacagccagatactcctctgagacaaaacttccagaggaacgatgagacagcagcattcacggttcatgaaaaaccactgttctgcagacaccgctgctgctacctaggcaaacagcatctggagtggacctctagcaaactccaacagacctgcagctgagggtcctgtctgtttgttagaaggaaaactaacaaacagaaaggacatccacaccaaaaacccatctgtacatcaccatcatcaaagaccaaaagtagataaaaccacaaagatggggaaaaaacaaagcagaaaaactggaaactctaaaaagcagagcacctctcctcctccaaaggatcacagttcctcaccagcaatggaacaaagctggacggagaaggacttcgacgagttgagagaagaaggcttcagacaatcaaactacgagctacaggaggaaattaaaaccaaaggcaaagaagttaaaatctttgaaaaaaatttagacgaatgtataactagaataaccaatacagagaagtgcttaaaggagctgttggagctgaaagccaaggctcgagaactacgtgaagaatgcagaagcctcaggagccgatgtgatcaactagaagaaagggtatcagcgatggaagatgaaatgaagcgagaagggaagtttagagaaaaaagaataaaaagaaacaaacaaagcctccaagaaatatgggactatgtgaaaagaccaaatctacgtctgattggtgtatctgaaagtgatggggagaatggaaccaagttggaaaacactctgcaggatattatccaggagaacttccccaatctagcaaggcaggccaacattcagattcaggaaatacagagaacaccacaaagattctccttgagaagagcaactccaagacacataattatcagattcaccaaagttgaaatgaaggaaaaaatgttaagggcagccagagagaaaggacgggttacccacaaagggaagcccatcagacta

SEQ ID NO: 46434 - DNA, 1028 bp, Homo sapiens
gaaagctggtcggctccttttgctttctttattgctccagggtaaaggcattgtggaagaaacaaatgtctgttttcttcttttgtagcaatgagctgagcagcttcactaaagaccttcaagccttgcagggttgctaggtgggatgaaaataagtttccattgggggaaggctgcttcaaattcccatttttctcacattttattatgcttctttcgtagctgacatcagggctgtttcgttcgctttctggattcggaaacactttgccgtccagttgacccaggtcattacgctgatgtgcagtaaccgggcagaaattctgcttgtgggccagatagttttctaccttattgaaactgatcttgcacacagtgcactcgtgatagtccagcagccttttgggagacgtggtcgtccgctcagactgagataaacactttttgctgagatctatgggcacgtccatctctaggcaggaaacactggaatgagtagtatcacatttggaaactggaacacacttgttgatcgtcagagaagtttccaagtgtttagagacaattcctggaaagatatcacatcttgggtggtagcactctcctagcccttctgtgggttcttgagtggaggtacaaggattattgaggttggctacgtcaagaaatctctgctgaaccagtggaggcctttgttcctgctcaggtaggcacatctcatacatctttctgcgcttgcgtgtgcgcatggttctctgcatggcaggcactttgttggaagcagacctcttcagtggagggtcgtggcgtgtagcacagtaatactgtttgtggaccatgtatgtttcgtgccggctgaaggtaatgttgcaagcttcacaggtagtcttatttgggtcactttccccatccactaaggggacactgggatttttcacatcaacaggttttccattaattttgtcatcattgttactggaggtggagagcttcttagtttgagtggaaaagtccttgtcatggccctt

SEQ ID NO: 46435 - DNA, 1036 bp, Homo sapiens
aacacctattagcataaacaccatccaggaaaacataacctcaccgagtgaactaaataaggcaccagggaccaattctggaaacagagatatgtgaactttcagacagagaattcaaaataactgtgttgaggaaactcaaagaaattcaagataacacagagaaagaattcagaattctatcagattaacttaatagagattgaaattaaaaaaaaattacaccaaaattccagagctgaaaatgcaattggcatactgaagaatgtgtcagagtcttttagtagcagaattgatcaaggaaatgaaaaaaaaaggacttaaaacaatgcagcactcctatacgacgtacaaaatagcctcaaaagaccagatctaagagttcttggccttaaagaggagttagagaaagagataagggtagaaatttattcaaagggataataacagagaacttcccaatcctagaggaagatatcaatatttaaatacaggaatgttatagaacaccaagaagatttgatccaaagaagactacctcacagcatttaataattaaactcctaaaggtcaacaataaagaaagaatcctaaaagcaacaataggaaagaaacaacatacaatggtactccaatacctctggcagcagactcttccatggaaaccttagatgccaggagagagtgacatgacatatttaaagtgctgaaggaaaaaatgtataccccagaatggtacatctggtgaaaatatccttcaaacatgaaggagaaataaagactttcccaaacaaacaaaattgactgattttattaacatcagacctgtcctacaagaaacactaaagggagtacttcagtcagaaggaaaaggacattaatgagcaaaaagtaatcacctgagtgtacaaaactcgctggtaatattaaatacacaggaaaactattattatataattatatattttatatattattaaactattataacactgtaactgttgtgtgtaaactactcttatcctaactagaatga

SEQ ID NO: 46436 - DNA, 1031 bp, Homo sapiens
cttctaacagatagtatcaatggattttgaactttcatacacagacctcttttcaaatcttgtaaaattatgtctctttcctccagaaacatgtatgggatcacaggctcaaaataaatattagagtattctttatataaggattaaggatgctgcctaattgtaacgattgtataatagtttggaacttgttttcaaattattgaaagtttcattttactccacacctgccattttagatcatacattctgacatgtaaccatttaatatgatatattgtttctgtctcccatgccttctctccttcttatcttaaccacgtccttgctattccaagaataagaaaattttcagattcaagtcatctggctggagcgctgtagaatttccccctcggatattcttaaaaagtctgtctcttaggggttgctgacatcaaaattgaaagatttgaaattgacctcttattcatttgcctttcttttctttgacctgaatgtaggtatgtgtcaatttagaatggaacctgatgggtaataagcagctttgcgtgcatgtaccagacatgttctataaatatggctcctataaatggtagttatttattctgagaaaccagccatccaataatgtagatgtgcattatttctgagctgacatgctgaatttccctggagtttgacaaaatgaaaacaggttacatttgctcctcaaatcctagcaatggttaaaaactgcattttcatgcaaacataaattacaaatggaattttgataactgattaccccccaaaatgcacacaaaccctttgtaatcctgccctggagtgcagtatagttggctcattgcatatgctgacagtgtttgtcaggctgttcaatcactgctacttcccatggcaaactgtacaggggcgtttagaaaaccagtatgtctctatttccctaaatctactattagggagtagaatcgtcagtgcagagcactgctgcttcacaataggtataatcctgagtgtgtatcttcttt

SEQ ID NO: 46437 - DNA, 1069 bp, Homo sapiens
tctttttcctataaattgccaagcttatacttttttaagaatggtcaattttttttagaaaggtgtttaattatctttttttatatttgtaagatctaaataaatagtatgacagtagatataagaataagtgacatagtcagtaactgttgtctcacatatataacctctaaatttctttttttttttttcactttgtataatccacctctcctctttggtggggattggcctgagtttcaggagtgaggtatcttttactcagtggtagatataactgaaacaaaaaaaggtaaaaagaagaggaagaaaaccgatgaaatagggaaaagtaatgaaagaaaaaaattgacttggaggaattctagaaacacattttgacttttaccttctaaaccagtggatggttgagcagatatgcaggcatctaaagaagccagaggagtggtaattattcctggattctctgcagacaattcagtccatgaatatcaataacttttttaaaaactttagctgatatggcttggctgtgtctccacccaaaatctcctcttgaattttaattcccataacccccacatgtcaagggcaggatgaggtggaagtaatcagatcatgggggtggtttcccccatgctgttctcatgatagtgagtaagtctcatgggatctgatggttttgtaagcatctggcatttcccctacttgcactcactccatcctgccaccctgtgaagaggtgcctgtttctcttttgccttctgtcatgattgtaagtttgtggaggcctccccagcaatgcagaaccgtgagtcaattaaacctctttcatttataaattacccaatcttgggtatttcttcatagcagtgtgagaacgaactaatacatgggcatttatatatttctgtactattcatctatattgaccactacttttggttcttttagacaatactgtttctatggaggcatgcatcctcaccacctgtatgtgaaactgcactttaagaattgtctgttttgctctttgaattatccttattacagtctaatatttgggagc

SEQ ID NO: 46438 - DNA, 1030 bp, Homo sapiens
ttttattttatactttcttctaaatgttttaatgtgttcagcatttcctttaggttcacaatatatttgggtttttttacatatcttatgacatatggtgaaaaattcatttttatgtgaatatccaattattttagcaacatttatagaaaagacaatcctgtctgcctatatgatctttgttacatttcttgaaatcatttgtccatatgtttgtggctctattttctggactcttgattgtatctgatttatcaatttgcttatatttatactaatattactttaattactgtaactttatactaaaacttaaatcagatagtcttagttctccaactttgtttttctttatcagagttgttttactttttgtatattctttgctcttccacatacgttttagaatcagtttactaagttgctacaaaaagaccttctgggacttttattgggattaaatttggtttatagatcaagttggaaataattacaatttaataatgttgcatcttttgactcacaaatactacatatttttttaactatttggttaggttttctttaattactctcaatgttttcttgttttcagcatacaggggtagcacaactttgtcagattttatcctcaggcgtttcatttttgatgctatttaaattagtattgtctatttaatttaattcctgattgttcattgctaggatataaaaatataattatttcatatactgatttcatatcctgcaagctgctaaaatacctatcagttctagtaggttttggtagattccattggattttctatttagatggttaggttgtctatgaataacaacagttttatttcttccttttgtttttttgagtcaggatcttgctctgttgcccaggttagagtacaagagcataatcatggctcactacagccttgacctccagggcacaggtgatcctctcaccttagtctcctgagtagctgagatcatagacatgcagcaccacatccggctaattttttgtattttt

SEQ ID NO: 46439 - DNA, 1030 bp, Homo sapiens
tttttaaataatacaattttcatggactctttacataaagtcttagctcacataaactgtttcatacaatcaagtgtgaaaaagccagcagtcctccctggaatacaattcccagattgaactgattaatctcaataagaagggagtaattaatgagtctgatagtatcctgcttgcttaataatgttaataacttgaatgtggcctaatcttaatgtgtgttgaatttttactttcatttgtgaattataataaaaaacagggcaaaatcacactgaattctaaaaattacattgaaaaaatgttctatacattcatcctctaagagaaaattaagaattaacaaacatttctttaacagagtataagaagaacatgtaaaaaaatttatacaataggacttcaagttaacttttaaaagagtcaataaatccaataaaatctttatttgcttgtttgtgctgttcaaatgttttttttcaaaattccatgtagctctggtcctctcttggaaggatttttgaattatgtatatgagataattgtctcaagacacccaatagattacattaattttaaaaccaaaataattgccatttatctctgcatcttcacaatcactgtgataccacagtaaaatacaatttgtgtgtgggtgtgtgtgtgtgtctgtgtgactgtgtgtgtgtgtgtgtgtgattagttggttagttagctactgttggttcaattggttttgtttagtaaatggatagaggacagaatgaataaagttatttcatggtgtctcatgttttagttaagagaatgaattatctgtgctcatatatatatatatatatatatatatatatatagcacctgtggaaaaagtctcatatctatatgagctctggttcatgcatcgttcactttcattgctacaaagcaccttgtgacattatattagcacttaccagtttcacatatcataacatatagtgggattagcagactgtaaaaagaagtgacaagttgctggtcaaacctg

SEQ ID NO: 46440 - DNA, 1047 bp, Homo sapiens
ttcactgtccattcatgcatgcaggtagacaggtgatgtttggaaagtatcacagctgcagtctggcagaaagaacatgattgattccctctgctttcctctgctgagggagtatgcagcttttcatttcattttagagacaaatggtctgcacgggaaggaagcacatgggtagctgtgtctttgttcatttcgctaacaaggccagagctgtgggtccatctctgcataagccagttagtgtttctctgctcctaaccacagatttgcacttgaacctttgccagctgtttcccaagtgcatgccattggatgtgagggagacctgaaatgagtgcagatagattagcttaaaatcatcacaactttttcaaacaaaacaaagcataaagcatgaagcccttaatggcagatcagaagttttatctttgtgtattcaaaggtcaaaacctttataccacatgtgctgctgtcagagtatatgctatatgataggaacaaaacttaagaagctgtgaccaacttgaatattgaaacttttgttatcatttttatctaaaaaaattaaatttttggtggcaagttagtgtaaccagtcctagaaaatagtggttggaatgaggatgatctcattgattcagaaatcatcaagaggtctacaaaaccagtatgcctcctgttttaatagaggacataactagagaaatgttcttagttgtctagctcccttgccctgggatttgtgcctagttctttgaggatttgtaggactcagatttctctaacaatcaataatcctttttattttctttatattttcacttttagataacatccatctatgatcatttatatgattttaagtgagtttgagaacaaccttgtaatgtaaataaggtattagtcttgaagtttacctggttggttatttggcaataaccatttttatctgaccattagtgacttaaacaactctgagaagaataattgacaataaagtggaaaaaaaaagcatagtcctatactaacaaaattaattctaagaca

SEQ ID NO: 46441 - DNA, 1028 bp, Homo sapiens
ctcggctgagaaggaaggaaacaagacttcatgtttccttcaccagtaaccaaagggccaaaagttcctacatggagacatcattaatcaccgtttaagactgtagctcaaccaagccacattaatagctaacgaagatttctggatgattacatagctcagcagctaaaaacaattattaaatatgccctagtggactagtaaaagccccagataggaaaaataggaagccaataataagtatttaccatgtgtcataggaagccagtagtaagtatttaccatgtgtcaggcatttttatgtcctctgtttctctaaataaactaacctaaggagaaagaagggaatcttaacatttgaatgccttgcttaagcctggaaatactaaaatttaggtggtattatttatatgttattgatgaggaagcatactcacatggttgcctaaggcaggagtccgcagcccctgggctgtggactggtaccagtctgtggcagcattcgattcttataggactgtgaaccctagtgtgaactaagcatgagagggatctaggttgcgcactccttaagagaatctaatgtggcctaccccccatccgtggaaaacttgtcttccacgaaaccggtgcctggtgccaaaacgattggggactgctggcttaaggtaatacctaatacaagttaaagtaaggaaaagactcttaagttatgtcacactaaccttccttacatcattcattgttgccttataattagaaattgcaaagagttaagggatacatatttagtaggttgtgcgaacaggtcttgatcaccaaactaggtttctcagcaccattatcttccaataagagcaaagggtactctatttttctacgggtataatcattggatacaagtggccccttacacacaaaacctgttggaacatagaaaactctgaagaacatctctttgatttttcttttttctatttatgctctgctccttcaagactatctgctatatgaataattaatgctca

SEQ ID NO: 46442 - DNA, 1050 bp, Homo sapiens
tagaagattaacaacaacaataataaatagaacaattataacaatatgccagcatcactactcttgtactttggggccattactaagtaaaaaatggttccttgaacataagctctgtgatatcaagacacttgatagctggaatagctactatgtaactgatgggcgggtagcgtatacagtgtcgatatgctggacaaagggatgattcaagtcctaggtgagacagtaggacaatacaagatgtcatcatgctagccagaacagtttacaatttaaagcttatcaattgtttatttctggagttttctatttaatattttcagactgggattgactgctgataacagaaaccacagaaagtggaactacggataagtgggaactactgtagttgggttgtagaactaacctggcagatgtgtaagatagattgtagagactcaagaggtaaagtagttagaaaactaagaaatagtaatggagcctggactagggtagtgactagaataagaatcaatcagacagtaaatatttatcgtctcctgtgtatgaggagtcatgctgctaattgctggacataacggcagtgaatgaggaagatacggtgcgtgcactttggttacatgtatacggtctaccttggaagcagatattcagtaaaacaactatagcaaaaataggtgctatgaaagcacctaactgatgtatcacagatgggagaggtgtcttagaaggcttatgagggtcttattttagctgagacctgatagcttccatgaagataaaagacagtatataaacacacatacatacatgcatgtatactacatactcttaaatattttacatgcatatgtaggtactcttccatcagcggaactgacttaacctatttactaagactggtgtgtttttaattctgataaattaagctctgcaatggccctcttcaacctgatcataaaattggaaaaatacaaaatgcagattggttgatatcaaagagtattttagatcaagatcttcatggtctggtctgctccctct

SEQ ID NO: 46443 - DNA, 1055 bp, Homo sapiens
gctgagattacaggcctattaatcatttggtttcttttactgagtgtattttcatgttactgaaaccagattatttctacattctttaattcagtcagagtgataatcagcagcttagataaactgagatgccatcaattatttactagtattccttgggccttatttcaggtttttctttgacctgattcacttcgaaaagtaaagatcaacaaataaaagatcaacaagcacagtgcaaacaaagatccacaaagtaagatatggctcagagcgtgcaggcatttatggatcttgatgcttgttgcaaaattacaccagctatgttggaatgagtcttagaatatggatgtaaagaaagagagagggatagagaattctagttagagttattacataagatggaatttttttttataaagacacaggatcttgttctgtcacccaagctggagtacagtggcgcaatcatagcttactgcagtctgaaactgctgggctcaaatgatactcacaccttagcctctcgagtatctgggactataggtgcaggccactgtacgtgcgtgcgtgtgtatgtgtgtgtgtgtctgtgcgaccatgccagtgtgtgtgtgtgtgtgtgtgtgtgcacatgtgcacagaatcttgctgtgttgctcagactggtctcagacttctggcctcagcctcccaaagtgttggaattataggtatgagccaccacatccagcctagaatggaattttcactctatggtcttaaaaatctaagattaaatatcatttccttaggtaagctgttcccaaatctccagattagaactggtagacctttttgcatttcacatacataggtccttccactttttcttttttctttctttttctttttttttgacatgggggtctcactttgttgcccatgctggaatgcagtgatgccatctcagctcactgtaacctctgcctcccaagatcaagcgatgtttaagtcaagacccccttgacttaaactctgtaaaggctggcaacagaggatgttttgccagtagc

SEQ ID NO: 46444 - DNA, 1025 bp, Homo sapiens
catgctgattgatatttagtgagcttgtcagcaaaacccgtagattagaaatataacttaaatatttatttaagagtgtattaaatacaaagaagttattgtcattcagtagggaatgaatacccttatgattggggaagtttattactgtttattgaccaagggagacttttggtagtagaggaatttgaaagctttcagaatgcttctaggatgagactttagagaacttggtttgaaagacataataagcttaaggtgtggtctggaatcaggataggaacaattgttttgggaagatgctaggtaatttggctagaaattaatggtaaagaaggagaaaacaagaagattgggatattctggggcaatctgctaaacaatgttgaatcagacttaccttgaccgttgacttatttttacaggagtcttacacatataaagacccaattacagaatttgttgaatgtttatatgttaactttgactttgatggggctcagaaaaagctgagggaatgtgaatcagtaagtgtgaatttttatttataaactaatactattcttaaatttttggatattgtaacgttaatcttgcagtgtcttccttaaagtaatgaagtaattataacggaaatatgcttattaatcttaaaaaggcctaaatggctcatgtttattaaccttaaaatggcttaaatggcttgtgtttattaatcttaaaatgggaatgtgctagagtgatgacttttttaatgttgttgccatgtgtttatcccttttgtgagggagtttgttaaaacattgggggtaatttaaatttacagacatatccataatttcatgtcttaaatctcgaatgaatatttttaatatttcatatgtacaggcaaggtcactttgaattgcaaataacaactgtgtttttaattttggttcatagatgggcttatctttagaatatttcccatggttgtatttaacatttgtgataaaccaggcaattcattgtaattacgaatttta

SEQ ID NO: 46445 - DNA, 1050 bp, Homo sapiens
tagccagtgtgtttttggtgtcttttcctagaaattatttattcttgagtggatattctttttatacttcacctcgtttagagggcattcagggtggctaagtgggactagatattattaagtgttcaattctagggtcctctaaagagtttaaacaacattttgtgggaatctataatataataaaatacagatttactcatcattgcctgggggaacttagaagataaggtattgaagctggaccttgaaggatggctaggatttaggctttcaggggtatgtatttgggagaccaatctgtgtggagtgaacttgaagaaaagagagaggaagctgtcaatggtagtgtgatgggagatgtagctggatggataatttggggcttgaatattcacctaaaagaaatggactttattgacagataattctgagatatgtatagtgtctggccctcagaggtgctaaattagtatttattgggtaaataaatagggagctatttgaggaaattaagcaggagaaataagggtaaacacctaattacagggcattgtcccatgttgatcatcacaacagcaagatttgctaaatattagccaagaccctgttaatgtttacctgacatctattccttcctaattcctactgctaccactttaaccaatgtcttgtaatattgtaatattccttccccgttgcttccagtctttcatcccctgaattatttaatttaagtggctgattttctcattagtatgagtgctttgcacataggttttcacacatttttttctaatgggtgaatgaaagtcatcgcttagtagccttttggaacagactgacagcatgtcaatgaaccttgcaaaatcctgttactcaaaaataataataggataattagcctcttgattgagtcttccatctcaccccatattaaagaaatagtggctagcattctcctcatttggattcctgaaactggattctgtttttaaatttccttggaggagattttcttataatactcattcttaagtgtttgcagtc

SEQ ID NO: 46446 - DNA, 1037 bp, Homo sapiens
ggaaagcaactgtcagaaaaattataacctttagaaatggaatattagatcccagcagaattttttcacaaaaattaatgaaagtgaggcatcaaaatttctagcccagagcattgcctcatgcccatagccctatcacttaggctaaggcaggaggatcagttgagcctgggagactgagtagtgatcatttcactgcacttcagcctgggtgacagaatgagaccctgctctaaaatttttttttcagttaagtgtctgaggggttcttttcttttctttctttccttttctttcttttcctttcccttttcttttcattcccagttctttttctttttcttttcatcctgtcctgtcctgtcctgtcctttcctgtctgtccatgtctcgctctgtcgcccagtctggagtgcagtggtggaatcttggcttactgcagcctcggttcactcactccctgggctcagatgatccttcctcccaattcagcctcctgagtagctgggactataggctcacaccactacgcccaggcatgtgtagtacttttatcagccaagtaaggaaagtcatttaccagtggtgatccagttaaaacatgtttgattttagcagccagagaaatctgtccagtgaagtaaacttgtttaaaactattaacctttcagcgagaacagttgctctgagttgaggatattgacagcatgttgatctggggagagattgaaagtgcccccaacccgttatcaaacactgaatggctctggaagttaacttttgcagcagacttgataatgtttcttagtttgtgccatctaaaattgcaaaacaaaagtgtttatatgtagaatttatattgcagtaaagtcatttcagtgacaacatggtatgaatcataagtaataaaaagccagctgctttacacattttgtgttctgtcagaagttaaaacacaaagggagaccttcattgctaaataggattgtagcagatgcatttccaagttcaaattatagttgcagaaagttttagac

SEQ ID NO: 46447 - DNA, 1028 bp, Homo sapiens
tttgtccttaaaatgaaagtttagataccagtgcaggttaaagtctcttacatcacatatattaccatttctgccataatttattctgaatctaaaatggagatgatttacacatttgaaaagtgttgaacttttaaatgtaacataatatataagataaggtggcaggtgtaagatagagcagtgttcgtaggctatcggagatgaggctttgccactaaatgtagatgctgttaggaaaaagaatccatttgtaatacaatgccctattactctccacttgtagaaagaaagatgcaaagttcagttagtaaaagagtattttgttttctcaataaaaataatctgaattttctaagaaatttcaagttttactattaaccaatccactatgtgatgtccagaatttgtacagacagacctttcctgctgttattttccttatattttctaattagttcctggtaaaaaaaactctttgtcgtgcagatagtttacctgctttagctcactcaggatgacctccaaggtcctcatctggaggtctacttagtgtcctacctgtgtttttgtttttctctttttaaagcctgtccttcatgaaatgcacttccctttttgttctttcttgtccaaaacctatctgtttttaaggtccagctcagatttacttccttcgtgaagtcatttcagtgtattttgtttagcttgtatttggtgtttagttacttaaagctgttaaaataaacaaaacttataatagcttcatctccccaacttgtaagcatagttacagacagagttgtcatttttcatgttcttgtagcacatagtagatacttaagtatttttaatttggtggcatattttatgttttgattattaaattttctgtgtttaattatgaaacactgtaggaaaactcccataaagctgtacagttggggaagattgtgctagaatgaaaaaataaactaaaacattttacttacctagcttgaaatttcacttcatagcacaaatactga

SEQ ID NO: 46448 - DNA, 1034 bp, Homo sapiens
tcaaggacatagttgaaactttttgtgtgttttttaaaactgcaaaagtgtggtggtgaaaaatatagggactgctagtatagtttgatgccactgctttgatttactctaaagtacaagaagaatttgtttgtttatagtttagtaatttttagtaacttaactgagtgatataaccatcacaagtcagttttagaacatttttattgccccagtaagaaccatcatgcctgtggaactattttctttgaacagaaacagcctgtggaaaagaaaactactcagtagtatgatgacttttagttgtttacaaaagtactgtgtttactgttttcacttgctatagggtcagattgctgtcttattttctgtcttgttaagtcttcttgcctgattttgatttttgcttgattctgacttttttcctaatggaaatatacccagttgacttgacagatcattgtttcacccatttcctggacttcatattcttgaagtgggagagctatttactgttgagattgtgtgtgatttgcatttgtatatctataatcagtatgtgtttttcagttgtctctgtttaagatttatgaaaaaagtagttctaatttcttatagcacagtaggtagttggttgattgcatgttcaatggatattatatgtagattgtaaattgcatatttttaaaaattattttatttttattttttttgagacggagtctcactctgtcgcccaggctgaagtgcagtggcgcaatctcggctcacttcaagctctgcctcccgagttcacgccattctcctgcctcagcctcccgagtagctgggactacaggcgcccaccaccacgcctggctactttttttttttgtatttttagtagagattgggtttcaccgtgttagccaggatggtctctatctcctgacctcgtgacccgcccaccttggaatcccaaagtgctgggattactggtgtgagccaccgtgcctggccatactttttatttttaatataaaagtacgttagag

SEQ ID NO: 46449 - DNA, 1049 bp, Homo sapiens
aagcaaaacaatgaataatgaaacaattttctttctcaacagcttcataatgaaagaatgttacttggttttaaagtcgtagtttccaagaaggtaccgattatgttaaggacttaactgtattaaaaatcaaaacaaattaaaaattttctcattaataaatggtaaattgattcaatttaacacataatagaattttaacgaaagtaactttgaaaacaaaattagtgagaagagtgacattgctttacatttttgcagaccttcagttgctgggttaattgacaactgggttttcatgcctgctttcttgcagtctgttgtgatgtgctttaactgtaggatgaaaaacctagcttcacacatgtagttggaaaagaaaggtgtgttttattaataatatccttttccgataattgtgaatattcttttttgaagatacagtaaaattcagtaagaagtacagataaaataaaactcaacaagaaatagtttttaaaaggttgtttgtaatgtagaatctgaaaccatgtggttaaactttttgggatcctaagctgtactggtattctagactgtattgagctatcttgcacttggaatggatcttttttacccatgcatgattttatagtatcattcattggttgtttgggaaatacttactggtccagtgagttatgcaggtattccagtgtgttgacattatacaacaccagaaaaaccacattcatgaacatcactaccagacccatagaaacgggtttaagcattggaaagctttcaagctcccagtggctgatacaaattttccaaaattctagtttttcttgaaagctctaattttatcatttgtttttcttgaaggacaggctcacttcattttctagaaaatgtctggcaaattcccaagtctgaatgtctgaatagctttagtttgtctgccattctttcaagtaaaaacagtgttctgtgagaaaagcagctggttcatcttgtttctcagttgcacaagtgcttttccttaaggacagccgtgacagtgaagt

SEQ ID NO: 46450 - DNA, 1030 bp, Homo sapiens
gagaaaaaacgtagccttcatttctgttttacagctactgtgccctttttttctatgccagtcaaaatgacactatgctgttagtgccacctattattgaaagtcctatgcagaagacagttttcatctacaattatctaattaaaccacttactatgaaatgttcagtttaattcttgcttttaaaatgttttctgaaatgattataatttataacttctgtaagagtttataaattagagcgtcttcagtagacattattgaatctgtctctaagaacagggtaataatttggaatgtcgagggatcatgtagagagaaggcatagggggtcggacattgatcataatgacctccgtgcatgccttagaaggggctcatttttaattacagttttgaagttagtgatgtttgtcctcctgcctctttcttatatattaatattttttatgtatatatttttaaatcctttagtctgtgagttctccacttcagtctcttcagcagagaacatggctcattcactggtctctgtttgttttcttcaatcaccccaaaggtcgcgataatattattgacctcttcctttatcagccacagtaagttatttcactgtgtaattttggctttgtttagataaaattacatggagttgtttaaacttaaaatatacttttttctatcatttgaatttgttgtcacctgtttttttttttcttcatgtagtagatttgcttgttactgaaaagtatgcatgtgactcttaagtaaactatttgacagagtgtaccctaagccttttaaagtgctatttaaagtgtggtccctgggccagcagcatagaaatcatatagaatctcaggactcaccctagaactaaattagaatctgcattttaataagatcccaggtaactcatgtaaacatcaaagctttagaaatgaggctctagggcatactacttgaaaggaatacgtgcatctttttatatcatctttgctctgtcaactagcttttgtttaatattttg

SEQ ID NO: 46451 - DNA, 1048 bp, Homo sapiens
taatgctgggagtgaattttgagaatgaagatttagtgtcatgttagagttccagcacagtaaatttattgttgctggtcagtgagtgaatgtgccattttgctaagacatggaaacttaaggtaactgctggaaatccagatattgaaactcttctagcatatccacccttgaaagcaggttagtatgaagagccaactgtaatgacatggagtttagccagagtagtacacatgaaccttttgaggattaaaaaacttgctacactgctacaaaaagcttttattctaacacatataacacattctagtgttaatagtattatatttatgtagtatggttttatattagtctgaaaatttctacaagtgacaggtttgtacttgtaggtttggtgaatttttatgtttatttttttaaaatatgacgatacaagttaattcccggtcttaaaaaaatttgagggttagttttaaacttttgcattgcccctaacaaatcttgtgctggaactcaaatgatattttgattaagtgattgaatactgtgatacaaacactaagttaatatgttttacatcaagaacagtcaacatagagttactggaaattctaaaaagttacattcaattcgttttaaaatttttgtcctgtctgagccacaaaacatttgtgttaggcgagagtttgttgcttcctgttggcatattggcaggctaacagtgccaagcttaaaagaatagatatctttttcttttgatttagatagccactaccacaagatctgtgtatttgtttgaagttttgttaatagcaaatctaaaaatcttgtttggatttgggatgagaaatgtcagtgttttactttttagttaattaattttattttttgcagtggcctttttttatttctaaatacttttctggtggttgattattcttttaaatctgtggttagggaaacataagctatgaaagagctattgtaactatgatctgagattagaatttgactctccaaatgacctattgtaggtcagtgttgtata

SEQ ID NO: 46452 - DNA, 1082 bp, Homo sapiens
tcctgatttaatactttatcatatatatatatactccttgaacttggctctaaacaactgtggaatcctaacggtatgtgaaatattttatgccttagtagtaacttttttccagttacctctgccttcagctattggaatataaatatcaatggtttcttcattacgtggggtatagatgagtttaaatggtactattaaccatgaagtatcctattaccgtatatttgacaggcttctagatttagtgcttttgttagagaaggagagttgtgtgaagccaaattaaaaatcaggccttggccaagtgcggtggctcacacctgtaatcacagcactttgggaggctgaggcgggctgatcacctgaggtctggagtttgaaaccagcctggtcaacatgttgaaaccctgtctctactaaaaatacaaaaattagctgggcatggtggcacgcacctgtaatcccagctacttgggaggctgaggcaggagaatcccttgaatctgggaggtggaggttgcagtgagccgagatggtgccactgcactgcagcctgggtgacagaacaagactccatcaataaataaataaatatatatcaggccttcaaattgatgtacttcgttctcactctgtcttctgtttaggaaagtgtattaagtgccttctacagttatcaaaacatccttgtattaactagcctctcatttgagaaattataatttgttaccttggactagtaagtaggtacttaaagtctaagatttcttttttttttttttttttttttttttgagacagggtcttgctctcacccaggtaagagtgcagtggtgccatcatagctcactgcagccttgaactcttgcgctcaagagattctcttgcctcctgaatagctaggactacaagtgtgcatcaccactcatggctaatttttaatttttttttttccaagatggagtcttgctatgttgcccaggctgatctcaaactcctggcctgaagtgatcctccctcctcagcctttcaatgctttgggatttacagccatgagcctctgcaccctgcctgtctaa

SEQ ID NO: 46453 - DNA, 1045 bp, Homo sapiens
tagtatcgtacttacactttcccggaaataatcagccagaggacagtgattatatacgtgagtggtatgagtagtgcaatacaaagttattcagtgtgatccactgcaaatgttcagtttttgttgaagttcttctatgttggaatttcatgtacatttcataatcagtattgtaatacacctatattaatttttatggggacatatctctgctccattaaatcttcaagcaaaattgtgttcccaaagacacattatagcatatttcttctcatgagaaggataagaaaatgtttttgttttggaaaatgcagtcaggtgcagtagctcatgcctgtaatcccagcactttgggaggccaaggtgggtggatcacttgaggtcaggagtatgagaccagcccggccagcgtggtgaaacctcatctctactaaaaatacaaaaattagctgggcatggtggtgcacgcttgtaatcccagctacttgggaggctgaggcaggaggattgcatgaacccgggaggcggaggtggcagtgagccgagattacaccagtgaactccatccggagtgacagagtgagactccgtctcaaaaaacagtaacaacaaaaatgctcataaggtgggcaactatacacatatatcccctgtcccttgatgtctttctttattattagtttgtcttttactagtctgtcaacatctcaagataatgcaaagctaatttaagaaaaattaaatatggcacttggttatacctaaggattgtgtagggtatgtagcatagctgtcatgtatatcggacatgatttttaaatttttatttattatttttttttgagacagagtctcactctgtcgcccaggctggagtgcagtggtgccatctctgttcactgcaacctccacctcccaggttcaagcgattctcctgcctcagcctcccaagtagctgggattacaggcacccgccaccatgcctggctaatttttgtatttttagtagagactgggtctcaccatgtttgccaggctggtcttg

SEQ ID NO: 46454 - DNA, 1021 bp, Homo sapiens
ctggatttgtggttaaaagagattatttaatggatttaaattccattcaacctagttgataacctgtaatagtaatatgtaaatccctctgagtttttcttcaaaaactctgggataatattcacctaagaaaattaaatgagaacaaatataaaaacacttggaaagaagtttctgcaatggagaattaaatgatagataattgggtcctaccctttttttctttcacatccctctgtcaccccaaggctgtatattctctagtttccctcaagagtaggaagaggattcccttttcctttttgtgcctttgtattagtagaaaaaagaaattagggatcggggacatttctgactgagtagcccatggcatatgaatatattgggggtaaataaatatatgtatagtttaaatacactgaaaaatttccagacattctcatgatgagtagcacaatttaacattccttaacattgtagtgctcttctgcatttttaattagctttgagagagaaaagaaccacagtggttgcacaactgaaacagcttcaggcagaaacagaaccaattgtgaagatgtttgaagatccagaaactacaaggcaaatgcagtcaaccaggtaaactcgtcttaattttgaattctaaaaattctcctttctggattaatacaaatgttaattcaaactttatccagtatcccatagtaaaagttcatggtttaaatgagtgctttattcatttttaatttttgtttatccttattttgtaggggccagtataattaataaatgttaatattaacactaagtttttttcctaaaaaaaacttctttagtacttatctatactgattatactacagaaattccatctcctgtttcccccttcctggggacatttggcaatgtctggaaatactttttggttgtcataactggaggggtgctatagggacctagtgagtagaggccagttatgctgttaaacatcctacagtgcataggacaagcactgctg

SEQ ID NO: 46455 - DNA, 1026 bp, Homo sapiens
acaccaacactggtattgtcaggattttttaggtttttattgtaatttttagtatgcatttccttatgattaatgacgttgagaaccttttcatgtgtctgttggccatttggttgtcttcttttgcgaagtgcctatcttttagccatttcaattgcaaggtctgtcttgtcttactcatttataggagttctgcatgtaatttggaaggttcgattttgctctcatggctaaataccctttgaccaccttcatctttattttttgtgggcagtgaaatattgtggcattttcttggatttttctttccttgcaaaattaagttcagtacagaaatcttttcttttgctgaagcatttctgtccgtgaatattttgtagaatctttacatattactcagtacacttcatgttgttgtgagtttgtgtatatgtatctatttgctccctgtactataggttaaattatgcttttttggatcctttgcaaagcaaaagcctgatctgacatggttgacttaaaaacttggtgcaggttgtttcagcaatgtggatggagaagcatataggagtttattactgattacctggatgtggagaagtgacagctatatgtgctttacaggaaagatggcgtgggttttatttatacacagccttgcctagaaagggtaagagatggtttgtagggacacataaaaaataaggtcatgtaaatcagaagtaggtgggaatgtctacagtaattctcttcattttaaaatttttaggtaagtaaaatacttttacgtctataggttggttgcttgccatattgcttgccattattacaagaggggaatgttaatggtttatcgtattttataaagtatttcttgaaatatatttccaggtaaattagttttagtattaatcagtttatttggggaacttaaatatattcattagaaagttatcttcttttgcagatatataatgaaaaggaattattacaaggtaaattggaccttcttagtgataccaacat

SEQ ID NO: 46456 - DNA, 1042 bp, Homo sapiens
gggaaattgatgcattttaataatgcaaagtaatttgcagtgatgaaggaattcgaattttttcagaaaaataagtgagttctgtttctggaagcagactacaatataagtctacttagggaactctagatttggggagtggattttgtgtagcaaaagacaaaaagcaataaaacaaaaacgtcccaaaaaccagcgtccaggtgttgtggctcgttagacaggtataatcctcatattcatatgcaccttttctaaacatagacaactctaaagttgttgacgttaggtaacggctaagatcattttcagtaaatgtccaagaatgtcttgtcatgtaaaactttctcttgatatatttttgctttgattcttctttttacacctgtattttagaccttgagtaaaacattcgcatctgcattgttttcttttctggaaaagtgaggacaaaagatctagtaaaaatgctatattttgaaagcctttaccagctgcttgtagaagtacttctgaactagctgaactttatatatttttgtgttctttataatttcattttttttatggcacacagaaggaaaggaggaatatgtaaatgtgaattagattttcatagggctagacgaaaactatgaactgcaggcagttgagaatcagtgggaaaaactgcccaatacccacctctttggagaaaatgttggtaagatagctgtaatacaccaagaggaagacagatgctggagtatttaattagcaatttctaagtacatttgactcttggacagtacaggggttaggaacgctgagctctcgcagtcaaaaatccgttataagttttgactcccccaaaacttaatatatcctaatgctgacaggaaggcttactgagaacatggacagtcctgtgttgtatgtgttctatactgtattattacaataaagtaagctagagaaaataaaatggtcttaaattataaggaagagaaaatacatttactttttagtaagtggaagtacatcatcatgaaggtcttcattg

SEQ ID NO: 46457 - DNA, 1050 bp, Homo sapiens
tgttggcagaaataaaagtctttcttgaggagttatcactcagagttttatttggtcttttcacaagtggaaaattggattgcattctagatagctacatcctggcttactgattttagttttccttgttgtctagacgtcttctcttctttttccttttccttgaataagatttaaataaaactaaaaacttccaaacaaaaatttgttcaacacaaacatctaaatgtaaatttgccaaaagtattccttctcaaattatatgaagatgatgtaatggagtagataagcagataaagcaatgatatagtttattaaaggtatgtaagacacttgcattagagtttattctgcattatgattatatatatacataaaatatataaatatatataatttattgtaatatatattttatatataaacatattatagtttattgtaatatatattttatatatattacacattataattaccatatcagaatcaccccttgaaattttgtgaactccttatcagggagtgtgatataatgttgggatgcatggaatttaagagaatccataatgccctaaaattgaacataaaagtttttgtatatgtgcttttttctggagacaagatccatagagttcttgaaatttttaaagcagcctgtagcctcctaattcccatatgagaatcaatgttatagaagaaaactaaagatgttatcaaaattttaaaattttcttatgaaaaagaaaaaatttatattttgaattaaaatgctgtatacattttaatatcttgatctagttgctataggctatttaaaatacatgcggttttgtgaattggcatttttattaaatgataactttcattcattaaatgtttattgctttaaacactcatttctaatcctcatagatctcttgaaagtaagtattattcttattttacagttaggaatctaagcctccaaaaacctaaggtacttattgactagataagtggtagaatctctatgtggtgacaaagcctgtacacatttattttttctgt

SEQ ID NO: 46458 - DNA, 1052 bp, Homo sapiens
ctactgcagcacggagtgggatgtgtgcaggtccattgcctgtgaaggctgcagagtagatctgctggtcacgggggaccaacacatagcaaggggctggattttgtatatcttttgtctcctcggctttaagtaaatgctgtattacttgagcctattgtgcttgttgttcaactgttctctttcctggatgacacttatctgtctttaaccgtggctgcaccaactggtcactcagtgaatggtgaaacaatgttctgctccttgccttaaagtgggattctaaaattcagttgttcacatattttaggaatggaaagataattttcttgcttaagggaatgacacatgggtaaattatggcatacagtggcatcagcattactcaattatcaccagtgatggcaaatgcaggcagataaggtgcaagtagaagacaagacattgggagatcaggaggtggagtcataacaacttagttgttatgttgaaaatattgatgataaatcttgtggattcatctggcttcttgtgattgtcctagaaaacatacatttgaaacaagagaaactggaagctgtgatataaaatttaaagcatgtgaagaaccagagtgcctccatgattgccttgaaatagtccttcatatgctgcggacattgttagagtgactgcaatgagggagacagaaatactcagattttccagaagatattatctagtgactgaactactgctggtctctggaaggatgaaatgccttgttgatttgaccttatatttcagtcaatgattgctttgatatatgcatatgtgtatatataaatacatatatgtatacatgtgtatataaaaaaatacatatatatacaagtgcatatcctatacatttccttgatttatactcctacatgatgtgacttaattgtttcatgactgaggtgaaggaaagatagcatgtttacaggagaaaaaagccattggcttaggaagaggaaagactgtcaattttctgatttgtgtgggatattaatggtttgacttttggcatg

SEQ ID NO: 46459 - DNA, 1103 bp, Homo sapiens
actacaccacaaaaagtgaattttattatatgtatacttaaaatcaacaaaaaatctctatgtaggaggaacttaaaaggaaacacagactaaaaaataaacctatttttttcattataaaagattttttggggtaaaaaagagcaaagaaacctagctgagttataaatgaatgtaaccatcctgagagagatggaatagtaaagaactaacctactttgcaaaacagattttcagcaggattaaaacagaaaaaattgtccacaaatgcatgggttggcaattcacaaactatgtatatagtaaggtttaattaataagtaaatatagcttagattcaagagccagatttgtcactgtcagagaaagaagttacaaataaggaaagggagaaggatagaattctttgaaatctgaggtattggtacaaactcattgtttttaaaatgtatgtattgagatagatacccaaagaaagaaatttgctatgtatgcgcctgtgtgtgtgtgtgtgtgtgtatgtgtgtgtgtgtgtgtgtattctctgttcactaagtgagcctagaacaaatgacagcccagtaagaatgagtacacccagataatggttctattggagcatgatataccattctccaataagaaccagggcttcttaaagaagtgcttgattccaggtctgggacatgaaaaatacaagataagcctggagcatcttacagtacctgaaagtttttaaaaattcaaaaaggatcaggatgggtcatattgggaaagctctggagccagtcagaaagagctcccaatggccaaggctgaaacagtttgagcaacaacaacaacaacaaaatagttattagattataatgtaaagaataaaagaaaaatacatgagtatatactgatataaataccttgtatgaacaaattaaaaaggaagaaggcacagctcttccttacagaagaattccaattaataaatgtaggcagaatgaggaaaatagaaagtcaccatgaaaataccacaataataattgttgcaggcaagaaccatcaatcaatgccaaaatttgtgatctaatgtttgaggagaaatagaatat

SEQ ID NO: 46460 - DNA, 1035 bp, Homo sapiens
tgcacaggatagttctcgttgacacacaattatacagcccaaaatgtcaggagtgctgcggttgagaaaccttgctttcacagaaactaaaagacagatgacaatgcagtcctggaagggcagtttgctagccccgcagtatcagagtggagcacaaaagaacagatttggagctcagatacaatatataaatgactggcacaagcatctatcagggaaaagctcatttctgaatacagagagggtgtgaatgtccgtggacctcttgatccaatctctatcttttatagacaagagaacaggttcggggaaatgaaatgaccatggtaagaaaaatcctttcttagagaacatacagttaaagatagtgaaggatcatttgtatttgtctcagctgctagtttttttttttttaatttactatcagtgaaacaaatgaatacctgaagagcgtgaacataatcctccctctgaatgagttaaatgtatagaaatatatattaaatgtttttgccttggtctttttagaactatttgaggtatagaaaagagatctgttaaaaatatagagtcaagttatttggtgagagttgctattcctaagttttttaagtgttcataaaacatgtaaaagtgtctataaaaaaagcacagaacaaatttaatgaaactttcttactgaaaagtgtaataagccaaacttaaggtgcttacattggcagtgacttaaatcgcattaaccctttcttttgaaattacttgattacttttcactacaaaccaaatgcaatgtatatgcattttaaaaggacagaaaatagaaaaggaaatatgtacctttaggtgatgcattacttaatctttacattggaaaaagaattttcatagccttggcatattagcaaaatactaaggtagtatgaagcaatagaacattagtaggaaatcaaacataaaataggaattattctaaagcctgttaattataggaaaaccactatgcattttatattgatattaaataatgatatgggg

SEQ ID NO: 46461 - DNA, 1033 bp, Homo sapiens
gcgttctagagaacaaagagagggttcagggtttttttttttttttttttttttttgagacagagtctcactctgtcccccgagctggactgcattggcacgatctcggctcactgcaacctttgcctcccaggttcaagcgattctcctgcctcagcctcctgagtagctgggattacaggtgcccgccattagacccagctaattttttatatttttagtagggacaaggtttcaccatgttggccaggctggtcccaaactcatgacctcgttattcacccaccttggtctcccaaagtgctaggattacgggcgtgagctaccacacccggccacattcaggttttatagcaacagttcctgcccaggttcccaagcagatccgtttatgcaaatgaatgaattacagcttagttctgatcgatcagcacagctgagccccttggtcaatatagttgagccatgattgattgatttactttggaagaatgtttgccaaatacccaattctgaataaccatagtttgagctgaataaccacagctgagccctgattgaccagggcaggtgagctctgactggttggttttcaagcataaaaccagaagtctctgtcaagtgtttctttcaaatggtgagtgatgggtgaggggattctggctgctgtttattttggcaccaacaataggaactggtttgacttggctgtagaaaaggaagtcctgtcatacttttacaacagctttctgagaacacaataggtgaccacttcctcacccagccttggctgcctgcttctgttttaactttgagcacttcagccatgggagtccattttgtctgtccactgggggcattaacatttggaaaggtattagagagtaaagagcagtcagtatctccgctttcaaaacatacagaagttaaagagaaatgtagaattaacttaaaacaatacgaagtaaaaccacatatacaagtatttaaattttctttttcttggtagattcctttagcccatagagagtgg

SEQ ID NO: 46462 - DNA, 1021 bp, Homo sapiens
taataacctattaacataaataatattttctaatgaaaattgggatcttttccagagtaaaaaaaaaaaaagtaggaggaatgtcattgttttacatttttgcagatctctctaatgtctgcattaatatagttgaatccttatatctgcttctgcattcaatctcttgcaatatgatactgtagttgaaatatattcagattcctatagatatataactggaaagaaagggatacttaattatcatttgcagttaatggtgagttttttcctttgatattacaccaaaatttgacatgcccatttcttaaatattagttgcaatgtaaacttttcatgctctgttactttaaaatcagttggtttttgagacactttgaatggatgtttttacccatgacgataacttggaaatattgcttctcagagttatgcagactttccaaatgctaatctatttcattattcaatataaaccgatacacacataagcatttgttaatataccactaatctcaccagaaaagtgtttaaggattggcaggctattatcctcatggtgataaatatgagttcttcaaaattctaagttttgttcaaaagctgaaattttatctttggcaacaaatacttttgggtgttctccttgaagtgacagactttggtcatttactttggaaaaatgtttgccaaatctcaattcagaataaccatagtttgtcgactgttgtttcaggtaaaaatgatgttccatgaaaaaacagccatttcagtgtttgcaactcaaacgattcccaagtgcttcccaagtacaaccatggtactttagtatgcagcagaagtgctttatgtgtacttcctatttagtcatgcagaatactaaaaagacatatactcaagagtcaagatttaataaaattaatcattttgacttctttctcaaggacattttaaagtgaaactggccttttctttacagtgagtacgtggcagtgaagaatgtagcaacttcaagtaatta

SEQ ID NO: 46463 - DNA, 1059 bp, Homo sapiens
atagaagatagaaacaaacaatgtttgctactgattgtataatttgtataattgcttaatgtaacattacttttcccatttaaacttctagcttggagatttccttgattaagaagaatgaaggactgacctggccagagctagtaattggagataaacaaggggaacttataagagattcagcccagtgtgctgcaatagctgaacgtttgatgcatttgacctctgaagaactggtaagtagttggaatagtagtgtgactttccaagggtccaaaaatatgttatgtgaagattatgccatgcttttcaaacaatattttgcttttcctaatataaaagatacatatcagatactactgatctgagtgatgtttgaatatggcctaagttctaatatttatttcttacactatgtaaatacatacatatatgtgtggtcatactgtatagagggtttgcctgtatctgtttatgtgtgcgtatgtattgtgcgctctctctctctacatgtattctttaggagaatcaactgaccaatgctggtaggacaaaaattatgttacaatttatttgctaagaatctacttatccctaaaatttttgaggtgagtttacaattttgcaaggatatatgtatcatatatagtatagttattttttctttataatgtaattcattgtgataattacagtgacaacacaatacttaatcatgaggttgaatacattcccactctcatgacgtgtaagatcatgttaagaatgtgaacaaatacagcagtacatcagaacttgaaattatgtgttcgttttctaacaatgatatcagcatatgaaagatgtctggtttattgccatcttgaattatagagatgaggaagactgtgcaaaaattatttatactgtaatgttacttgcatcctaagatagaaaagaaggactggaatattgaaagtgaatgtcactatcaaaaggaaacatggctaaatagagaaactaagtttcatgtttgccagtagtaattgaaaatttcagaaatcactggaattcttatgt

SEQ ID NO: 46464 - DNA, 1033 bp, Homo sapiens
cagagaataaataacaaacaaaaaacaggaaaaaggcatacacacatgcacactcatatacaatatctagaaactgagaggaagcaaggtagccaagactaatgatcagtttttttcttatacaaataaatattttcttaaaagttctgtcctcagggaacattatctaaacttgcagtctttatgtaaaggcctttttattttcaaatttcttgtaataaatagtatccaaaataactgttgaatcaccagaatcctatatattccctctatgctatctgtgttcatgtaattatgtacacttttttgtgtgtgtaattttgttttgtagattatgtttaatgaagaacttggggatccttttattataattcacagtatctcactgctaaatgctgaagaacattctatagctaccctacttcttcgaatagagaaagaggaattggatatgaaaggaagtggtttctatgtttctctggagtgggtcactatcagtaagaaaaatcaaggtaaaacaaaagtctgaatctgtctctactggttggcattatttagtagattttgaaacacaaagctgtccctgtaaatactgtttgctctttcttgggcattgtgttacaattctggcacctgccaccactggtggaatgaatatgtatagatagtttttcctcaggtatattttatagaaaaaaattgcagtgtgcatccacagccaattatgccttttatataaaagaagacattgttatataagttttgaataatttaacgggtatatttttaatatatacaaaaatatatgcatatatatgtgtgatacacagaaacatatacctaaaactaaatgtaaattaatacattatagtataatttaaatgtaaataaatataaatacttacttggaaatgaatgtctttatttcattaaagtacaggtatgatttcttttaaatctaattgaacttcattatttgtttctacatttaggaaaactgttactttttcttacctgatgtgctcccatgttt

SEQ ID NO: 46465 - DNA, 1524 bp, Homo sapiens
tttaatttgtacttaaaggtctaaggggcagttactggatttcatttgtaagaatatatgtgtgaggttgcatcttggagtgacatgttacaactatttgttagaggagctcagttttatgtcagtatgttcatctctaggcctgaatgtcagcttgttttcacagttgagttaattattaggggaccacttacttacctgtgtagagacgaaggcaaagtgtcccctttattcttagaaggtttgctgaaaatctgttgacaaacggcagattaacatgagaaaaaggcatataaatatattttaacatgtgtacatggcagaatccaggaaaatgactacccagtaacccagtggggtacagatgcttatatacccttattcatacccttcttatgcttgatcagtaggggacatgggggacatgcgggatagcaaatgatctttagggggaaatgaatgaatgggcctgatgctcagacaatgattagttaatacttttctttggaaattgaatgggatggagagcagacaatggtttgtgactaagttcatctgggctgtaggtggggtgtttaattttcagcctcttcctctgtgatagaagttttaatcttctctggttaatgaaatttcagggaaagcaattgtgtttctctttggcaggtccagtttataggtagatgaaggaacttcagagaatagcttcatcctgtgcttgggagaaacaggaagggaggggaggccagaaagaccttgaggctgcttcatgttgaagtggcattatttcggagtaacattttttgagctgcaatgcctgatgaaagaaaaaaataaagagtggggtaaatacgtagaactgtgcgtttaatacaaaaaaaagggaaaaggaaaaaggaactttttatgttctttcttccaaataaagttaatggttattaatgatgaaaatactttgtccagaaaaagatcactgccttttaaaacggcaaagttttaaatatcattgtctcataatactagtaaatagtatctaataatactagtaaatggtatccccacttgcttatttttttaaacttgagtagccctttctataaatctatatttattagaaaactacttcgttagttcaaagattctctacttatagctgcaactaagagggtcccaaaatgtgtttaaagatgttttttataaatatatatagtttatgtattacttgtttactgtttatttacagtgtcatttatatataatatatgggcattataatttttatattacatctatattgacccaggcatctgcattaaaaatactgtgtagaggcctgaagaaaaactgaatatagtagttacattcaaggttgatttggggggttggggatgggtatactagaaattgtattgagatctgaagtattaatttatttagaaaatcttcagaagtggtttcttctcaagcaaatgtggagtaggggaaagaaaaccaacttttggagtagggttttatcaggatttg

SEQ ID NO: 46466 - DNA, 1074 bp, Homo sapiens
tgaaggaagtaaagctcaaggctaaactgagacctgaagaacaggtagtagttagccaagcccagagggatgggaaaataatccagctagagggaacagcatgtgtgaaagctgggagtctagaggctatcgtgcctccttcaggaaactgtgaatggttccattggcagtggttatggtatgacagtctgaagagattatggagggtttgtaaatcgtgctaaagagtttggacttcatggacacagggtgccattgaggagtttcaacaagggaattgcctaatgaggtttcttctctggagtagtgtggaagacaaactgctcagggccacaaggagcagctgggcacagtgtgatgctgtttcagtaattctgggtgagaaatgatgatggcctcaggtggagaattcaggatgggaaagagcagacagatgacacagttactaaacagacagatttgaaaacaagaagcatttgttgtagtgatttctcaacattactgtgcgtagaagatcacctgggcaatttgtgaaaatggattatgaggctgacttaaagaaatttcaatcagcagatctggagtatgagtcaagaatctgtatttttaacaaagaggccaggtgatactgatgcaggtggtcctcagactgtaccataaaaaaccctatctatttgatgtttcaaatggcaacacttctttaaaatgtatttctgttatgttaactttttgcttaagaatgaagattcaatcctattatctttgtcgaaagtagatgaatgacacagccccagggtttactgtgcaagggcagtctccttgctagtatagtctgtgttcactaattgtttgctctctggtgggggatacagaatagagtagtgatgatttcgttaagactttttattgcagattgtttgtaaatgtgttttcaaaggtttcagtgcaagcaaacactttgggtgggatggggggtgagggtggcaaaattgccccaagtcttgaagttccacgcaggtatactttcctggtgtttaaggcacattttgaatcttattgtgatgtttcagatcc

SEQ ID NO: 46467 - DNA, 1034 bp, Homo sapiens
agagaaattcatctttaatcatataaaaaagtgaacacagcattatgctagattgttaactttgtttacttttttatgctcatgactacttaggcaaagggcacactgtttttatgtcatcttttccaacggttagtcatggctcaattttaattgcccagaacagtgaaaagataccaccctttgagaatgtgaatgtaccaaggactactctgtccctggctttgtcactggggtcaaactttaggtgattaacttaatatttcataagtataatttctaacagtagatggaatagcagacaaacatgggtgtgtgagaaattctatagagatcatgattttggagccctggaaaccatgtggatgacactttctccaaatttttactgcactaacagtataaagccccatatccctttctcagtggatctgcaatgaagtcccctgcccacctctaaaaaccagcatagtatgggatttatttttaacctcaaaatatctgactcttttctctaaaacttttctttcctctatgtagtggagatagtaagagtacccctcacataaggctgctttgaaaattcagtgaaataatcaatggcatatggcatacaaaaaaattaacttctattgtattgtgattactataaacgttatcatcatttttacaatgcctggtagtcaagggaggcattagctaatagcttgaacaattctttgtttcaatttgattcagcctatcaaatttcttatcaagtacttactaagaatctactatgtgcttaacattttgatgggaattgtgggattttatgtacatgagaatgtacctaacaaaaagtgaaatatacagtagtggtttttgtttccttttcaaatgtgtgactttgttgttttgctaaatagctatatatatgtgtatgtatgtatatatatgaaattgttttgctattaacaaaatgggtaagataccacagtctgagccatagcataagtctagttaatatttacaacttgaatttaaaatgtgat

SEQ ID NO: 46468 - DNA, 1079 bp, Homo sapiens
gtgggcttttgtacatggcttctttcccttagaataatgtttacaatgttcacccatgtggtgtacatcagtacttcatacgtttttattttattgtatttttttttttgagacagattctcactgtcgcccagactggagtgcagtggtgcgatcttggctcactgcaacctccacctccaaggttcaatggattctccagcctcaccctcccaagtagctgggactacaggcaagcgccaccatgcccggctacttttttttttagtagaaatggggtttcaccatgttggtcaggctggtctcaaactcctgacctcaaatgatctgcctgcctcagcctcccaaagtgctgggattacaggcatgagccactgtgctggccctaccatcctctttttgcattcccagaacacaggctctagtgcacattagagactcagtcaacatttgttgacctcaacagcaaaggtaggctatgggattcagaagataaaatgatgtaggaaagaatgtcagcttcatagattgaaaaaaaaaaaaaaagtatgtttcatcatgaagctattgtagggttttaacataacctgtaatgattttatttttgttatcctcagcccacccccaccacctcattcccaaaacattttatggtgatggcaatacaaggaaacagtgaaacagtagacaagtatggcacagtaagaacaaactaagtttatatgagcgttaatattatcatggcccttccttgtttcaataatcataataattatatgttaacaaaatacttaaaactctgtgtatatatacagaattcacactgagcaattccctaatcctgtagaaaatactcatttgctaaagagcagccactcatcttgatgagaagtattatggctctccatcttcatgaggaaatcacagggaataggccgggcgtggtggctcatgcctgtaatcccagtactttgggaggctgaggcgggtggatcacgaggtcaggagttcaagaccagcttggccaacatggtgaaaccccgtctctactaaaaatacaaaaattagccaggcgtggt

SEQ ID NO: 46469 - DNA, 1028 bp, Homo sapiens
tagttcccgtaatattcacaagatgtctgaaaagttattagtactgaatgtctttatttgttctttgtctaatgagttactaaagtaactctggcatcaaaacatcttcatataataaagattatttagtaaagtaaatttaccactaactgatcagtttgagtagatgtacttttaagtaatactgatttggctttgaggtccaatacagttctgctcatcaaaatataaataaattaaccaactatcctaagtactttaataaatgtggaacgcatttataggagtcagcagtatgactttcctgtttccataataagcatctatgtaggtcacttcatatcgtgcatattaacttaatataatcaccctggtaataatctgttatttgaaagttaaaggaacatttctagtctaaaaatcattttcatcttaccagtttactccagatagcaatatatctgatttatgtatttttggttgtgtgtgtatgataaaacaggatcacttcacactgcttctttgaaccctaaagtcggatgacttatctttcaaactctgttaaccaattgatgggtcaagtgatccaaaactggatgtggtcaataatattcaagtaattttattttccagatgtaaactctgaagagttcaccctaaagatcctgaattgttctggtgaacttcttattactaaacacatccaaaaatctatggacacatatgacccaaaaatacactatataaagtgttgaaacagacatgtctttatgttttgacaaaatgagtgttacagaaatatttgtgtcaaaaagcttacaaggggccgggcatggtagctcatgattgtaatcccagcactttgggaggctgaggcagatggatcgcttgaggccaggagtttgagaccagcctggccaacatggtgaaaccctgtctgtactaaaatacacacaaaaaatacccgggcctggtggcatacgtctgtaatcccagctacttgggaggctgaggcacgagaattgctt

SEQ ID NO: 46470 - DNA, 1029 bp, Homo sapiens
ttccctggtcttgttcaattgttggccagcctgtgctcctggtaagagtctggctattaatctaaaggtgtttattgcaaaccaccatctatttttaagttgttttagctcctgaattcagtatattccatagggtctactggtgtgtagtcaacagctggttaattctattttggaggggaagaggggagggacatggccttcgatgtctcctagtggcgcatgatagagataagaataaaataatattcaacacttattgaattatggaatatcaacaattattgaatatcaactacatatctgacagtcatgaacacattaagtcatgtcaactctattggtaattaatagaacaatgtgattgataggacattattactaatgtgaaaataagcaagtattaatttgtttctgaagtgacttaaactgttacacgtttttacaaaggagcacaggaagtaacccctctgattattaggtaacttttagcctctaaatgagatttatgaatgggcaatactttggtatcttcaggaaagtttccacgtaattcacatgatttcagctgtcaatgttcatgaacaatttctgtttgtgttgctttagctccataattagtatgtttttagaagattccactggaaaatctgcaagattacagaccatgtttgtctcacgctgtgaccctggcttgtagcacagtgccaggcacatggtggacacgcaataattactcccagaacttaattgacttaatttaccactgaaattgtattactgtgaaatcgtaccagaagctttgctcataaccatctatgcatttcgcttacatgaatgttgcaaagactttttgatataatcagataaacacagaaaatatttaaagagttgaaaatatttgaggtatattcatactaacattatataaatcagatttcagattgattcgatttaaaatggctaagatataaaaccataaaaaatgtgagtaaatattctgcctatcagggcttgttatgtaattac

SEQ ID NO: 46471 - DNA, 1048 bp, Homo sapiens
gctagaaataagtaataaaacatgcatgagggaatgtgatctacaatgtgttcctttatgttctagaaaggaccctgatttccttcctcaaatttcaacttagtttgtgtgtgagaaatatgtatctttaaaatggaggaagtcaccaccagagttatgtaatgtaatccttaaagatcttttagaatgcagtcaaaaggagagaataggaaagaaagagaggagagatgtattcatatatttttaaatgtgtcattgatgtaataaactctttaaaagacagtttcttatataagggagttttagggtcaccattaatacattttctcatgttgtaaaaataaatatgaggcgctttgtataagttttgtgcatatgcacattaacatagatattgagttatacacttgtatataagtgccaaaagtgtattcagttttcaatatctttaaaatctaatgtctattgaattattcaatctcttctgaaattaagagagaaagaaaaaatttaatgatctctgaatgcctcatatatgtcaaacatgacattccatagtctcacatacatcattatgtttatgttaactgagtatgtatgtgaattgagagaactccaacatagtaataaaaataagttggcaataaaaattaatcataagttatcagtgtcttattttcctcctactaaagtaaataattataaggctgacatttacagcattctcctaggtactctattgcttcatttttttttcagttttttaatataaaattaacatataaccaattatatttattctccactatgtaagaaactcatggaatttcttgacaacattgttggtgttttaatcccacttataaaatatgatattgctttaatgaaaataaagacaactagtgatgtctcactacatggtagtgctgaaaatgattccattcatttacgtgagtgtatgtatgtatatatgtttgtatgtacatgtatatacataaccaacgtatgccatttctacacattttgcaaattgctcattagctcagac

SEQ ID NO: 46472 - DNA, 1033 bp, Homo sapiens
gttatgctggtgcttcaaagggaataacatcaaaaacttgtggagaaaagccagaggctaccatcccacctccaacctgcacacacacacacacacacacacacactctctctctctctctctctctctctctctctcactctcaattgggagacctatcatggtagaataaagtctggttcaccaaaaaagagggataatgaggccatttttcattattttcccagtggattctaaaatagttacctcataaaataaatagtttaagtttccacattactttttgcctttaatctgtgcctgcgatgcaaataaatgagtggagatttttatactcccaaaggtttatgtagaggcaaatatattacaaaatgaacacctaaactaagcatgatttcttactaaaacagcatcttacagaatgctgtggttgacggaagggagacactttaggaaaaggaatctacaaaaagatttaattttatactcattgttcaagtatatgctactcttcccgatcttgtcttctctagattaaatttaaatggaaaactttcagaactgaactgagcctagccaagtacagaaatatgtatttcgtatgtgagctcctatggaaaggatgcaccaaaactgtttttgatgtgagtagagtaaggtgttaagagcgccgtaagttttataaaattaaaaacccatgtgctaaaactagaaatagtttattgtccttgtttaagaggcaactgaattaacctagttatctggctaataaacataaatagtccaccttagtgaagctctaattacagcctctgaacctttcggtgtatttacaacttaaaacatctgagtgattctgccttttgaaagctatgtgaagttagaaaggcggcctaattaaaacaaatcttgaataaaccacttcatggagatagaagtttgatggttggatatatcaaaaattgttaccagatgttgttcagaggccttaacagtttaaagatcatgaggtttttttttagcaaagcaaaaa

SEQ ID NO: 46473 - DNA, 1026 bp, Homo sapiens
tttcaaagtcgtttacatttggctttggcaagggttttaattgttcattggagagtatctgtaacctgaaaattcttgagacacggtaaccacagagttaatatgtgactcacaaaaggctggaaactgcctactttttccatcctgtccctctcatcagttttgcttccactttattctgggagttaatttttatcaaccttcacacagaagtactatttgtttgttcatatatgcaagggaaattatttttattcctaaagcatttctccctcttaaaatcctggattagattaagcaaatatcccgtttatgtaaataaatcatttaattaagcagaataggtaaggatgtcagaaataataaaacagatgatttgtcagaaataaactgtagggcatatgatcctttgaagataattgaaaattcactatttaaaaatatgaattaaaaaatatatagaacttgatgagttacagttacatacattactatgctattcgtatttcggaaattgaaactcagaaacaaaagcagtgctctagtttgtcattccttatcagtgaagtgtggaatagtggaatcttcatggggaatttctgtaggcacgaaaaatctagaaaacaaaggctgtggaggaggctgcctcagtcattctaattgatgtcgtacagcaggactactcttgggtaacatctctgttgtgcccaaggttatggagattttcttgcagtcataggaagaagctcaggttatgatcaacctggggagaaatgattatactccttccttagatagcagagaagtttgaggtgtactagaagtgtggggttatttacacagtgagctaagagtagtgataagaaattttatgttcaggactgctttcttatcctattgaacgtcagtctcatcccccttagtgactttatagcttgctagctatcacattccatgttattccccttatgtctgttaatgtcatttccagtgctatccttctagcctatccctttttaaaaaatg

SEQ ID NO: 46474 - DNA, 1029 bp, Homo sapiens
gttaccctcatgctgctgttctcatgatagtgagtgaattctcatgagatctgatagttttataaggggcatttccctctttgcttggcacttctccttcccgccatcatgggaagaagaacatgttttcttccccttccaccaggattataagtttcccaaggccttcccagccatgtggaactatgagtcaattaatcccctttcctttataaattgcccagtcttgggcagttctttataacaatatgagaatggactaatacagtaaattggtaccagtagagtggggcactgctgtaaagacactgaaaaatgtggaagaaactttggaactgggtaacaggcagaggttggaacagtttggaaggctcagaagacaggaagatgtgggaaactttggaacttcctagagacttgttgaatggctttgagtaacatgctgatagtgatatggacaatgaagtccaggcttagctgatctcagatggagatgaggaacttgttgggaattggaataagggtgactcttgctgtgttttagcaaagagactggtggcatttgccccagccctagagatctgtggaactttgaccttgagagagatgatttagggtatctggtggaagaaatttctaagcagcaaagcattcaagaggtgacttgggtgttgttaaaagcattcagttttatgtagtcacaaagacatggtttggaattggcacttatgtttaaaagggaagagagcataaaagttcagaaaatttgcagcctgacaatgcaatacaaaaggaaaaccaattttctgaggggaaattcaagcctcctgcagaaatttgcataagtaacaaggaggcaaattttaattgctgagacaatggggaaaatgtctccagggtatgtcagaggccttcacagcagcccctccatcacaggcccagaggcctaggaagaaaaaatggtttcctgggctggacccagggccttgctgctttgtgcagtctcaagacttgctgacctgtgtttca

SEQ ID NO: 46475 - DNA, 1029 bp, Homo sapiens
ctgtgaattttttttctctagaaagttttccatttacccttttattttatccatccatccatccatccatcccagagaattttctcatggtctcagtgaattttttttatagtcctaaacaaagttaaataacaaaacttctgaggttctaacactatgatcttgacaatccaagtgaacaattatcagtaaatataacagaaaactctgccatttacagcacttcacattatcagattattaaaatgatctaaaattattcatttaaatgctagcagggaaataaatgactctaaattccctgcattactcacaaatactacaaaaaggaatgttccctggtttctgtggttagaaaatgtatagagcagagtatttcatctaaacctagagtcttctttttttatttggatttgccacttataacatgaatgattttgaaattcccatagcagaaagcttttcatcattgtctcactaagaaagacttgattctagtgccgaaaactgaagaactccttagggcataaagtcagagaacagcagcttattccagaccactcctctaaatgttaatgaaacttacataaatcatacataacatatactatccctttgtgctggaaaatgccatgtttttatggttgtggttgtacagctaggataataggaaccaaagacataaaacagtaattaatatatttcagaagtgaagtgttttattggatagatgctaattaagactgatagatggcagtgattgaaataagcataagccatttggtcaacacaagtgaaagatcagctatcatcttgaatgctttaattaaggatgctttgctttttgtttcttcttccctactcttctgaatatatgaaaaaacatggagaaaaaataataataactgctttttgacagggaaactgatgtgtagtgcatgcctgatatggtttggctgtgtcctcactcaaatctcatcttaaattgcagttcccataatccccaagtctcatgggagggacctggtg

SEQ ID NO: 46476 - DNA, 1847 bp, Homo sapiens
caattgctttatagttacttatgagtcaggttcaacattttatgctgattttacttgcacttaaacaaatagaaagtatattttctgggccgggcgcggtggctcacgcctgtaatcccagcactttgggaggccgaggcgggcggatcacgaggtcaggagatcgagaccatcccggctaaaacggtgaaaccccgtctctactaaaaatacaaaaaaattagccgggcgtagtggcgggcgcctgtagtcccagctacttgggaggctgaggcaggagaatggcgtgaacccgggaggcggagcttgcagtgagccgagatcccgccactgcactccagcctgggcgacagagcgagactccgtctcaaaaaaaaaaaaaaaaaaaaaaaaaaaaaaagaaagtatattttctgaacacctctttttggtaaagcatgttgtatatttgataatttacaatttagtttgctgttttcttttgttctttgttgcttactttctgtgcttcaagtttattgaacttcaagtttattgagctagaacttatcacagatggtaaatgtggaaaatgtgatggatgtagaactcctcccacataggagtgaaatgggagactacttttgttttgtaattgatagtatgaagccttacatggactatcttcaatatgcattcattacatgatacattcctggtattaaattgtaatcgtcgagatagcactgctaaacgagatagcactgctaaagtttatgtctgtggtttactatttagtataattattcttagcttaataagctttctgtactattaaatgaaataatggaatctcagattaacatttctttaaaaaaattgtattcagcatattaccatacatttactgagactgaactgctttcttttcaattttcgtgaaacttaaatggcttccgtttttctgtgcagtaaattaaaggtgcttacacagttatgatagtttccaagaagaatttcaaattggcatcaactaattgcagtagcaagtgatccaggttttacaaggaaggaaaatgtgaaagaagcatgtctgagtataattttgttcctgataacaaatatatatatatatatatatatatatatatatatatataactgtgattcaaaaatatatagtaaaattaccttccatcatccctagaagttattcaccttcattataactttataaccagtacataactagatgtgtgttttatggcaagaaaagtttataaaataatgacttttgctatggcattcttttaaaataacactaatgcattttatgaacctggtttttcacttaatcctctgttttatgcacttagagcttaaaagtcctgcagtaaatattatcatccttagctttccatatttttgttcaggaagaaagaaagttcattctacacttaattttaatgtcttcttgattctgggaacccataatttttttctcttttcttactgatgggagaagcctgcaccatcatggtttgctacttttataacttgtgagcaaacagaatatttatctctagtctcttaagtagagttttaaatccacttgcacagcttttaaaatattcccacctgccctctccaatttgtttttacttctttacattttgtacatttgaaaccgaaatttgccttatattccatgtgtaaataacagaaataatttttttctgaatattttaataagtgtaattcaattctggttagtttgcaacaccattgaacataatattactcacttctgcccacttttaaatacagacactttcactactcttacagaacagtaatctgttctctca

SEQ ID NO: 46477 - DNA, 1087 bp, Homo sapiens
tctgtcgacttattttaatggctgacatgcacgtaaatttagtgttcatattgaatcaaatcattagcatgaaaaattacacaacagcaagtcctgttaactaattatgctagattggcacttcagaagaggttcatcaattcaagtattatcatttgtagaaagaaaccttttaaaagaagctttctattttaaaacttgttaatgaaagggcttaaaaatagagatatatgtatgccgaaaaatggccctgaatataatatatgcattctttgcatgcatgcatttttcgagaggttacacattaagagatttgatatagccttccagatatatttctgacctatggtagcttaaaatgaggacaataaaaatcaatctttacccagataaaaattccacatacctaagaaggcatcaggtttctcatgccttattaacatttattcttctgtgcataaattagtccatttcatagcataaattacaactgacattatctcctgtaaactctataataaaagagtacagaaactctgccagccagccattttaatgttgatttctttacttatatttaaacttctaaataataataactaccattactgggtgcttcatttatgttggacactctgctaggtgttttgtatggtatttcatttcatctccctgttgaaagctatagattaggcagagaagctcagagaggtaaagtgaatttctgagaacacaaacttctaaatggaattgggatttgtgcttaattttaatctgtctgactttcacagtcatcttcagtatgaacagaagaaaatccctgaacacctttgaaatttaaagcaaattaaagcaaatactatgccattagagtatatacatatgaatatgattcactccctgtgaactctgctgtattctcccacctctaatgtgcctcgcctctgcttcattgggaagtaaaaaaccattttactacctgggaattgtgaagctatctggtcctttttaaaaatataacactcttctgaggactttctgatgctgtgatcaaatgatgtggagagaatcttctaagaaatatatt

SEQ ID NO: 46478 - DNA, 1047 bp, Homo sapiens
gaatacttttataataacattgctaaacagataacaaaccctaaatatcaaagcaagaaactaaagaagtgaaaggaagcaggacaaaggacaactgactttgtgtccttatttgcctcttgaaggatgtgttagagaagtcttcagcatctaagtactatagctattacttctatcatggggacatgatatttgacttgcctctctcagataaaatttggaaatatgaaatattaaagatttaaacttttttgaatctttaatattagattctgaaattgaatatatattagtcatattatgatattgtgtttacctgtattttgtctaacagatttttttttaagctttagctaatgaagacacatggcattgttaacagtggtaaagatgggaggaatgtttagattttctagtttggatgtagtatgccttgttttgagatacattgatgttggtttattttaatggcaaaagtgctttcattattctaaactatttgatttatcatgacctcatcccattctgtaacaagaagaagattgttatatttttctccagaattaacattacaatgattaataagagaaatcatatattttacaaagccactatgagtcaaatacacatttttctgtgaaagcatttttggagctgggaaatatcctctcctgttctctgtagtatcctgtctggagaaaatccagtttgtatcttttatatgcttttcaaaaattactcatctttagaggctactgggagctgattgtggtgtaatttctttgctgtgttcaattctgcggatcaaatttgcaatctgatatgcatacatacctctagctggcttagaatagatggagatagcaccttttcatacatgcctgcagtgtcagtgtctatccacaaatgtttgggaattagaccagaatgttaatattgaccttgccacttccttgctgtgagcttgggcaagttacttaaccacttggagcttaaatctcatctgtaaaatggagatgattatttatcataggatgatacttacaa

SEQ ID NO: 46479 - DNA, 1049 bp, Homo sapiens
atatcttttaaaattatatgtagattacataaaaactaacataaaattgcaaatctttaagtcaaattattataatatccatgccagtatggtttctaacaatataaattgatgatagtaatgcatgttggatgtaccttttaaaaaatgctttataggcggggcgtggtggctcacgtctgtaatcctagcactttgggaggctgaggcgggtggatcacttgaggtcaggagttcgggaccagcctgaccaacatggagaaacaccatctctactaaaaatacaaaattagctgggcgtcatggcgcacatgtgtaatcctagccacttgggaggctgaggcaggagaaacacttgaatccgggaggcagaagtcgcagtgagccaagatcattgcacctcagcctgggcaacaggagccaaactgtgtctcaaataaataaatgcttcatagaatagaaacaggatagaatagtatattaatgctagcaatatgttttaaaggctatatgccatgtgacatacagtagattctagtctttaaaactggaaataattcatggaagttaaaagctagtggcttattatggtgataggctaaaaacctgtaagttcaaagatggatcacaaaatgttttcactagcagactcttgctaatagtccagggggtggatattcaggtgcaggctagaagccaggcctaatgcgcttcaagaagaacttacagacttgaccagtcttttaaaaaagtatcttacccctcctattaatcaaaaatccctttgtctgggccaggcaaggtggctcacacctgtaatcccagcactttgggagaccaaggtgaacagatcacttgaggtcaagtgttcaaaaccagcctggccaagatggtgaaaccccatctctacaataaaatacaaaaattagctgggtgtggtggcacactactgtagtctcagctactcgggaggctgaggcatgaaaattgcttggacctgggaggtggtggttgcagtgagccgagatcttgccactgcactccagcct

SEQ ID NO: 46480 - DNA, 1109 bp, Homo sapiens
gtaggctcttcttttctgtatttaacaattgattgttacagttaaagagtacattgcttatttccataacacaatggtctttattttgaaagacaacccattggttgaaaagagcttagactttggagaccaaagagatgggttcaaattgtgtttctgccaattagtaccgggttctattgatagtttcttaggctttgtaaattataattttgttttcaacctgggataaataacacctattattgcataattattttaaggattggatgtaatggatttttagaaacagcacaggatttgacatgttgtagttagttgctcaactaagtgtagctacacgtttattttttgagccatgagaagcagagggggaattgagggggttctagtggtagaacgaggactcaaatcattcgctttaatataaagtgacaattggaaatgatcatccaggaagaagactaagggactccagatacaccctttttgaagatgtctaataattcaagcatcaccctgctcaattgaactaaaaatttggattgtgtagaatttcatttgaacagtagaattttgtttgaacagtatgataagctcattaaaatctatcacttgtgtgtaacctgatcctctggttaattccatgtgttttcctatggccttttagttctgcaaaagactgggcttgtaaagactttgatttcatttttttttttaacagatgatagcaaaagatatttagtacctagaaaggtaaactaatcctattttcatgtgcagtcaccctctagtgtaaataagtagttttcagtcttcaaatggaaaacattccaatgtcaaattctttaggaataggaataggaaaaaggattctgatgcagtgagtggctaatttatatatgatataaatttatatataatttaaatatatatatatatatttttttcctcctttctgccataatttggcttctccttttctgacataagatctatcagactatagtacaggtttcagcacagaagtaaataacagcatgtttccttgggagcaattgaacaacagaatgaaacagtgcttactgttttttgaaagttgtgtcaga

SEQ ID NO: 46481 - DNA, 1791 bp, Homo sapiens
gtttagagaccatttagactcacttccaaaaggatctggcctcagagttttgcagtagtgagcaaaaattctagaaaggtctaggttcagaaaccatagcaaagttacaagagaaaggttttctagcttctgtttcttatgccattcaacaagatttagaaggaaatgcagccaaatttaatggtcgttacctgatgaaaaacagacatcctttggattatcctcaagcagaactgaacagaactaaatgcaattagaagactccacggaggccaagatgatcagatgatcgaggaaagcaaactgatataaaatataagctcaccatgttaggtaactcatgtgtttccaacatggtgctattagaggagcattagagaaatttactgtatcatgaagtgcacattcgtttcctcggctgaggacagtactacgacaatatttgacaggaaatgtagagaatttttatttcagtcaactctaaaaagaatggcgaaattcttgaagctgtgtatgatgattctctattaatattctttgttcaatctttaaaatggcgtttatttctcaaaggaaagttcgtgccatcaatattgattccattatatttgtgatatacatcaagttttatcttcagagtgaaaagttctttgtatatctttgtagtaaacacagattttgttctcattttgaacatgcactaatttctacatgaactaaatttctacatgaactgggcacattggcttaatttaaataaacatgttaaggtggtcattactattcaagagtcaccaatgttctgattttttattttatgttctgcttttttattttagacaggcaagttgttagcatttttttcaaggaacaaagaacaaaaattatcttgataagaacttgtttctgaaaagctagattagctcttctctgcacaccaatcatgcaatgacagtacaatttagtgacttaagcagtacattaggattctcagcctaggcagaagcttcaccctcgggccagacctatataatagttgtaagaaaatgatttatgtgttgtaataaatgttacttctcaatctgtttgcttgttcaatggttgaggtcccaaaagaaaaggtctatctcaaattaggactggcatgtattatctgtcaactttatatagtactgtaaaagtcattcagctgacagtaatattagcggaatgttttatagatttttgtactgtgtgaagctttgtatgggtgacgagagactttgggtctgtggtgctctgtggtccgggataaagttgcgtgtagatgagtcgtttctgtgcttctctgtaaatgaacatctggctcacatattgattccatgtgtgaaaatgagatcagcccatataatgaccagaatcaatcaggcttcagccgaggagtaacatacactggtcttgatttgttagacaaccagaattggcagcaccttgcataatttggcaccaattgacaaagattaggctgtttggggaccctgaatggttattaatttgaaaaccccttatatattttgcagagtaaaatcagctgtaacttatttgttccagcccccttcttctcgtacgagccctaattgttttagacaaacgaacgagcttgcagcctgttcactttacacaggaagacatgaattctttgatccatacagtattctttagctcaaccttggagctatttactgaggagatttatttgcagacagacagtagaacagttctttgtgaatagaaatgagtacagcttctatg

SEQ ID NO: 46482 - DNA, 1005 bp, Homo sapiens
agatttattgtagttgaataaactgttgtcctctcacttttatcatataaaccaaagggtcagttgccctttggggaaacccagaatatgtcagatctttgtcaggtcgctgtgggtctttgtcaggtcccaactctgtcacagggattttaggcaactagaaccacaggtgtcacttccaaaattgatagcttgttatactgcaaccagagtcaattttagattggagaagagaaagaaaaagatcggaaatgattgaagctgtgggcaccaagaaagggcagtgctggaaagagaatgaatgacatacacacccaataacagggagcgttggtcatttttgcatggaccaaaacaaaattgaagaagtactgctgatcaaaggccaatacaatgcacacatatcattctggttaggttgtctcctgagaaaaatatttctcagcagcagtatgatttattttgaacaatatctgattgaacagcattctagtaatgtagaaaatttatagacatctactaaattttattctagcagataatccacattaaaagagacaaaagtccatgttttacctagaacctctctgtggctccttttctccaccagaaagacaataatttcatatctggcagaagttaatgctttttaagttcttgacgtgtatactctgtggaagaagtgacctaaaaggaaaaccaaatagtttgataaaggataactgtaaagaacaaaaaaagtaaaacaaactactataagactaatagtccttgagacaagcgcatgaattagtgatgaagtattgctttactacatcctgaaaattctttacatttatttcttcagttgaatgaagctttctaatatctgtgtctggaactaattctgataaccttggcattcaaaatggagataaaggatagatagccttccacaaaacgcttcagtatggcaagaagaatcatctaatattgacaaataaagcaacgtgacatctgtgttga

SEQ ID NO: 46483 - DNA, 1031 bp, Homo sapiens
tattaaaagaacatgccacctacatttttattttttgcctaatttccaagttttgcataatttttcatagcagtgctaacagataaaaataatagatgtcatctttaaaatattcatgttaaaattagttttccaaagcctacataaacaataagtttgactactgagtagattatacttgtcatctagttcatctcccaacaggttaaatggctttaccaagaatctacagcaagttatagggagaagagctgaaagataaatgaggtgagatgagcctggaaaatacccagttttatgttatttcttttttctgtactttaattgctctttagcctgtttctcctgatctcctagggcacaaaatgtatgggtatgtatgcatacagagcattcctggaacttaaacctaaggataactgtgttgaaactgctgacaggataaaaacctcatgtaattaaaactgccaatcacaatcaggacatatattaatgctgttttttttaaagtggttccatgtcatctgttgatgaatttgcaaaacaattatgattacattgacagtgaagaggtatgtatatgaatcagtgtttagaatctagatgcttatttccgtctttgctgaattgaatattttagatggaattaaaagggagctataaattttgcaaagttactgccaaaatatagttacaaattttacaaaaagcatttcttgaaaagcatattctagattattttgtttagcaatttatattttagagttttggaaaaacattatattcaatataattaattcttcttttcttttgaactgtcatagaacttcactctgtaatcttatgtttttagtaaatacagacttaagactttttaatttatttttcttagtttttatttctttccatattgttattaatgttgtttacacaatatgggacaaaaccttttgaatttaaagttataatacagaaaatatttttatgtatcctgtattttctgaccaaataatttagtagtttttttgttg

SEQ ID NO: 46484 - DNA, 1092 bp, Homo sapiens
ctttgtaaaagttcaagaaattatacattttggaataaccactattatagtgttacatatatctataagcaactttgatcactggtattggctatgtaaaattatgttgatcgatactaagatgtttattgaagacagttaatttaattgcattcatacatcattagattttttttcaaagaagctccattttaatgccattttatattattttagaactttctattgtttgtttaccacagatttatatttgagagtaagagttgatattaatacaaatggcatgtgccttttctgatattactcttagaaataagaagaaaatgctgggtgtggtggctcacacctgtaatcccagcactttgggaggctgaggtgggcagatcatgaggtcaggagttcgagaccagcctgaccaacatggtgaaaccctgtctctactaaaaatacaaaaattagctgggcgtggtggcgcatgcctgtaatcccagctactcaggaggctgaggcaagagaattgcttgaacctgggatgtggaggttgcggtgagctgagatcacaccattgcactccagcctgagcaacagagcaagatgccaaaaaaaaaaaaaaaaaaaaaaaaggaagaagaagaaaatgcaaagaaaacaaaaatcagaattgtgagtgttttatgttatgaaacaatacagtggtctatcagcacatgccaattattgctgaagagcagacaataaagcgaccagttaaagccaaatctgtcccttaatgtacatatttagcatctagatggggaagtaaaacacattctcacccacttatcttattattttaataacactatcatagaaatgattgaataaattcagttatggataatttttaagaagcttgaccaaaaaacaattttctggactctggagtttttgtttgtaaaattgttgtgaaatagtgtcctgatagattgtattcttttatttttcgtgaaggctaaactagtcttaaaactattttggaaagagaatggaagattcttttctatatcttgattttggcagtaaccttgtcagccttccagttggccaggaatt

SEQ ID NO: 46485 - DNA, 1078 bp, Homo sapiens
aagggttgattttgaaattttggctgcttgtgtttaagatttgattctcattctcaaacatttacatgtataattttgagaacacattttatttaacacaatatagtaaacagaatgaatcataactatgaacgttttccagaagcatttcttagataaattattttataaaaagaaaaacaacacaacatctaagatttagagtggaagaatatacttgtagttaacttccttgttgatttaaaaaatatatttggatttattttggcagggtgggggaatcatctaataaaaaatttaaagcaaacttcattttttctaaccagagtgaagagacagggagagaatcaaatatgtgtgagctccctctgttgctctgtaacagcattttattcatgatttgtgatgtgataaggaaatttttgctaatgtgtcaaaacaaattcaattttcctttaaggcaatttataactttatttaaatggaatataaaggaagaaccccctatatgtaaaattctgaccttcaaatttatgttaatatttttaaattattaaaacattaaaaatgcatctatttctcaccactaagagggaaaaaaaaaacaaaaaaaaaacttcagctatatttagtaagtactcactgaagtcctaaacattaggataaaatgcagggcctaattgagtaaagtatcaactgggatgatgatagtgaacaggttggcaaatttgccaactggatttatggtaccttttatattaattacataagagtaaaatgtgaactcacaaaatagtaatggcaaaaatgaggagttgttttaaaagtatgtaaatggcattttacaatgctgtgaaatacatttttttttttttttttttgagacggagtctccctctgtcgcccaggctgcagtgcagtggcgcaatctccgctcactgcaagctccgcctcccgggttcacgccattctcctgcctcaggctcctgagtagctgggactacaggcgcccgccaccacgcctggctaatttttttttgtatttttagtagcgatggggtttcaccatgttagccag

SEQ ID NO: 46486 - DNA, 1054 bp, Homo sapiens
aaatcgtttatgtcaaggttaaggagagtatagattctctgctttttgcaagtataaaagagaaaatgtgagtcttctccctgtatttgttcaataaattgaaaggagaaagcttaagcttgtgcttttccctcatggaactatgattatttcagagtaggtcatattgtgggacttaaaactgtaattatagcattgggcagttctctcataataataatagttagcatttatataacccgtttcatcttcaaagcatttcacaggcactaattaatcctcacaacatgtctgtgaggtgagtatcatcatccccattttacagatgtggaaattgattcaagtaagttaagagtcttgccatgggccataggaggaagtcagagtctaaaagcagggtgcaaacttgggagtggccggcgcctaaatccttttccacagccctaaattagaccttctccctttttctccccatctccccgtctttatttctttttttttctaagttctggaaaggactctggcgtttttcctttcagtcttccttttagagagtagtttttttaacactgcccccagaaataaataaatcatcttagtataatagctttaaagatctaatgtgtctaatcaggatataaatatttcggaaagtcaggaaatgaattaggtttgggtgcaagaaaggattccaaattacattttgcctaataaatatcgcatccgtaaacagtaaaagtaatgatagtgattagttaacagtaccaaataaaacgtgcatttaaaatgaacctgaccgggcatttttgtgtcatgctgactgatgtgtacacagtccattctttgaaaaatcaaggcgctcatttgaattgtaaattgccaacactgcaaatagtaaattgcagtagtcttattgtgctgtgatgtgacaaattacaaatggaatattggctaggcttccatatcttgcatttctcttccacttgctgctactatcaccattaatctcttttgcagaagttctatggcaaattgttctggacatggaaaggac

SEQ ID NO: 46487 - DNA, 1017 bp, Homo sapiens
ttaaacatttgaactggactttgtgggaacagttaacgtaggattgggacgtttttctttgaattatttaataattgcctcttgtccgtacttgtgacatctgtgcttctgttttaccaacctggatctcgaaggaacctctgctctgtgttaaaaagtaagcaaattttaactaaagttgcttattcagctcacagtaatgaagagttatgtaaactgttttgcccaagtttacagatgtctgcttatattaggtacttataatagtagatattttgaaaagatttttaaaaagtaatttatggaaataatttatggaaatgttacattagttaaacactaaaacctccgtggctctgtgtgtgtgtgtgtgtgtgtgtgtgtgtgtcacattttacatgccagagagttacatttatattttttcctactttatccattggatgtatattatttcttgaaacactaaggataagaacatgccaaattcagagttacttacaaaagcaaatattattatgctatcactgttatatctttgaaattaaaaacaaatagtatcccaggtatcacttaagtgtattagaatatagatttgattgttagagaaagtcacctattagtacgatgtttttatattttttgtttatttagcattttttagctagcattgggaatcttgttaaaactattgcaaatgctttttaaatatatatgtatatagtgtatacatatgtgtgtatttaattaaatgcaagaatttaatttttacatattatataaatatatatattcatttcaatttgttgcatgttatttattttgaaagttgcttgctgcccaccattgacattttctaaatatgttcttacatataaataatgctagcttaagttcacaatgtggacaatttgaaaagatattctttttctttaggtgagggatgataataattaaagacactgtaattccattgttatatacttttttgagatcataaactgttttaggttatct

SEQ ID NO: 46488 - DNA, 1065 bp, Homo sapiens
ccctcagacctctcttggagcagtacaacctgagtaattgaacatgtcgctggggagtatgcttggttaagctgattcctattatgttgacttgtcagggaccaataattaaagctgaagagcgatgctcattagtgtctgcaagatgattcgaagaatgagaagaagtccttgaggcacacctgcaaaaggcaggcattgcatggaggtgagagcagacggactggcctgcttttctgctatgttagcaagccagcgataaaggggatacactaaattaagtgttgcaaatgtattctccccaatttagattataaaatgcattttacttccgcctttgaacataattttattccaattttattccatgtaatcatattttgctcaattatgcttttaatgctatataagatgttttagaaactagatataagtctattcaaaagcactttgaaaaactttatactatgaatcatttcattcattttcctggaagcatcataataatcaaaatctgctttgcttctttgaactctcaatactctgcacgtaaaacatgtgagttatccagctttgatgataaagactttagtggcatacatttgtcacatttacttcacaaaaatggaatttttaaatgtgtatttaacacgtactaaaccacatacagtatacaagcattggctcccgagaaggccagaggaaaacactacatcataagtatagaatttatatttatcacaacttgagcaaagctgttgacttttggaaacaattcaaactttttagcactggaatgatacagaaactcaatcctaaagctctgagaagcatttttcttcttttgaaatttgccttaggtaggctcactttttacaaatctatcataaaatcatgggatatacaaatatcctaatattttggaatattaagaaaaataatttattggatcttttttctgtaatctggttttgaaaaaagtgctttatagtggtgaagtggcctttttacttccagtgttgtgcctgttaaatttatcctgtgcactttggctggagggatgca

SEQ ID NO: 46489 - DNA, 1050 bp, Homo sapiens
aacctctttcttttgtaaattgctcagtcttggatatgtctttatcagcagcatgaaagcatactaatacaaccagtaaactccagcactgaatctgttctttgcatgggctgacgtttaaattgctagggctaaaaatgctagggatgaggtaataggaagcttggaaatgtggcatacatgcatacttagcatcataaaaaataggaaatgccactagacatgatgaatttctggagatcttagacagaagtgttcccaacttcattaagttgccagatttgctgaatagatatttgtgtgtaaaggactcaaaaatactaggaatatatagcagtaggatacactacttggcctaagaaacatgcagtctgttttgtaaagcagaacacaggcacatgaattggcacaggaatggcatttgccatccttttagacagatatggtagcagtataccatatgaatatcaaaagagcacagaataaataaaggaccatggttttgaataaaaggacgttgattttcaagacctgtacagttgactccgagagatttaaagctagggtcagtctttggatggaggatatgcaggcattgcaggtgtgttaataggcaatttaaatatgctgcttatcagtcagtaaaaaaaagttcagaatttagaatatcacagtatttcaaagcagccattcaggcatattatctttgccatcagtttctctgttaaaaaaaatagttttgtcattctgtagtttttaaaagacaatttcaaaactttcagggggaagcaataattgccaacaggaaccttgacacctagaggttgccaatgtgatcagccttttgaatggtaatcttttaccatccctgtttgagatccacatgtagagtagttgggatatattgaaatcacacttagtgtcttagtcttgaaagttctttttactttattttattttattttttttcagacaaagtctctgtcgtccaggctggaatacagtggtgcaatcatggttcactgcagcctccctcctcccaggctcagg

SEQ ID NO: 46490 - DNA, 1227 bp, Homo sapiens
ccttatcctttaaaaaaataccacattagcattccaaagattctttatcatttctagttatagcagttgttttatcattaacacggtgctttcttatatctagcaggtttgattctagataatttgataactccaaaagcgtatgcaatttgtcataaaactatgttacagaaatataattgtaattatggatttgaaaaatcttaattgtacagaaccccactgagtagatgatgaaaaaaagcagtgattaagtacaggccaataatgggaagatataaatccacaaagtgaattttatgcttccaggagtaagtgtttttcatacttaattgctaaaatgctttgcagcactgagaagaaatattgagaagcaagattagttgtgccaaactataaccttgaattctatggaaaaccagtgcctggatgccttagtggctcagcctctttatctaggggaggtagaacagctaggcttaagcctcgactggccattccttccccactggcttgttttctgattttcatttataatcatctggaaattgaagagctttgattgaacgccagtgggagattttagctttatttcatcaacctttcccaatattaacagtaaattacaactatctttattactgctagattaagttaaattatagtaagatggtttatcatcatgtgtcctttatccctggtcttagactagagtttacagaatatctcacaaatttgaagaataatatacaatgttttatctgtgttagcaagaaatgcaaagccttttttttttttttcctgtctgttttgtgaattgagcttagaactgtcctcgtaattagaaatctggttacttggattctaagcttagagtttcttagttttaagaacacatcacctcataattgtaccataattatgaacgttacaagtagtagtgtttttgtgtctcttactgtcagtgacaagcaaaaaattcgctagaatatattactcttccctaactctgagatggaagacagataatagccatggtgcttgaaacatgtggtgctattgggatgggaaattgtaacagcatttgacatgcaagggtcatgtttgcacctcttcttggatccagtgaaaatgtattagttcattctcactttgcaatgaagaaatatccaagactgggtaatttgcaaaggaaagaggtgtcattgactcacagttctttatggc

SEQ ID NO: 46491 - DNA, 1047 bp, Homo sapiens
aaaatgagtatatcaagatttctgtactcaagttatatacagttagctgtaggtgataagacaggtatggtgacagctaaaatacaatcagacttccataaaagaggtgaagggagacgagaatgattatgattgtttaaagaggaacagatcacattgtgttgagaaaaccgacttagttgtcccaaaaggttttctgagcttgtttcggaaaggaagactggacttttagcaggtgaatatgacagcatgaagggtaagccaatatagaagaaacaatgtaagattacaaggggcattttcaggatataggaaagagaaaagcttgatgaaaagttaggtatagtatagtatggggagctaagacttgacataaaggttaggataattttctaaaatgtttatttgaaaaactttatctcagaaggaaatagggaaccattccaggatttgggcaaaggataatttgatgaaacctttaatagggttaatatgaccatcttacataggttgacatggaaaggaggtggacggggttgaggtgacgaagactcattagtaggctgatctcttactctatgagtaataacagggagcctacactaggataatgatgttgggaagtgatttctgtagctatgctgagcagacagtcttcaagagttagcaaagtttatatgtgcgggtgacaaaaaagaggctttgagttttgatgactgaaaggagacaaataatagctaatctttgataaagactaactatgggcaaggctttactctttgtttgtagtaacttacttaatcctcattataacccctttatatagatgctgtattttctccattttacagagaggaagtagagcctcagagatgttatgtcacttgtcaaaagtcacccagctagtgaatggctggatcaaactggatcatgtccaagtagcctggcttcaaagttcacacgctttactatatttattcttttttttttttcttttgagatggagtttcgctcttgttgcccaggctggagcacaatggcatgatc

SEQ ID NO: 46492 - DNA, 1173 bp, Homo sapiens
attctttttttatgactgaatatattccattgtgtgtatttacctcattttgtttattcatttatctgtcgttggacacctaggctgattccgtatcttgattattgtcaatagtgctgcagtgaacatgggggtacaggtgtctctttaatatactaatttcctttcctttggaaaaatactcaggagagggattgctagatcatgtatgtagctctgtttgcggtttttttgaggagcctccatactgttctccatagtggctgccctagtttacactcccacccacattaatagcacttgaaaaacgacaacaacaatgtttttgtaacctaggctgtttgtgaggtctggcatagttctgctggcccaggtttctaaagcaggtgaagcagatgtatcttagtgaattggactgtaggtttgcagctactgtgaaatgttatcctttagtgcagtatctgttcattatttcctatataactatcttttgcttggcttctcttttccatggactgcatgagtcaggacataacagggcccccaaaagaacccattgttgagcattcttagatgttggaagtgaagagtatacagaaggtggcccaagtttcaggagcacagggccagaatgattcaaaaatgaggtatgtagtgttgatgtgaatctggtaattttccggcagagcccagtctgatgggtccattttacaggcacattaatacctaaaatgccacaacgaggttttattttggatttttggggattttgttattttcaccaaaaaggtaaatattatctccattgtctctcatatatatatatatatatattttttttttttcttctctcccttccattagatactgttcaaaactttccttaagtgtttgtaagcaaaggcattgattagtagactgctctgcttgttaactcaaggaagcttggcaagctaggtactgctgtatctagttgtgttatcagtttaaggaaaggcaaattgtttcattgatgtttgaagaccctttttccttttggagaagcaatactacttatagacttttattatgaactataatttacaaatacaaggaagtctggaacacagctttatatcagtggttaggagtgaagcaaaggaatcttagttttgtttttttctgatgacagca

SEQ ID NO: 46493 - DNA, 1029 bp, Homo sapiens
agaagcctggtctaaattttagtataggttattgaaaagttcatattgctccaggcttttgacagtaatgttgtctttttaatatgttttctgtccttcagttagaactgataatataaggagaaaggagttgttcaagtctcaagagcactttatagcaaattgccttttctgcttcacctagtggtgttcaatagcctgaaagattgagcagtttaacagtttactgcttaaatgtcaagctttactcttttttcattaatagtagtaagacccagagtcttaagattctgaataacaataatagtaagatcattacctgtattttattaaagccttgggagttaggagatgtcttgtgagtttattcattaagttgcttagagccatgatgtagctagtaatacagtttatgggtactggtccctgcgttggtgtcatttgaggactttgttaaagttaaacatttagattctcagattatgcccaggatattctggttcagtgggataagaaagacttggaatctctatcgctgagaaagaaactctttgggttgcaatgctgcccagcctgttttgcaaaccattgctgtagtcagtttcttttttctctgttagaagaccttttccatcccctgtgttttcatttggcatatcgtcagtagttaacatttatataaaattagaaaggtaggaagtggaaagtagaaaaatataacattgttctgggagtttgaagccctgtgttcttgacttgatatagataaaatgggcaaggcactctttctccattttactatctgtgaaatgggccgtatacttcagtggaacatgagaacctgtagacatgagtgctttgaactttcaaaagaagtgtgaattgagcttgtttttacaaccttgttgtaatatccttccgttaaaatgtgttttccttttcgacataaaacctgggtctcacggaaaacttacccctgcactttctgtttcctttgtactttattcctatccccactcttctctgtgt

SEQ ID NO: 46494 - DNA, 1060 bp, Homo sapiens
caggacatcaattcttcaaggcctgttttactaaatgggacctatgatgtgcaggtttgtactttgtattgtctctttgtacagaaaaagttattagaaatgaaatgtgaattcttatattcatgttaaaaccaaggtcccagtaccagacaggtagcctgctagatctagcagaagagatggacacactccatagctacttcatacaagtatattcagagttgtctaaagacaacttttagcctcttattgtggaaaacaatcctagcatttttttaaatttgggaaagtcttttcatggaattagctaagcttcacaattctgggcatatgtcatggtaatttgatgttttcacagtcttccaaaaatgttactaatctttatggttgcacatgataataattcatgccttgttccagttttagattataaggcttttgctataatctttctttcagtgaggatatttcctgtatcttggattaggatttgattttatattcatcctgacggttcatattgatggttgcagagatagtcctgaaaaggcaaaataattgcaaatgaaaactgggatataacattttatgttgattagaaagaagtaaatgttattttaagtattagggacagcagaatgaccttggtaggggccaataaagcattcctttctgcatttaaggaaaatggcaataatttatgaaagcatttagtaataatttagatttttacttttattaaaaacagcctacctttttgttctatctttctgtctttagtttatggcatatgtgaaatggaaaaaagaaactgttaccattttgaatagaacgaaacatggaactgagtctaaataaatgtatacatttaattttagtaattttagcatagtcaaaattcatggtcagcttgagaaagtgtattagtttttgttacagtttgtagatttttattgtattataaggccagggggatttcaaaacatattagctttactagtaactttttttaggaatgattagaagtacccagagaactaatgaaataaatcccttaaaa

SEQ ID NO: 46495 - DNA, 1029 bp, Homo sapiens
ctcctgactgctaaacactttagatagttctacttgtttttgaactttacacgtgtccatatacattgaaagcatgcattcgtttgtgtctgccatgacacactcagcatcatgtttgtaaaattcattcatgttgtatgtagtttgttcatttgtattgtaccatagtattctgttgtatgaacaggtattgtattttataatcatatgccacaactttaaaaaatctattctactgctgatacagatttagcttgtttccagtttgagaaattcaggaagtaatactgtgagaattggtgtgtgtgtgtgtgcacgtgtgtttgtgtgtgtacgcgcattttaaaattaaacttctggttttgtgtccttctgaatgttttaagtttcttggcgtctaatccagatgtttgaggcttttctgtattctttttatgttccaggctattctcttaaaagataaactatttattttttatgtattatgctacttgtatagtatattttgagttttggaatgttggagaatacagaatgaaaaatttgtaaataaaacatatgtatatataagtgcatatatttatggtaaacattatatatttaataaacctattacataccatatgatgttcatgtataaaacatacataatcatccaaatatacaaacatgcaaattcattttactgattatggtactcttattatagaattatcactatatagagaatgtgccactttttaatgaactttcctctgtgtaatcagtctacagatatttttgatgtgtaaagttacacagacatttatggaatctaaatcaaaccaacatggctgtgatttaccattttaaaaaataaattcagtagttcttatgtctcacgacttgtacatttcttgatctgtgcccatggacctagagctatgatatctgattcttttttcagccgaaataaggagaaaattaatgccttgattccttggatgtcgtgatttggtttgttattatgttgttgagacaactttagca

SEQ ID NO: 46496 - DNA, 1025 bp, Homo sapiens
tagtactatgatttgcttattcctgtgaacacgaacaacactgacagataacagttttgaacagtagacctgtgtcttttaaaagcttaaaactccatgcacatcattttgtcgttgcaaagacttctaaaggcaggcatggggaggcattgtggagtagggagaggatattatgtccttcagtgatttaaggaaatgcatgttttccatcatgaaagaaaagataatcattatcaaattcagaggagattgttttatcattcccataatgaacctgtgtctcttttaccaattaacatatagatggatattaggagaaaccaggttcaggtagaaagaggtacataaaattaataatccatcacgaggaatttctgcaaagtgccttttatagagaattttttttcttggaaatttttgaaattatcaagtataaagttgatgcttaaattatgttttaatctttcttaagactttctctggatgcagattatggaattaaggtgttttgatactgtgaaagtatgtgttgctaatactgtaacatactgtacatttactatactgtcaataatatatgtaactactactgagtattgactactttaagaagttaaggtctctcagtttgtcacaagagacattagtcttatatcaagggtttacctcatgaagtgacataggcaggcgactgacattccactaccagtattagactttttatttatttatttaatttttgagatagggtctcactctgttccccaagctggagtgcagtggcacgatctcagctcactgcgacctctgcctcccaagctcaagcaatcctcctgcctcagcctctggagtacctggaactacaggcatgtgccaccacgcctggttaattttttttttttttgtagagattgggtttcaccatgtcacccaggctggtttccaactcctggactcaagtggtccaccgacttggccttccaaagtgctgggattacaggcgtgaaccaccacgcctggccatt

SEQ ID NO: 46497 - DNA, 1086 bp, Homo sapiens
cagaacctttcttgaggggtagtattttagagataatgttttgtggttctcactggatattttagaagttttattttgattatgtggaatatatcctacatgatcataagcacttcgttaataaaaatggtttgttattactgagatcacccagtttttcggcaggagaataataaatagaagttgtgtgattccatagccactgtagggtgtactctagagcagagtgattctgggttataaccacatatcctaaatttcaagctaatagtgtgtatgtgtgtgcgtgtgtatatatatgtaattacctcgttttattgcactttccatttattacactccacagatgttaccttttttataaataaagatttgtggcaaccctgtgtcaagcaaatctatcagcaccatttttttcaaaaatatgtgtttaccttatgtctctttgtcacatttggaaaattcctgctatatttcagaccttttcattgttattatattatatctgagttggtggtctgtgatctttgatgtcactattgttattgttttggggagccatgaatggtacccacgtaagatggcaaacttaattgataaatgtgtttgttttgagtgctccactgtctggctgttcccttgtctctctggtgctcgttggtcctccctattccctgagacataatgattttgaaattcaacctattaataaccctacaatgacctctaagtgttaaagtgaaaagaagggtttcatgtctctcactttaaattgaaagctagaaatgattatgcttagtgaggaaggcatgctgaaaaagagagaagccaaaaactaggcctcttgtgccacatggccaggttgtgaatgcaaaggaaaagtgcttgaaggaaattaaaagtgccactctgttgaacacacacatgataagaaagcaaaaacagccttattgctgatatggagaaagttttagtggttgggtagaagatcaagccagccacgacattccctcagggcacagcctaatccagagcaaggccctctgtttgattcggtgaaagctgagagagagataaagaagttgc

SEQ ID NO: 46498 - DNA, 1915 bp, Homo sapiens
tatgcttttaggtttttatccaaatgaaataacttctgagccttcacctctagacctaacttggttctgagttcccatatcagtggccttcagcctccgtaagtacttgcttttaaacttgtctatcatccttaatttggcattcaggacccttcagtttgcccccaatttaccagttccaaatgtactacatcatgtgtctatccttactatagtgctttctagtcctagaacattctcacaccgacttttgttcatattcttccctccttatgaaatgccttctacgcaaccttaactacagggattctatctgttcctcggcatgttcacttctgtattcttcttcctgaaacgctctacctccgctcatttaggttaaaacatccccgccttgtgctcctgtttatgtgtggctttagcatagctcataccagaagctaccgggcatcatgaacctgaggagagtgagagcatacgtaattcatttttgttccctttacaaatgacttggatgcagtagttctcaaaagtgttgcattaaataggaacataggggaagaacactttggctggcaacatagactttcaggtactgagaaaattgtgaaattggtttgtcaggtttcagaggaaaataaagattatctggtattgcataagttctagatgtttcttgatgtttgccctaatatatcgttcctaaggtaggataccactggttgcaacggagtatgttgtattttgcagtgtgcttgcaaatcctgccttttatcgattaatgtcatttagcgaagtgggacagtgtcagtgaaactaaggcaaaggggaagcctgaattcatttgaaaagtataaaaaaaggagaacacaggcagccttgtactttactgatattatatgtgagacactatgaactaatcagagatgcaagatgatacatggtgtgtccttaattgaggataacagtgttaggctctaaggtcatgagtcagaaatgtgcctttttaacgtccatgttttgaatgttctcaggcccaaaggttgtgttgtgatgtttgaggacaatggcttatgtcttggcttcaggatgaaagttacttgtaagtgggcccaatgcttgcatgctgagggggcaagggtgatttagagtcaggagatctaacatgaatattgatgagtagggttaggagctgagcacaaccataggtaatgttgctttgagatgcccaggtttatggcagcaagaggatattggattcctctttgctcaaatatttttaatattcacgtttccctcagtgatagccaatcaagtgataactgaataatagctgctgagacgtttttcatgttggaacaacaatgcctctgagatttctttgaatgtttgatttttactaatcacttttaatttcatcttaaaagcctgggaacaattttgaagtttaagaacttttttttttaacttaaaagaattattttatctgacaattgggaagtccctttgatttaacatttaactctgttaagcacctaaatattactttaaacagctctggaaaattaagccctgctattattgtacattcccaatctctatggacatgggaccatgaaggagaaatcaaggagatctatttaatgaatttctttgcttctaggacagttcattacttgtaggacttgcacttatctatgccttctttaaaaacaaaacattccaaagcttcctagaaaccttagctaattgcattataccaacatgcttttctgatgtcaccttatgtctgtaagcaactttacaaatcctttgaaagagatagttggatttttaaaagtaatatctgcttggattttgcaaattaagccacagtagaaacagtttcactgtagagtacatgctagttaataag

SEQ ID NO: 46499 - DNA, 1027 bp, Homo sapiens
ttgcctgtaaaatgcaaatgaattttgcacttattttgttttattttctcttgtgttttcagaaatgttttgatgcatcagaaattgagagatcagtgatttcagttctcctgtcacacctttttatgataaaatattttggtcatttctaaggagtagttagagggaaatcctttcataaatcattttcacttcaaaaaaacagtgatgttggaaaatcatatagtattctttgtgattagttgaaaattatgaatggtgtaaaataatatgacatttaattgtttctcatttagacatgatgcattttatatctcaaaatttgatgggaggaaaaagaaaaaaaagaactcacaacttttaccaggtttgaaactagcttaagatagttctgtggaattctccaaaagtgataagaaaatttaaaatactgcccagacacagggttaaaaattaaatctgtatgtagagtggagactttaatctgacatattttaatgtaaagacattttagaataaagaaagctttctctggttttgtcggctgtttttgtttttcgactgctttgcatgagacgatcggcattcttaaattataattatgtgtaaaaacaaataagctgctactgtaaaaagtaacagctctgcacatatatcttgaatactactagaaaacattttcattagaggaataaatgcattaggccctaaataaatttaagataccaaattgcaaacttagtatctctaatacattacccatgctagtccctgcaaagtggaattgattctgagagagctcattatttccgttgctagtagagtgtatttaacaatattttggtgtctccaccggtagaaatgtggacatttcaaccagctatccccttgtttggttcctgtgatgtcaggcaaacattttgccaaaatgtttggtccgatgtaatcacatcggtgttgtgtaattaagataatgtgctgattttgaatcttgttaacgtgttattttgaaagtgtaattttaaaa

SEQ ID NO: 46500 - DNA, 1009 bp, Homo sapiens
caaatttttcttaaacatttactattttgagagtttcaaaaaggggagttagacgccacatttaataattctttggttagaacaaggtattaatattgtgtgtaatacattttctacaaaatattttttcattaaagaataaaaggaaacccctgatgatttaaaagcctaattttgttttgctttatatgtgaactgaatgaattttaaatctggaatcctgttccctattgctaataaattgttatgtagacatttgtttccaaaacggcttgtttttgatgttggtaacatcattaaaaagttttttcttttaatttcctcttccccatcatccagtccaatatcagatggaaatgatgcggagccttcgccatgtaaacattgatcatcttcacgtgggctggtatcagtccacatactatggctcattcgttacccgggcactcctggactctcagtttagttaccagcatgccattgaagaatctgtcgttctcatttatggttagtaggaggtttattattcttttttcccttaatattattactactatttttgctttctgtcctttttgcctctaagagcagtctggcaggccttctcaagtaaataccaaccctgtttctgcagcagcctcagcagcagctcagtctagacagggtttccttctttctgtttatttttcttgctatcagagccctgatgtgtacattttggaatgctggagtagctgcttcatttctattcctccatctcccctccctcattgaaggggctggtggaactagaccagatgtctaacaaaccccgattgctagagtgtctggctctgtacgtgactgaccaatcataatacggtgtgccaagttttttttatacctctgacaacagcgtacaaaacctggactgtttcttagcacaaagatttttttcttttcggcctatttaatggtgtttcctcaagctctccagaccagatgttctgtgctgtatcagaactgtagg

SEQ ID NO: 46501 - DNA, 1492 bp, Homo sapiens
gaagtttgtattagtgtttgcacaagctatcagaaaacttctgttccaggaggaataacataaaaggtaattgtgtctaacccagaaaaccttaacattcaaaatagaaactttaaatgttgtacctcctcttttttttttttttttgagacagtctttctctgtcacccaggctgcagtgcagtggcgtgatctctgcttgctgcatcctccgcctcctgggttcaagcaattctgcttcagcctcccaggtagctggaattacaagcgtgcacaactacacccagctaatttttgtatttttagtagagacgggctttcgccatgttgtccaggctggtctcgaactcctggcctaaagtgatcctcctgccttgtccttctaaagtgctgggattacaggtgtgaaccattgtgcctggcctaaaagggcatttcttttataggcttttttttttttcctattaaaatagagcttcctgttggtggtattttgaggcaaaatttagatgactgaagaacatggtatgtcaggcagaaaatgcatggggattatgtagtacatattaactgaccaaaggaaacaacacttgagagtccatatatttgggatgtcttggggctttttagacagagtaatacccagcacctccccccactcctcttcccccaggtttgtaggagcttggggagtgagtcaaaaccaaaaggtggcatttggtcttgaactgcagtcagctgttagtactgctggcaacatttctttcaaagtgtggtatatgtgtgtttcttgtggatgcagtctgcaaatggattgttatttatgaatggtaaattaaagttgtttttacatttcctaactaagtagtttaaccaatgtttgctctcattgggagttgccatcaaacttagtaacgtagtaaactgtgtttgagctagggttataaaatgcccctttgatctaagaatactgaggggcaacagagttgactgaacagtaagcattagggttgaatgtattcccagagacagagcagtatcactgattttggtgaaaattagtatggacttagccatgatacattttcattttgcttatcagagcctttaatgtgttgagaataatgggtttctgattcatttgcttaatttaacagaggaaaagtattttctacctgtttttactttttatttaaaatgagtgcagagagcagagataatctttgaatatttgctgtgtgtgattatagtaagcattttttcttctacatactgagaattataagaaaaatacattataattagatcctaatgtcaatcacacctggaagtggcagttaggatcaaagtaatgttatagcagtctacaaggattagtacattctgtgccccttttcctaggcttaaatgtctgctattacagccttttcagtaagtgccttagctcagttagaacttcttttcaaattgttttgttttgtttatttagaga

SEQ ID NO: 46502 - DNA, 1055 bp, Homo sapiens
ggagtaagagatactagtgtcgactgttaacatattttgtttaagttttgaaaagaaaagcagagttgtagaatcaatcctttcagaggctaaaatatgaattgacaaaactgtaattaaaatattgatgtatttagagtagtttttcccagcatagggttatttttgtgtgactgaggttggagagaataagtttgtatggtgatgttatttgcagtgctctctgtgcaagttagtcatgttttacattggagaaaatctctgcttagttacttgcttcctcaaatctcaccttccttctcagctttcctgcagcccacacctagggtaaaactgctggaaacctagtctgtggttactattttgcctttgtattgctttagagctcagagaagagttgaatttggacagagaaagcttttaatattttttagacagatggggacattttgtgaatagacatgtgtttacttattattttgtcttaccccctatctgtatgactagtcagtgatcgttgtggtctgtttgacagattttttcaaaactctctttcttttgttgcatttttaaaaatgatatatttttggtagaactgttagaaataatatgtagacagtttgggggcatgttttgaaatttactgcagaaaaatagcatgtttacctagtgacctcatatcgttgtggtcaagtgtggaggtataataaaatgtttcaaatatccagaaaaaaaaattagtccactgtaattcacttcagcatttagccagcaaattacttgagtgggaagtaaaaaagatacaaagacaccaaatcctgcttactgcctcagaagattttaagtgggagagacaagtgtgtacataaaaaaattgtaaaacagaattgatataagtccagactacggaaggaaaaaatgatgcgaacactcagctatcagccactaattcctttcggggatgacttcacaggagaggtgaagtttgattctatagatagatgtcagttgcaattttaagaaactgttaaacaagaaagttgtgtcttttgaat

SEQ ID NO: 46503 - DNA, 1022 bp, Homo sapiens
gattgttaatgcagtttctttggtttacaagtgaggagcttgagaggtttaagttttttgtttggttactgggttggtggcacagttggaagtagaatctattccagaacagttaacactgtcacacagttttctcaggtaattaattttttaaatcatattcttggtttagaatatgaagaaataatattcattgcaattatggtaggcgaacgaaacaaaatatattactaattctagatcattggaagctaacttcttttacgagcttgaagtacttgaattgaccaatgttttatttcacgaacatgtactttattttttaaatttctacaagctctttattttcaaagttttaaaagaatgtttatttcaaaagtttcacatggaataagaagcacagattattatcctaattttacagattggaaaactgagaacagaagaataactgtgtgtttggatttacataggtagacttcgcgagagtagattttttaaaaaaaatgatcatttaggacctttaactgataagaaaaacaaaacctcaattctttggttttcctgccagttttctctgcttcttcacttgggttagagaaaaagcaagctgcagaataagcactacatgctgctatttgtgtgaaatttaaaaaaatataatactacatactgataaaagatacatacatatgtagtaagagtataaacatgcatgagaataataaacaccaaattcagggtaatagttacgtctggaaggggaggtatagaggggacacagaagacttcagctttattggtaaaattaagttagctagcaaggacacaagtgtatgttatttgtgttagtccattttcatgctgctgataaagacataccccacactggctaacttacaaagaaaaaggtttaatggattcacagttccacatggctgggaaggcctcacaatcatggtggaaggtgaaaggcacgtcttacttggtggcaggcaagaaagaaaatgagaaccaagtga

SEQ ID NO: 46504 - DNA, 1034 bp, Homo sapiens
ttcaggtgtcccgataattgagacctttatctctgtgtcttattgatagttttgtcatttatgtgtctattaacaggatcactttctcaataatagcctcaggttgagggggtattctttgatttggctgaaggaactcctggatgccagaccatggggaagctttgatttaagagcataactgctgtagatggacgtttttgacatgtaatcaaactcctggagtttcagatctgcgtttagattatgtgagctttattatttatgtaagggtaaaggaaaggatttgtaagacatttatttattcctcttatttaatttgtggttttgcaaacctagtacagtttcttttgttttttcttagaaataaaggaaataataaactaggatggttgttaagctcccttctgtgtgtgtatgttttaggtggtattaaagataatcaaacattatcaagaagaaggacaaggaactgaagttgttcaaggagtgcttttgggtctggttgtagaagatcggcttgaaattaccaactgctttcctttccctcagcacacagaggatgatgctgactttgatgaaggtaagggtgttcatcacaagtgtgtctttgcagtgcatacaaatggatattgacacaggtctcaccataacttttgataatgtgtgaattgggaatctgtcaggctagcctacttcacttgatgtctgatactttgggaaaattatataaattctgggaaatgagggtttatactatagacatcattagtttggcctttacttatttggaatttgtgattctgatttgtcatagattggataggaactgtgctgatgttgactttgtcaacatgaaatcagcttgctaaataaagttttgagggacaaagatcatccttatgtgtctgttatccattcccttctatcctcttttgaataagtcagtgtttagaaagagatggagttcaattttctgcttcagaaagaagatactcctcaagcatttcagaaattttatttttgtactatag

SEQ ID NO: 46505 - DNA, 1047 bp, Homo sapiens
atcctactgtaaggcatttccatgacattacttcttgaactaaagaactgaggttttagtgtgtatgtaggaaataggacgatcataaaatgtcacaatgaagaatgagctagcttagttttgataatagtgattttttcctgagtactttatcagattatattaaaatgacaagatcataaatattaaagttggaaattattttagtgattgagtctttcctgaatgctttcttttttggacagccttcagtactagagagaatttatccttagagttgaaatcttctttccagaaactgtcacctgtggttcttaggttttgccttcaaagtaagactaatcctctaagcagccaaagaactcttcagtatttggaaagtgctttttttgagtgtcccttgcctagagagagatttgcattaattttactggttctcatcacaggattttaagctttctctcttgtaattacccttttctgtggattcttactcatactgattgttttttgtgcttttctcatttcttagtttggtactgttactggtaaattttctcttgggtcattgtaaagaactgaggataacagttcagtgatgtcgaaagagcgagataattatttcttttacttggagcgctgtattctattgatactacataaaattgcattggctgtttggcaagcatgtcaagcctggtgtgctgtttggttacattatccttactgatccctttagaattcacttttgttagagttaagacagttttcaatatagtttgaactgtaataacttgttttaaaatatattaatttttttattgctattttcttcataactggaaatgaggttattttcatctggcttctttatgaaactgtgctggtcctagtcaccagtattcccttttgcatatgtaggaatcagctgtttaggaatcacttctagaatttgtctgaagaactatgttaagctcatatatcttctaatatctcttgtttactttgatttcagtagtggtttagcaatctcattagtaggggtaa

SEQ ID NO: 46506 - DNA, 1069 bp, Homo sapiens
ggatctcagctcactgcatcctccgcctcccaggttcaagtgattctcctgcattcagcctcccgagtagctggggttacaggtgccagccaccatatctggccaatattttgtgtttttagtagagatgggtttcaccatgttggccagagtggtctcgaactcctgacctcaggtaatcggtctgcctcagcctcccagagtgctgggattacaggcacaagccactgcgcccagccctattaatttttaaaactttatttttgggttatgggcttttttgggaatttgaagaatgacaaagtcttttttttttcttccccagggaaatgccttcaagtacgtagatagaaaatattgctgatgattttaagaggttcgtagatcttttcaaatgcctacctgtccttcaggtttgaatgtttgtttttagggcttgcacactttgagaagtatgctttttgatatagaatattgggtagtgtgaatttttaaaaaaatcatgtctttttgggcagggagatggtaaatattttaacattttccaatttctttgaatttgttttacgtaaacaggcttttctaggaacaaattatctgttgtctaaataatctcattaaattccaaaatactgtaaacagcaaaattctaagcagtatactttgtcttcaacaataatacaatttaatttatttttggtgacctaggtttattaaaaacatgagtcaatagatatttattttatattatacataataggtagggttatagttgtggttcttagctctttgggtattatagcatctcaggggacctttgaactctgaaattgagagtaaaattgggagtcagcgcatgtatgaattgtttcttcatcagacttttaaagtgtgtacagttttgttcagttaaggtatttatacaaaataaattccaccttttttttttgtgagacggagtcttgctctgtcgcccaggctggagtgcaaaggcgcgatctcggctccctgcaaactctgcctccccggttgaaacggttcccctgcctcagcctcccaagtagctgga

SEQ ID NO: 46507 - DNA, 1035 bp, Homo sapiens
atgacaaactgtacttgtttcatcaaaactgaaagggctgaagtggatgcttaaatatgctggagtaatatgccatattcttgttaatgttggtaccatgctcaagcatataagagaaaaattggattcaggaaaaacagtgataactcagtattaacttagtcaaaatatatatatttttaatcctttgagtctttgaccctttaaacatcagctgcattttggcataaaattttaagattttctttgcctccaaaatagtacctaaagtggtacttaagtgccacagatgtttattgtatcttgaggcttactgtttgttttttttttttttaatactttctatgtttccacctctccctgtcgccatctgattttatttcctgtccattagtgataaccactgtctacccaagtcatgaaggcttctggtatcgtctttgactatttcttgaggtttttcctaagatcacttacttagttctttgaatttataactacattgtctgtactgttcagttcttgcactctttctcaactatcaccaaagcctgtataactggtcttacagactttattttgtacttggacagtgctgctgactaagttatcttctcaatggacagctgtagtcctaaaactcaaccctttggaaaatcactattacacacaaaataaaatcaaactttatttcccaacttatttatatatgtgtgtgtgtgtgtgtgtgtgtgtgtgtgtgtgtgtgtttatatatatatatatatatatatatatatgtatgtatttttgagacagggtatcgctctgtcgcccaggctggagtgcagtggtgcgatctcggctcgctgcagcctccacctctggggctcaagtgatcctcccaccttagcctccctagtagctgggaccataatgggtgcatgttaccacacctagctaatttttgtttttgttttgtatttttagtagagatggggtttcgccatgttgaccaggctagtcttgaactcctggcctcaagtgatccgcctg

SEQ ID NO: 46508 - DNA, 1034 bp, Homo sapiens
tgtgatctccacctcctaggttcaagcgattctcgtgcccctcagcctcccgagtagctgtgtgccaccatgccctgctaatttttgtatttttagtagagacggggtgttgccatgttggccagactggtcttgaactcccggcctcaagcaatccacccgccccagcctcccaaagtgctgagattatagggatgagacaccacactgggccagacttttccgtttttatgttcctcccaagatttggataaacctgcaaacatcctgggccattggtcctttctgttaaggtcagacaccttattgaaattcattgccatttgctttttgacagtgcttactgtgttcgtgacatatatgctagtgatgacaatctatcatttgtttcttgtagctgtcttcttgggtattatttaaggcagcatatgcagtacttctcatggaggagatgacttaataaatcagttatgatctctaggccttagtttgatatgaagatagtgaatggccttcctactgtaataaagagaacctgaatgggtaatttcttacattgttgatatgatttttagtagtagatattgattttaatagttggtaatagttactgttggattccaaactggatggtttcccaagtaaatggaatatgatcaaaatattttaactttagttgttacagcaaatctggcctggatttatatggttaatgcctcacatatctatttaacattaaaaggtgtgggtgtacaataagcattttttatcttttgccttcttgtcaccttttgcttcaactggtttctgtatatgataaatttggatcttttgttcaatatcttggacttcattggtttggctgagcaactccaggtattttaagtcttggcagcaatgctctggacttgcagctcagtcctagcccataccttggagaaaaaagcctctacaaagcatgaagtttgaaaagaatctttgcaagttcttatttttgtgtttagattttcttttacttcatcaagtctaccata

SEQ ID NO: 46509 - DNA, 1050 bp, Homo sapiens
ggctccatctctaacactgggaaattacgtttcagcatgagatttggaggggacaaatattcaaactgtatcagcatcctcactgaattactactttattatacagattaagttacccttttttggttttatttcagcgtgctcttgctaaaactggagctgaatctatcagtttgcttgagttatgtcgaaatacgaacagaaaacaagctgccgcaaagttctacagcttcttggttcttaaaaagcagcaagctattgagctgacacaggaagaaccgtacagtgacatcatcgcaacacctggaccaaggttccatattatataaggagctagaagcattatagctagtgtttgattcactagtgcttacaaattgcccccatgtgtaggggacacagaaccctttgagaaaacttagatttttgtctgtacaaagtctttgcctttttccttcttcatttttttccagtacattaaatttgtcaatttcatctttgagggaaactgattagatgggttgtgtttgtgttctgatggagaaaacagcaccccaaggactcagaagatgattttaacagttcagaacagatgtgtgcaatattggtgcatgtaataatgttgagtggcagtcaaaagtcatgatttttatcttagttcttcattactgcattgaaaaggaaaacctgtctgagaaaatgcctgacagtttaatttaaaactatggtgtaagtctttgacaagaaaaaaaaacaaacaaacacttctttccatcagtaacactggcaatcttcctgttaaccactctccttagggatggtatctgaaacaacaatggtcaccctcttgagattcgttttaagtgtaattccataatgagcagaggtgtacgcgaaattgtgttatgactgatagccttcagctacaaaaagataggactgacctggtttaaagtgttctattttgtaaatcattccatttgagtctttctgatgaacttggctatactgaaatctgttattttagtgaggctccaaaatgagcaaagc

SEQ ID NO: 46510 - DNA, 1037 bp, Homo sapiens
agcagcatcagcagcgtgatgttatcggtttgttctgttggaatagttccttgatgaagttcacatgagtatttggcttaaaatttacctttatactgtcagagtgaaagaaatgaggaatcaaagatatactcaaatgtttgggcagggaaatgcattggatctgattgccttatttaagtatgaagcctcctgtctttccagagttttaaggttcagaactggcagggtagatagtctgctaaagaattgtcctacattgtactgagggtaggacttgtccttttaagatcccctttcccctttacgtatattgctaaaaattgagtaaatctttatggagctaaaattttatctggccttcttcattaaagaaagcattatgtatgtcttagtgtactagtttaaaaaataaatggttctataatactgttcaaaactgtatgacctatgttttctcttcatatgaccaattgcagatgagcccattattgaagagccaagccgcctccaggagtcagtgatggaggccagcagaacaaacatagatgagtcagctatgcctccaccaccacctcagggagttaagcgaaaagctggacaaattgacccagagcctgtgatgcctgtaagtaagcaaatctatccattaagtcatttgaaggtattcatacagtcagtagcaagtggtatttagggaggccttttaaagtatcttggttttgacagaaaatggtaaggaatgagtccagaggaagaagagcaacaggatatagacagtccactcggagtgagagaatatgttctgggagtcggtgcagtctttcctgactctttttgaatagtattgctttagagtgctccagagtgagcatccttgactctgaagttggttctgatttattatttggcaaacattcctgcacaccttcagtactaggcagttttaggtcatcttattaagtaatcagaataaacttcaaatacctgagaaaatgtaaagcagtatctgtctgcttcattcaaactttgactac

SEQ ID NO: 46511 - DNA, 1046 bp, Homo sapiens
attccagcataaacagaatttctttattaagttgtaaagttttggaaacagttgctaattctgagtcttgaacagcttttagatatatatgagtgaattgtgatcagttggttcaataggacatttcggtaaaactagcctcttaaaatgttgtaacaaaacctaaatatgcttatctcagaatgctaaattttattagtacttaaaactgttctgtttgtgtttgatagctgtgttaagtaaaatattttttaaaatagataaataaactagaaaatacaaatgaagaatgagaatttttttttatataccaagtgttttatacttttataaactacctggaggagaaacagataaaagttgagtatacgtttaaattttatcccttttaacataattttgtttttccattgattggctgttgtggtttggcatttctttttcaaattataactaacttacattccctatttcagatgacaaacttattagtaataatgatggcggtatctttgatgatccccctgccctctctgaggcaggggtgatgttgccagagcagcctgcacatgacgatatggatgaggatgataatgtatcaagtaagcatttcatgttcagtgattctggggatgattgtatggcatccagaaagatacttaccatagaagatgacaaactaaaagttgtagtttttagtgaattataaatatctttaagtacagtgcttatgattactggttctgattctatgtttaatcttgcacccctccccatttttttggccaattgggttcaagtctggcggggctttcccattaactagaaaaatattttttcttagtaataacaggatttctttccatttcatgaagagatttttctcctccccatttgtgggatatatgttatataccaaagctttttgtgactttttttttttttttttttttttacagtgggtgggcctgatagtcctgattcagtggatcccgttgaaccaatgccaaccatgactgatcaaacaacacttgttccaaatgagg

SEQ ID NO: 46512 - DNA, 1028 bp, Homo sapiens
ccatacctcattttacctactcctaggctaaactctgaaccagactaatccagaaagaaagcttttgcccaaacaccactttttgaaagttgctagttctagataagataatagcagaggttttttttccctcctttgttcttaggtgaaggttcaatcaatattaattttaaattttataacaccacataaaaatagattctgtttttccattaggagcaacattttactttgaatttttttaaaattagggattcattgtctgataaattctgaatttgatcacaaatttggtataattttggatgtctaaaaatgtatggccatatacatcatcatttatgctgtaagtcacataaaatgctcataaatacagaacctgagagtcataagtagggtcctagagtgctgtagaaaatacacataaaatttaaaatacaacattttcttttacaaataacaatatactaatcataatttaaacattaagcaaatgtttaaaagctttttttgttaccttagaacttgttgtgctttatggcgtggtttgggaaagtatctggggatgtttgagttcatattgccttgttctttcagtaaattttccttatggctagaggaattttgaatacttgtgtttagatggagtcttatctcattgttttatcaactactgcttttccacatactgtatcccatgttaatgttgatcaagatctgcctcgaaaaaaggttgggagtatattttctggtgaaaaaaagctatggatactattgttctttatcaattagtatgctttccaaacttttttttttaaatcggtatgctttccaattaatggaaacttagttaaaaagtagcttaaacaataagggaaataacaggcttaattaactaaaattttggaaacagggagatctgagattggtccagcagcttgattatgtcatccaagaactctccatccttagtgtgttagcttcctgtcctcatactttagcattgtggtttacagggtgactgcatg

SEQ ID NO: 46513 - DNA, 1024 bp, Homo sapiens
acaaaattagaaatgtagaacaggtggtgtttgtcaagacttagaaatggcagagagagagggatgaatgtgatgagttttgtagtgatggaatagctgtgtatctttttgcagtggtgattatacacatctgcatatgtgacaaaatggtataaaagtctgtagacacattgaatcaatgtcagtgccctggttttgatactatattgtagttatttaagatgtcaccattgggagaaactaggtttaaaaaagtacatgggacctgctatctatgactccctgtgactctatttcaaattaaaattttatgtattgtacatgcacttgattttatttctgtaaagcaaggcatatatcattttctagtcgtggacattttagaaaaaaatcagaacaatagatttgttttaaatctggaaattcattctctgaagtagatttcttttaaatccgtgaaagaggggaattaaatgatataaaggaaatatcctgcagttaatgtactcttctgaactggggttttcaagcggcctttcttaatacattagagtgctgaaggaaagtagaatgtcagtaacatatttgtgattccaagactttcagtcataagataaatctgctgtaccattgtccctgatttaatatttaaattataagtagataaatgctttgtaagttcttaagttaagaaaactatatatataattctttaccttttttgaacttcgatttttctaaactacccacctgtaaaatggggccagcccatctgcttagctttgcttggtggaatatgaaatgcttagtacagtacttttcgtgtagtagcaattttacagataatttatcccagaatcgcgatttttaatggcattctaaaaatggaaatttccacagatttttatctgtgcctgagtatctttcttcatagattttcttttcttgccatgaaaaatatattctctagctcttggccagtaaacagactatttctactgtcaatcaagatagaaatgaaaca

SEQ ID NO: 46514 - DNA, 1049 bp, Homo sapiens
ttgtattcttgtttaaagttgtactgtacaattgtcccttgatattaaaggggaattggttccagaaccaaaaccacgaatgctcaagtcgcttatatgaaatagtgtagtatttgcatataacctactaacatcccatatacttcaaatcatctccatttatgatattacaatgtaaatgctatgttaatagttaatatagttgttatagttttttattagtagtattttttattattgtgtttttttgtccccccctccaacaatttttgatcctgggttggtttagtccatggatgcaagaagccatggataaggaggaccgactatattccgttgtttgggtttattaatttttcatatcacttattgatggccaagtaggttatttcgaatgttctgttctgctctggcaaggcagcatagtgttgtagttagaagtgtggattctgaagttcaagttccacttccattaaatactagtgacatttacttatcttcatctgttttctccatctctaaaatgggccagtaatttacttctgtaggacagtcatgaagaggttggatacataaaacacgtagtgcttagtaagttttcttaggattttttcgtgtttggttttttggttttgtctttagtaatatgcatctccaagtatatcttttgtattgattactgaaagtgcaagttctggctagaaagtgtaagtgaaatttttataaaatgttgtcatattgtccttcagagaggacagtaccaatttacacaaccgcagtcctgccatgctttctaatgagtgaaatattggtaatgactgatactatcctagaagcatgagcctcagtttgattctttgaaacagtcttaaattgccattttttgtattcttgaatatgttctaaaatagcaatctttctgctgtttcacatcagactttaattttttagggtcaattgaaaaaaactgcttgccgctttagaaaaaaatgattctcaaatcatgaaatgctaagttgtgctctggtatcaaatgcagattttctgca

SEQ ID NO: 46515 - DNA, 1024 bp, Homo sapiens
tacgttgggaatgctgaatatttcacagacgcgtggaaaaagagacggagggaagttgcttctttttccaaggatatttgcataattggttttcccctgaacttttctgatcattctttaaagtgattaaggatatcgggtgttgtagagacgctctgggggaggtgtgtgtttctgataaatgcttgatgcccttttcgtcgctgaaaaaggctttttgcgaatgatccgctttgatagtgtggggtgacactgtcgggttgtgctgccagacttagcggccttcttcaaatttgtaagagggaaaccctgggggatttacttggtcactctgatttgttagtgtcttcagcgtgaaaaaaaaaacagcgtttgtgcgaagagtttctgggaaaggcttgtgtttatcggcttctttttgcaagggaaagttaatctttgttgtcattatactggttagaagagtaattggttttcaggcaaaaatttctattttcttaaattgggtgtaaatgccagcgggcagtgcgagtctatagaattttggagacaggcaggagaaggtttctcaaatcgtgaagtcattaaatacctttgttaatgtcggaggcaactaattatttttggaaaggcattgatgaggacatacgccatatctgatcttcaaataagttaacagtttgtatagttgaggtgacagcagtgcataactaatagacatagtgcttttttttatacacaagtcagaattacaaaagaatttctggtgaattattttgtgaaacatacaaattctaagaaacgcttttacagtttggtacagaatggaaattttctaattcttgagaaataaggttgtgtttttagtttaaatgtcaaaccagagttgttaggcatgattatactggctggttaatgttttgctgcaagattgtcttcagagttacttttcgcatcagcagtggcactatgttaggtgtgcccttgtatttaattttcataatcttttttgatgaatattatc

SEQ ID NO: 46516 - DNA, 1080 bp, Homo sapiens
agacagttaaacaggttttttgttttgttttgttttcattttaaaaatgttttatttccataggtttttgggggaacacgtggtgtttttttatatgaatacgttcttcagtggtgacttatgagattttagtgcacccatcacccaagcagtatacactgtaccaaattcgtagtcttttatccttcaccccacttccgcccttacccgtgagttcccaaagtccattatattattcttacacctttgcatcctcatagcttagcttccacttatgagtgacagcatccagtgtttggttttccattcctcagttacttcacttggaataatagtctccaattccatccaggttcctacaaatgttattatttcatttcttttttatggctgaataatattccatggtatatctaccacaatttctttctttcttttattttttagtaattagggatatgtaaatttatttttttaattttaattttaattttaagttctggggtacatgtgtaggatgtgcaactttgttgcatagagaactcagaaataagaaccgcacatctacaatcatctgatcttaaacaaacctgacaaaaacaagcaatgaggaaaggattgcctatttaataaatgatgctgggagaactggttagccatatgcagaaaattgaaactagaccctttccttacacttcatacaaaaattaactcaagatggattaaaaacctaaatgtaaaactccaaactataaaaaccctggaagaaaatgttttgttttctacataacttctcagagtcttttgcatgcagtgtcatgcattgtgaatctcagactggagaatgtgacatctgatgatctgatgtttcccaaacttattttaccatggagtatcctctttttttggatgggggggacctgtaagactagttttctatggatcacattttggaaaacattaaagagaggtatacattaatatggattgcaactgtgtgagaaacatgctcattaaacatgacttttgtatgggagtaaatttatgaataaaagcttaaatttacccaagatctttagg

SEQ ID NO: 46517 - DNA, 1049 bp, Homo sapiens
agtgtggtggtttatgtctgtaatcccaacattttgggaggcggaggcgggtggatcacctgaggtcaggagttcgagaccagcctggccaacatggtcaaatcccgtctcttctaaaaatacaaaaattagccggtgtgatgtacatgcctgtagtcccaggtactgcagtggctgagggaggagaatcgcttgaacctgaaaggcggaggttgcagtgagccaagatggcaccactgcactccagcctggcgacagggcaagattccatctcaaaaaaaaaagtgatttattttatttcttaatttttaaacatataatatgccttctaggtagttttgtgatttggaaaaccacaaaagaaaactgaaatgtttgatgccttccacaattttttagaaaaagaattctgcttcaaatagtgaaatacatttgtaagtgaatcagactctgggtagttttcattaatataaagtcagtttcctcccagctccactcacagatggtaggctcatatgaatctttctacaggcatcagatagtatgctagatgatggtgaaatggagatggaaaggctcatcccagctctcaagaactgactgtctattgaacaaagaggtaaacagatgattacagtatgtgaagataaatgcaccacggtgggtatgtgtattgggcaatgggaactcatagaagtgttaaatcaagtttagcctaaagctgcctccatatatatttaagttcagtctaatggttttactgtacttcgtgacctataacaagtggaggtgtaaacagaccgtagcctacacttgtgccagtcacgcagttttggccaatcaaatgtagccaactgtttgaaccgtgttcaaataaggcaagtgctgagctgttaccaatccagctgtttctgtacctcatttctgttttctgtatgtcaccttcctttttctgtccatatatcttcttccaccacgtggctgtgctgaagtctctgagcctattctggctcagaaggctgcccaatttgcaaatcgtttattgctca

SEQ ID NO: 46518 - DNA, 2013 bp, Homo sapiens
aaaaacaggttataattcagcaaaaactagttcaagattatttatacgtttatttcactgatatttattaatcatctactacgcgccagctactgtgtcaattgccattgtttcagtacttaacaaaaaagacaaacacagagaacagagactcaacatatacataaacagtagaaagagacctggcattcatagttgaccataagtttaatacattgtggggaaaaaagaagtgtgttttatgagggctgggaagtggttatttttgctatgaattagtcagatctcataatgtcatatttggctcataaaaactgcagaagaatcagaaaaaagattattgtagagattttaaaaaatgactcccatactcctataaagacaaaaataaaatgcaatgaggtatttagatttggacttagaaacataagagatgacttgaaactaacttcaatatgtggaaatgctaactgcttgtgttctttcttcctaaagaaatttgcaaaagaaaatgagcttaagatacaataagagagattgtagttggacataagaaagaaacatttcttagcactcaaggtgatatacctaggcttttggatctgtagagtgggggcaaaactccttctcttgtaggtgagccctcttcaaagttcttggtcagaactgttaggatgatctttgcattcttttccccagggtttttgcaaattcatgaaatcttccaggagttgcagcccttgagttcccactctgcccctctggtactgagccctaccacttctgatggcaagaaccacctttccagggcttagtgccctggagttctgtctgcagccacccaaccatgtccactaacacagggattagggccttgtactcagagtggggttctgggcccagcaatatcagcaccatccaagaatcagaatctatagtttaatacaatccccagtgattactattatttgaagtttgaaaagattttttataacacactggcccctgggtcagaaagacttgatttcagagcttgccagtgccattatctggctctatgactttggctaagtcacctaacctatctgagattcagtttctttatctgtaaaatgggtacaagaattgttacctcttaggctctcagaaatgcccttccttgtcactttattttaaatgaaccctttctaatatatttaccttggtcttttattattgttttttccttgagaacagttattacaattttgatttatttttgattatactgtttgaatgtaagttccatgaaggtagagaccacgcctgtcttgtttattctagcatccctggggcttagcacagtgcttggtacctaatgagtggctcaatatttgttgaataactgaatattgtaagtattaaattagatgatgcaagagaagctcaaggtctaacttagagaaaaatcttcactaagtgacagctgtcaacaaaattgactgtgtgatgtgtactgcaaaaatgaaaatgagagacttttgctaaaaaatgatcaagcatttcatttggcaatagcagataattaaactaagcacggggccctttcatcactgtgcttttcatgactgcacaggtagtgtgcccaggaagccagttttggctattggtagtgttactataatagtgatgattctgccagagatgctgccactaccgagaatgcgccatctcccccttcttcttgaggtgtgaagtcgtgggcacatgccccagaagtcacactgccttcctgggctcagctcccccttattcccaggctcaggtgtggagggctagagataacctgaaacttgagaaagtaccaactggatgctgtcagttcagccggccctaaagtattccccacagcaaaacgctgatttacacatgattggtaagtgaggcattcattgaatcagcaaaagttctgcaaatatgcactaaacagaattttaaatgagtttctgtaatgtatggcttttaatttacttg

SEQ ID NO: 46519 - DNA, 1035 bp, Homo sapiens
gatatgcccagttcacagcattccttcgcatgaatgctgggacaaagtggcagggccgagccccagagcatctggatcctgacagctgtggccattacccctttggtttcaactactgcatcgagttcatgaattgctggcttgcgaggcgtatgtcacactggcatttctcaaaagaatttataagtgctccaggtgtgttgcagctccatgattcagggccactgtagtaaggttttatgttctcgcaatactccttcctcctttcctattttcctccctcgctccttccattccagtggtagctctcccccaactctgttactcttcttctattctctttctttgggcatttttacagtaagaacattaagtcaccaatttcacatatttacaggagagcgaatggcaaattgcatttgggagcattgatttgctttatgacatcaatcacattttgtgttctgtatttcactttgtccatctgtaaaatggtgactttaaaatagttacttacaaagactttctaaacaacaactgcctactgagcactgaacaaggcagatgtcaaggtgagcttggacaaggccagtccaaggcaaatcatcagagtaggctcagaaaggaatgtggtgaactcaggtcctaagctggcacactgttatgatagtgccacttgtaaaatctggccccagggtgtgtctaatgatagaatcattcccaagttggagaacaaatgagaaggctagttggagaagtaactgttaaatttggttctaacctacctcacagatatttcaatgaatgctatagcatgcaaagataccttgagcaaacctcaattacagatggtgttgatttatggtctgagcatttccactgagtccactcatgagatgagaaaatgacaagttatgtgtagatgcctgcgtcatcctacgttagcctcccctgactttgtgcagcctctgtggtatgcaggaactcaaaatattgggggagaaattagactaggttgggtactcctctaggctg

SEQ ID NO: 46520 - DNA, 1044 bp, Homo sapiens
tttttttctttgagacagagtcttgccctgtcacccaggctggaatgcattggtgtgatctcagctcagtcactgcaacctccgcctccccggttcaagcaattctcctgcctcaccctgcttagtagttgggattacaggcatgtgctaccacactgggctaatttttgtatatttattagagacagggttttgctatgttggccaggctggtctcaaactcctgacctcaggtgatccacctgcctctgcctcccaaagtgctgagattacaggtgtaagccactgcgcctggccccccttttttttttctttaaaaaaaaaaaaaagcttgggggattaagtaccctaagatagtggtctctcccatcagttcaataatgctgtacagaacctctggataaaaaagctgttatttacaccataattgtgatgatggatttgactcctcaaaaccatctctcccctttttgccctttccaaaaatcaaaggcttttgtctccatgagttttacctagtagggattgtagttgtcactggtctagagttccaatacattttatatcaggaacctcagtgagctacccagaattggaacttaacatggcccagcaactaggagaagaaggcaaaccttgagaaagctgagccctcaggatagcacagtctcacccttgtttaaaatcaagtcaggctagcctttcagtcactctggttttgtaatgatttgccttttaggcctcaggccatttgatttctgcaatagttttctgttcttctcctacaggaatacatccctgtcctttcggttgtaactattactaaaactagggctatgcaaatgacctggttaccatgtaatgaaccttgtgtacttattttgagagaacaatatgtataggatatgttgaggggcagaaagaaagacatcaaaaactggaactattttaggtggcaaattgtaacgcaaaaaacaaaagtataccttattttgtatacgatgtacacttgggacagagttttctaatatgttgccaatgttt

SEQ ID NO: 46521 - DNA, 1036 bp, Homo sapiens
agtacgtagcacatttgaaaccagactgcctgagtttgaatcttggctctgccacttattagctcagcaaattacttgaacttatatcttagtttccctttctgtaaactgaagaatgtaaaagcccctgccttacaggggtattgtgaggatggaatgagttaaaatggataagcacctatagctgcacctgttgtattataacatttcacaattatgagcattatatgattgtttgctgtcactatttttgttatttttattttctgtttattattttgatttaccattcatcaaatgatcatagaaatcagaagtgagtttatgcatttgaaaacagatcacttgctaactataagtgctggtttatagcaggttcagaagcacctgctttgggctactataagcaccggagagacatttagctgcatttcctttaaaataattctgtggcttcagttgttcttgtccccacttattcttagtgattttcactgttgatgctttcttctagtgtctcttaaactgtgcatcttcaaacctaagaagcctgaattatgttttctttatgatacctgctctgtattcctgttagaacttgtggtgttttttttttaaagttatttctcttactcttaagagggtgcttttattttaggcactttggctttgatatatgctgggtatgatatatgttgtatattcattctttggatatacatgggaaatttctcatttataaaacagatgtgtttgtgtctcacgtgaatcaaggcacgtgcacctttgaggaagggggaaaagaagctttttcaacttatgttttagcttgaacagactggatttttaaagggcatatcagcaaatttttttcttcctttcatttccatactactctgaagtttctttaacagaaaacattaaaatgtgcataattatggggcaaaatgtcaagcagtcagtttaatttgctgatgaatacatagaattaatgtttcgccacagtccccggattttgcattatgaattagtgggg

SEQ ID NO: 46522 - DNA, 1035 bp, Homo sapiens
gtggcatgatcttggctcgctgcaatctctgtctccccagttcaagcgattctcctgcctcagcctcccgagtagctgggattacaggcccccaccatcatgcctggctaatttttgtatttttagtagagacagggtttcaccatgttggccagtatggtatcggactcttgtcctcaagtgatccacctgcctcagcctcccaaagtgctgggattacaggcatgagccactgtgcctggccgccatatcatatttttatacccagaataccaaaaaaaagtgataggcaccaaggactgatttagtgttcctgctttggagaaaatgagttgacttagggtacccctacagcttcatagtaatgatttgtgtccttgttctaccctggggaattttactgagatgaattaggaattagtatggggatggggaggaaaggagccttaatcatagtggcattaacaggcaagaggaaattaaagtaggactgctagacacctctcaaccaaccaatcaaccatcctgccacttgccattcaaagttaactaaacgagctggacgtgatggctcacgactgtaatcccagcactttgggaggccaaggcgggcggatcacttgaggtcaggagttcgagaccagcctggccaacatggtaaaacccattctctaccaaaaaagacaaaaaagtagctgggtatggtggtgcatgcctgtagtcccaactactcaggaggctgaggtgggagaattgcttgaacccaggaagcggagctgcagtgagctgagatcatgccactgcactccagtctgggcgacagagtgagaacctgtctaaataaataaattaaattaaacaacaataaaattctagctcacttggttttgtctggttacaggttccttaacaggtgttaaatggcagaaaattcccaatagattgatcagcacttgactttttcgtagtatttcccaccagaataacgtctgtagaagctactctatccaggatagtcctgggggatctctggca

SEQ ID NO: 46523 - DNA, 1049 bp, Homo sapiens
taaggtaaaaaacttacagtaagctaagttattattgaaaaaagaaaaaaatttaaaataaatgtagtgtagcctgagtgtacagtgtttataaagtctataacagtgtacagtcatgccctaggcctttgcgtttactcagcactcactcacccagagcagtgcccagtcttgcaagctctattcattttaagtggcccacagaggtgtaccattttttatgttttatatcctatttttactgtacctattgtatgtttagatatgtgttgatacacaaatacttaccatggtgttacaactgcccatagtaatgtgatatacagatttgtagtctaggagatacaggctacaccatatattctaggtgtgtagaaggttataccatccaggtctgcgtgagtacactctatgatattcactcaacagcaaaatctcctaataccgcacttcttagaacgtaaccccattgttaagtgactcatgactgtattctaaagagtgctctggtccctggaaaacgatggatttgatactctagatctcatttcttgcagaccagaaagctggctttactggaactttttactgagtcctctctgcttcatgtaagactgagactttgtacagggtttacccaagtatctgccttggtaggaattggagaatgctcttagtgcttgaaccctagatgtgccaagattacttgaggaaaagaatgtaaaacacttagcatcaagaagtaccaataaatggtagctactagtttgctaaaattaattttcccttttcttcagcctttttttacccttagtcccaggagccatcaaatttcctattgctgaatgtgtggcacccaggcttgtgagagcagagggcttaggaacagcagcctgtgctatggaagctgggtctctggctggccccatgcctctgctgactccaagcccaaggattgaatttacttactttggtagctgcaacttggcaaatatagcagcttagcccgtttgtcagtgaggggagtgattgcagggtagaatggagac

SEQ ID NO: 46524 - DNA, 1024 bp, Homo sapiens
taagtttttatcattgtctgaccctattgtaaaatgagtttttaagagactgatttgtaagagatacagaatagttttaagtttcatttattctttgtaaatgcagttttgggaaataattcttttgagggaacatatatcatcccccttaatcctgtattactgatagcatttgtttgcttaaagagtttttttccagcacacagtatttatgctcatttttggataccaaatgaatgttacctaaattagtgaaactttaatgtttggctaaaatgagccagaaagctgtttctttaaactttagatcctatttaagaaatagaaatgtatccgatgtttacgattgccctttaattttacaagtgatgaagaggtaggtatttggctttttcaaaaatattgcagagccaatgccatcttactgttcaagtgtaaaaacccacatgtggcaggtgtattttataggcttataaatacctgaacttgctcacaggctgattactagactttatagatcgcttcaaaaagtgagagtttcctaatagtggataaatacttacccattaattttttttttaaatgtgaatttaatcaggaagacctagaatagattcttaccaagttcaatgtggtatgagagtaaatctcacagcataatttatgaattcatatataatatggcagaactgatagctataataaacagcaaagtgagagcatattcctaattcagagtatctcattttccattattaacaattaatggaactttccatttttaagtgtcactactgaaagtgttagcgtgctcaacagtaagcaggtgaattcagaatgttattttaaggcaatagggttcccactgacagcaaaagtcaaaggatggacaggaagcacacttcctattagtaaggggaaccatcatgatgaaacagatagaggctttgtcgattgttctctccaaccctttgtgcaaggctctgatgctaggtacctagagcaaatgtttcacagtgtttga

SEQ ID NO: 46525 - DNA, 1028 bp, Homo sapiens
ccaacgctttgggaggccggcacgggtggaccacttgaagtcaggagttcaaggccagtttggccaacacggtgaaaccccgtctctactaaaaatacaaaaattagctgggcatggcagtgcacaacagtaatcccagctacttgggaggctgaggcaggagaatcgcttgaacctgggaggcggaggttgcagtgagctgagattgcaccattgtactcccatctgggtgacagagcgagactccatctaaaaaataaaaataaaaaaaaattaatttacaaccttttctgcagcaggatttccaggaaatgaactgggaaatggtggcaatgaatgatgacaataaatgatggcaaatgcatgtaccatccaactatgattttgtttcttttcaaactattaatagcaccagctttcagatccatgtcgggccctccttctcaaggaacccttgctcagcttaaatctgcttgtattgtaaacttgaaataaatataaaaaacatgggaacaaaaaaatacatattttttgaatttattcattattcacacagttcactaaatcaaactagcataatctctgctggtccacaaacaggatcacatacatttacagtttttaaaagatgttggttctccttttattacatactatttgatctctttaaactccagtgttctcatctacaatatggcctaatatgatgataaagataacatgctagaagtgaattttctttcttgtaaatgaaaaacatagttttaaatttccaattgcaactgaagggcctgatttggcatttctcaatgtcttactcttagtttagaataggttgcaattattgttcttttttagccatgacaccaagttattcatctatagcagcttttctcttttttttttgagacagagtctcgctctgtcgaccaggctggagtccaacggcccgatctcggttcacttcaacctctgcctcctgggttcaagcaattctcctgcctcagccttccgagtagctgggatta

SEQ ID NO: 46526 - DNA, 1061 bp, Homo sapiens
cttggcattctctggaaaagaggctgtactggttaaagagagtctctgcttttgattttatacttaactaatgacaataggaaagaagattctccacatggtttaaaaaagggagattttgcccaggtctttggaacagttgaagtgtctgaaaaacagaaggagataccctgaactgccactatatactggggcccctagactggagatgagctgaagaagtagttactgaggcattttctgtggtttgatgttaatttctagcgaaggggacagggaagctaggggaaccagaaccctggcatgcattgtgttctcttggactgtctgacaccttttaaaaaaaatggagtctctttctgtcacccaggcttgggggtagtggtgcagtctttgctcactgcaacctccacctcccgggttcaagcgattctcctgcctcagccttccaagtagctgaaattacaggtacacgcgaccacccagctaatttttgtatttttattagagacagggttttaacatgttgtccaggctggtctcgaactcctgaccttcagtgatccacctgtctcagcctcccaaagtgctgggattataggcatgagccactgtgcgcggccacattttaagaaatgctcagttgtcccattgttagctctatcacataaatttatccttgtcttatttagttcttatgcaccaattacctggaacctagctcatggtttccagcatagcctccctactgttatgagaaataattcataaattgtgggaagaaatttttcttcagattgctcttgactttgggacattatatgtatatgctttctggtggtcatgttgtaaaattgtagatgattcactattaggggatcaggatccactctagccagaataaactcatcacactttgtcgctcctccttggcctctgccacccagtgctctgagactgttgatgtgatccaggaagctgaatgaacactggcccccaagttaggaagcctgcatcccagactcagcttgatctcttgtaagcccatggttttctctcca

SEQ ID NO: 46527 - DNA, 1025 bp, Homo sapiens
agcacctctgctttatagttttaagtttttacattcagccaaaacagaatatttcagactttatcacaaagagtgacttttgttttgttttgttttgttttgttttgttttgttttgtttgagacagagtctcgctctgtcacccacgctggaatgcagtggcatgatcttggctcactgtaacctccgcctcttgggtttaagagagtctcgtgcctcagcctcctgagtagctgggaccacaggcatgcgccaccatgcccggctaactttctgtatttttagcagagacagggttttgccatgttggttaggctggtctcgaactcctcacctcaggtgatctgtctgccttggtctcccaaagtgctgggattacaggcataagccaccgtgcctgacctcaaatagtgatttgatatattgtttgttatttggttgttgaaataaatattttgatttttttataagaatgaaaaatttgaaataacttaaatttctatcagtaggagattgattaaaagcattgtggtacatccatttggtagaatattaggcaggattttagaagaatgagggagatctaaatgaatgcctattcaggtatatatatatatatatatggttatatctattaagcaaaaaacaaaaatttgaacattctatgcagaattattccactcaaacaatatcagcagaagaagactgatcaacttgtaataattagtcagcataataaaaccatattgaaatagtttcttagtggaatatcaggggaacccgcccccaatatttcaatgtagattctttctatcttccaaaagtgttggccggctgagaaataaagagaaagagtacaaagagaggaattttacagctgggctgctgggggtgacatcacatattggtaggaccgtgatgcccacctgagcctcaaaccagcaagtttttcattaagggtttcaaaaggggagagggtgtaagaacagggagtaggtacaaagatcacatgcttcaaagggcaa

SEQ ID NO: 46528 - DNA, 1043 bp, Homo sapiens
ctttcatgttcacggaaacttctttataaagtttctaaatgaaacgaaaacttggctaccaacctactctagtaacgcaacaacttgcccctctgttcttttgagttctggcttctgattgtttctcaccacattgtcaactccttgggaaagtactctgtatgttttaaagcaaattgccagggtttttgtttgtttgtttgtttgtttacttagacctcgggagataaaattaatcgacctctttaaatacatggaggtaccccctttctcgtttttgaagggagacacttgggaatttagaaattgggagtgtgagttctaagggctggtgtggtttagatagcccatgacagtttcaggaaggtcctggtttcctttcaagcaaaaggggccacctctgaaccaaagtggattatctcctgcagcagcaaatccagttggcagttgaattcctgcagttttatgggaatttcagtgaaacttttaaagctgtaatttttgtaactggagttaaaaaaaaaaaaagaaaacaaatctgaataaagcgacataatccattgcagagtctgtacagttctatttcttctatcatgaatgttttccaggcagatgaaaaaatgttttgaatgttgaatatatgcaaacattacaatcaaggataattgtgtctatgtgctttgactctcattttgcttttctcttccttcatcttctcctataccctataggaatgtgatcatagacatagaaatagaatttgcatttgtataaataatgcccaagctgtttggaaaaaagactccctgtattaggcacaagatttagagatggcattttctgcctcaaatctcagtttgatttagatcatggaaataatgccttttatctgtatggacatcagagtttactcagcccctttccctctgcccccttcatttgatctgcactctctaacctcatgaagttgtctgaactagtgttattattctcattttgccaatgagtgaatgagactcagaagaaagcatctaggttagaga

SEQ ID NO: 46529 - DNA, 1050 bp, Homo sapiens
atagaagcagtaatggggaatctgtcatgatgacttactagaaaaatctattgagcctgcttatgattctttggttttggaggaggagggcactaattttcattggttcattcattcaaaaatattaagttcctactccatgtctaataactgcctttctggctagtctgtgagcatggcaacggacggatgatgtcttttgttttctgttgtgtctctgatgtctttcacattgaagagcagggaggaagtgctcgtatcatatttgtgccagagtgaggaggaagagggaagcactcagagctgacacttcctgtgatttagccttctgcctgtggatcatcttttcatcttttttgagctcatgttagtttctctactacctgtgcgtttctttaccttccttggagtatttcttccttgagctcagtgttgcaggcactgcttggtcaggcttagcccatagacagaaaatacttattgagtacttactgtatatatagcactcttccatgcactgtacatgtatgaactcacttgctctttccagcaacttaggagatgtgtgtcttcattatcaccccaattgaagaaactaaggatgagaaaggattcagacttaatgcaaatgatccactatctgggaagctatttaatcaacctgggctcaattatttctgttttctatttggccgtgggcttttgggttgtttgttttagtgggcacagaactcaaggtccttggctttttcatgccctttttcatcggtgtcgtaagtacttgctccgtaaggaaatgattttaattttacttttctctaaaagtaaaaaaatcctactctgtagtgtagtggtttcatcttttttttttttaatattgactgacatgtcaagagaacccacaggctttgcacatacacttttccagtcattgcttcagatatcacatccagtggaaattattagatgtgatatctgaaccagttgcaagcaagatctctcagcctccttcaattgctatgttccaggtaaatgttattgctgtgatta

SEQ ID NO: 46530 - DNA, 1028 bp, Homo sapiens
aaaactgagttagacacagtcaaatatgcctcattagcaaatgcagattaaaatgaagaccctctagaccccagtcatacttttgatattagattacagtttcctcatccataatacagtaatctaggccaggcgcggtagctcacacctgtaatcccagcactttggaatgccgaggcgggcagattacctgaggtcagaagttcgagaccagcctggccaacatggcaaaatcccgtctctactaaaaatataaaattagccgggcatggtggcacgcgcctataatcccagctcaggagactgaggcaggagaatcacttgaatccaggaggtgaaggttgcagtgagctgagattgcgccattgcactccagcctgggcaaaaggagcaaaactcgcatctcaaacaaaacaaaacaaaaacaaaacataatacagtaatcttgtacattgatatttttcaaatattctgtagatgtagaatttcatgggcaagtctaacatctgaaataaataaccacagaccaggcgtggtggctcacacctaatcctagcactttgggaggctgagacggacagatcatttgaggtcaggagtttgagaccagcctcaccaacatggtgaaaccccatctctactaaaaaatacaaaaattagctgggtatggtggtgggcgcctataatctcagctactccggaggctgaggatggagaattgcttgaacctgggaggcggaggttacagtgagccgagatcacaccactgccctccagcctgggcaacagaatgagactccatctcaaaaataaaataaaataaaaaccacagagcacttcaactggaagaggaaagtggagtcccctgatccttaaacttgcccccctttgcccaaatggcatcaagagctccgtggagtccagcttgaaaagaactagactaaaaaatcaccagggtctctaagtgctaaaatggaacctcagagaggggtcctgatgatttgattgaggaagggtgatgtacaggg

SEQ ID NO: 46531 - DNA, 1030 bp, Homo sapiens
ctgggtaattactgtcagaattgaattcaatcattagatatcaagtaggtttccaggaagttggagaacttgttgttggtgtgaggggaagaaacccataagtttggtgtcagagcattgccagtagagaaacaggtcccccccacatatgagttggatggtgttatgctcttggtagggcatttgttttgaataattcacagatgcagagtgtttgcagaaccgtaatggggttttgaattatatccttgtataggtgggattacaaataagactccaaatataggctggtttgaacctcagttgtattcattgtttgtatcatttagcaaggacatatataatctaaataacaacgaatagagtgggaggggagcttcagagttggctcagtccatggctcagtcatatccctagagttttagacactttacctttcttcactttgccatctcagcatgccagtttgggtcacaaatggacatcttatgggggcaagacagctgtagacatcacatcagagtatgacaacttctagtctcctccttgggtctcctcttaggagcaagagactttcctggaacccgttagtggacttcctctctgcttctctgtttaaatcattcactggcagaatagcagtaccctggatagctagggcagtcaggagccatcccctgaggggcagtcagagctgggcttccattagtcgcgggtcaagcaaacagcccctgggaagagaggagatacacaggagagattcttctagaaaggaagaacaagaccagaaatggattactgcagcctgtttccttagttgtaaggtggagataataatagcacttaataagattattgtgagaaccggatgagttaatacatataaagcatgcaagacagtgccaggcacataataatctttcggtaaataacagtttttttatttttatttttattttttctgttgttgttgaggtggagtcttgctctgtcccccaggctggagtgcagtggtgcgatcttggctcac

SEQ ID NO: 46532 - DNA, 1070 bp, Homo sapiens
tatcagatggttccagttaagaaggaaattatgactctgttgttacagcctgggaaaagtgaaacaacatgtttcaaacttgccacttcatggtcacgggattgaattgggcagaacattttccaggccccagctggtagtgcctccttcacggaggcgggtatcttgtgcccactctggtgtatttgcactcccagaacctccttctttctctctcctcttcccccatcaggaatatatgctcatggttaaggaaacctagcttggatttccttggaatatatgtccatttaatttataattttaaggctggatgcagtggctcatgcctgtaatctcagcagtttgggaagtcaaggcagccggatcacctgaggtcaggagtttgagaggagcctggctcatgtggtgaaaccttgtctctactaaaaatacaaaaaaaaattagccaggtatggtgatgcgtgcctgtagtcccagctatttgggaggctgaggcaggagaattgcttgaacaccagaggtggaggttccaatgagtcgagatcataccactccagcctgggcgacagagtgagactgtctcaaaaatttttttttttagagtttaagatgagaaagcaaagggaaccttttcctctatgttgaaatacttccttggaatcatttggtagattctcatagaatggtagtcagagtcttccaccagtagtcaggaaattcaagtttcacatcctttttataaacccctctgatcttctaggtgaggaaactgaggtccagtgagtggaagtgattacttctgggcagagccaggcccgtgccaagggcctcctgtttcagcgtctgggatccccgacttgtttttttttttttgctgttaaaaaaaaatccgtagttatcactttcactccttttcctgtgtgtgttgttgtcattcattaataatgcttaaaatagatggcagaggctcagattatctgtaaacagcaaatactctaaaatcattttgatttttaaatctgctgctgcttttctcattatgttaatgttccatctttttgagtatt

SEQ ID NO: 46533 - DNA, 1049 bp, Homo sapiens
agataatgcgaagtgcttatccagcatctgcctcaagcaggtgatcatgatgacagtggtaaggactgtgccgagaactgcctcagttacattgtcctcttccttagtggtatgcttcccatggttataatttgaagacgcttctggccttcaaatatagtgctagctagcaagggcacagaagaatgaaacagagttgtttgtgggaaacatgaagcagaagcgagtgatggacagaggtgaggccaggggaacaggctagagcttgatcagggccggccttgtgtgctaggctagagcttgatcagggccggccttgggtgctaggcaggagagttctgtctcctgcgggaaaagctgcctgtcccttggccagctttccctaaggcatgcagctttcacaggcactagccattcttaagccattttctctttccttcactttgtgcacaacctgttggaatttctcaggtccaatgtgatgctaattggaggaagtgtggagttggacctcctaggagttcaaacaagggccccttagtgattgcagttagaacctggactgtttggtcaagggaagtaactaggatcagtgcagaaaaacccaacctattgcttgttctcagtagcctcagaaaggagattttgcatgtggagtaaaatgggaatgtttagtaggggagccagagatggtaagtgcaagaattgtgagagaaatggcatatttaggaaagaaaaaaaggccttgaatctgttttcaatggaataatttaactttagtaaattacatacttttgcttaggctagttgaaaagaatgctctagttctatgtgcaggtagtaaaattagtgcctttcggtacatagtaaatgctcaataaatatttaatagacttgattattgtgtttctctgatattaaatttttagactctagttcactattatcattgctttaatttggaaagcaattaagcaaccaaattatagtagaatgatttaaatagaaagattatttttagtttagatgtgattcagataaatattttg

SEQ ID NO: 46534 - DNA, 1026 bp, Homo sapiens
tatttggctaacaaaacaggtgatttctgtgagtatatatatgtatatgtgcgtgtgtatatatgtgtgtgtgtgtgtgtgtatatgcatgtatgtgtttatttatttattttaccatggacatgcccttgatgaaaaagaaatactttgcttggttattcctccaagtggaaatttggacattaccctttgttcatggtggggaagatttttagttattccacatatcagaattatctacgtgaatagttagcacataattaggattaaaaagtaactagttgcagaaaactcattattttttctaattctaagaaagtagcttcattttgggtattagagaaaagctcaagagattcactgattaatatgtattgagcctgttacatagctgacaatgtgctagtgttttcacagtttctatctaacttacaaaataactgaaagaggaagaaaaatattctattccatatgtattagaaaactatcctttaagttctaaagttggcttatgatctcctgaattgcacaatatttatctgcaaaccttgaaactatttaatcagagacttctgaccccaaaatgccaacattactcttggtggtctttcaaggtaattcccccttgtttttagtgtatccattgaaacactaaatggaaatatttagtgccctgatgctaagggaatattccaactagcggcactgattccactccaggttattaattaaacagtagcaatcagcccatctgatctttaatattctattgctgctgactgatgcccagacatcagacattttgtaatctaatacaaaattgctctgtgcttaggactaaagaaaaacaacacataatttatactatgttttatctttattttcaagttccagaggatacgctggttgtgtctttcaatgattaacttaaaaaaacaaacaaaaaaacaagacactacgtatctcaagcccaacatgaagggtattgagagtaaattatagttaaatcatttatttctgactttt

SEQ ID NO: 46535 - DNA, 1104 bp, Homo sapiens
agtgctgaacttttaagcatggaagtctgaagatacctcctcttgtgaagggaaatttaaaaaatatttaatgactgctttttaagtttttggtctgaggaaagagcagcattaccttggtcattgactaaaataaagacataataaaggtactggaaactgaacagaagtatggagtttgtgagtgaagagttggtcacacagacagctctccttcctcagacattcaggtgcattctgggtaagttgactgatttcaaaatgctcaccttcaagtgccaggcacaaaattataatgagcttcctttctcataattcttcttttcatgattttctcagctggattcttcaaaggattatttgtaaagacctttatggtgtgttatgatttaatcagatgtagcccgaatttcccaagatgtgttaattatcattgccacacaagtgcaacagaggaagcaaaatgtttttcatttgggcaggttgagggtttgtttaaaacgtacttagggccattaggatcacatcaaaatatagtgcatggtaattatgcatgaaatagaaggttacctgctgtttaagtagctagtttcttgataatgttgcaataaagtattgagagaaaattggtttctcaatagcagtggaacaccttgtttaagggacaaagtgaactgcattaggctgaaaaacgaaaagggggaaaataaaaatagattttatcatcaaagttgtcagtggatattgttctcagtcttaaagaattatttttagtctttcccttcatcaaaatggagaattatttgtttgcatgtagattgtggtagagttggtatgtttcagatttaatgaaatgcagaacagaataaatccctcgggaaagaaaggaaagaggggatacgccagacttagtatatgagagtagtcaaaagcctggctttaaaagtcaaagaaaccccaaagttgacacctggtccctatgctaactagctgtgtgacctcctccatgttacttaacctttccgacctcccagtttctttagtagcaaaatggagatgttattattaatataacagaccttgttgaaaagatgaaatgagaca

SEQ ID NO: 46536 - DNA, 1036 bp, Homo sapiens
taagaaagcagacaacggcttcctccgccaccactgccctgccgtgctcacgctgcatgggggtgccctcgcagcgggagtgtgtgtttgtcctggtggccggggactgcggcttggcctttttgtttacaagagagaggacagcagcctctgccctccagctgctgtgaaaacagtgttggaaaaccagagcgaagtttccactgaagaactcacactggaaaaaaaaaaaaaaaaaaaaaaaaaaaaaaaaaccaccaacacccgaacaaacaaaccttccctcataaaagaccatctgggttaaagtacagaccactgggtcagaacccagatggtaatgagaatagttgttcttctgcaaactttccgagtgggatttccatatattaagttggaagagagcccaacgttgaaaaacaggaaactaactgaagggctgttagtgtagtttgtaaggaagattttagcagtgggattaattgtgtatgttggataaaggatccccatcactggaggtctccttccaagtgaaatgggtgctcctgctgatttgaattgggaggtgacagtggcgatggcagatgggtatggattagagcaatattttggaggaagtctcagctggggttggggatagattgcatcctgaggggtgcaaaaggggaaaagagagggggaaggacgaggatgactctcaggtcatttctttcctctcttatcctttgttcttttctcatattatcactcaggcaaaatgggaatgggcatgtgagatgctttgattagtcagtgccagcatccagcaatgtggaattctctgtggggcatcttgaagcctctgggtgttgatgtggagtgctgaccctctctgaattagtaacacacttctagctatcttagacaggaaaccacagtcattacaccatggagatctcttcattatagctttgctaccttgtccatggtcacattaatgactcctgtcccagttcatcattgataacacctacagtaacccatggtgctctgggag

SEQ ID NO: 46537 - DNA, 1050 bp, Homo sapiens
ccatcaaaacaggaccagcccgagcaggtttgaagataaaaatcaatcattccgttcatagtactttcttatttcatgttcctttgcttccaactcccataaggaatttgctaaagatacaacctcagagatagcttaaggtggagagaaattttcgaccataagttccttggagaatacgaattcaagtagggtgagtgggaagaggtttctaccaacattttctccttgcatctcaggtcctgaatcttccaaaaagtgctgcttgtgccctacactggctcaaatttgcatttctgaaactagtttggtttgcattaatttcactggagttgtgatcacattgaaaatgcaaagcctaattgttaattaagaaaagtcattttgagatgtgatggtgttttatactcaacatgagcaggttctatttggttgtggcaaccttaagatttatgactgactgtcctatcaacacttggcaaatgtttccatgctatggggatgcattttacaggctgttaaataagaacccacgaagtggtccggtatgtttttaaaaaatgagcctagcaccaatgtatagctttctctagaatttaaatctcattgttaatttgaagttcctctctttattgaaagctgggtattgaatacacctactgggagatgtggccacatagagatagtctggattaatgggctttggtcttattttttagacctaaatttattcttcattaaaagaagagtaaaattccaggtgcggtggctcacgcctgtaatcccagcactttgggagcctgaggcgggtggatcactcaagattaggagtttgagaacaactcctcagttggtcaacatgtcaaaacccctctctgctaaaagtacaaaaacttagccaggcgtggtggtgcatgcctgtaatcccagctactcgggaggctgaggcaggagaatcgcttgaacccaggaggcagaggttgcagtgagctgaaatcacaccactgcactccagcctgggcgacagagcgagacttcgtctcaaaaaaa

SEQ ID NO: 46538 - DNA, 1045 bp, Homo sapiens
aatgagagccatctccactgcctccctttgagtggttatctggcttgtgttgcttgtcttgtcgggagaccaagggccttgcaaagtaggtgcctgtgaagagtgtcagctgaggccctgcagggagctggaagcttggaaggcctgggagaaaatgcctggctaatgtatgaggcctggaagactcttctttgttaagaagattcatgggtctctgaggagtggagtaatcaggactaggagaagatgttgggccaagccttcgtatcctatatccatctgcttgaacatttttttttttttttttttttttttagctagttgaaaggaggaggtcccgttgaggcttatttgaacaaatatttgctctccctaattatatacccagagctgctctcctgaatgtttaatgcaaaccttaatatttacaatagcataaggaagagtttataatgtgtttgggaggcttccgaagttggggcagtaattcttctttgcacttatgtaatacttttcttcctaagagacctgagccatgtttaccttagccactgttcacattgagatgaagtgaagtgagggagggagatgaaaactccagagaaaggaggagcccctgtgggcagctgccaacatgttttataggtgagacacttgtctttgccaaaagttgtgtgccagccacaaacttttctttctggtcaggaataacatgtaagcctgtgcttacaattgccttctgatatggacgtggagagtgtcacagaggtgccatgctgggtttttgaccctgatggtagtagacttcttgctcagtgccctgctgtatgacaagcctgacccattcccttattagactcaagatttagtgagtcttaaaaagatatttggaggctaggtgtggtggctcatgccagtaatcccagcactttgggaggccgaggagggtggatcacttgaggtcaggagttcaagaccagcctggccaacatggtgaaacgctgtgtccactaaaaatacaaaaattagttgggtgtggtggtat

SEQ ID NO: 46539 - DNA, 1533 bp, Homo sapiens
tcaaactgtttcttaaagggctctagttattgaataagttttgattcacaatttcatgaaaaaatttgtaaacatattagaatgtggtaatatggtttttctgtttattgtgctaaaagcaaaagtgtagaaaagtacaaaaaccatgaaaatataccttgtttgaagtaaataaatatgaacatgaaatatattatttaaccatgctggaggtcaattttaaatgaattctgcttttctctgggcttaaaaagaaaacttagtaactagtgggttgctatgttttatgttaagcaacatttaaattgaaatcaaagtagagtaagtacatattttaactaaaacaggtatgtctagttatggggcaagtaaaattgtatagcaatgaaattaaataaaaaacctatgaatattttttgagtttgaaatacaattggcagaatctgagcttgctatacatctagttggcttttaagggaaactgattttttaaatttcccttctttgattttggatcttgacttaaagaatccagattcccataaacattatacagaaagttctaatggtgccaggaattagaaaaatctaatttctttttttttaatttttttttatttcaataggtttttggggaacaggtggtgtttggttacatgagtaagttctttggtggtgatttctgagatttcagtgcacccgtcatccgagcagtgtaactatacccaatgtgtagtcttttattcctcatccctctcccactctttcctctgagtccccaaagtccattttctcattcttatgccgttgcaacctcatagcttagcttccacttatgagtgagaacatatgatgtttggttttccattcctgagtttcttcacttagaataatgtcctccaatttcatccaggttccttgaatgccattatttcatttcttgttatggctgactagtattccatggtgtgtatatgtgtgtgtatatatatatatacacatataaaacattttatccactcgttgactgatgggcgtttgtgctggttccatatttttgcaattgggaattgtgcatctataaatgtgtgtgcaaatatctttttcatacgacttcttttcctctgggtagatactaggagtgggattgctggatcaaatagtagtcctacttttagaaatctccaggccgggtgcagtggctcacgcctgtaatcccagcactttgggaggctgaggcgggtggatcacgagttcaggaaatcgagaccatcctggctcacacggtgaaaccccgtctctactaaaaatacaaaaaaattaggggggcgtggtggtgggtgcctgtagtcccatctactcaggaggctcaggcaggagaatggggtgaatctgggaggtggagcttgcagtgagctgagatcgcaccactgcgctccaacctgggtgacagagcaagactctgtctcaaaaaaaaaaaaaaaaaaaaagaaaaatattcacactgttttccatagtgattgtaatagttta

SEQ ID NO: 46540 - DNA, 1053 bp, Homo sapiens
aaaccccagctgtcaaaagttaggtagagagctttggacctcaagtcctgactgccactctccagctctgtgatctcatgcaaatcactttgtctcaggactttgtctccctcacccccatgtaaaagtgggatgataacatcattttccaggatcagggtggagaataaatagaccatgtttactaaatgtcctacggagtgtggtggccaagtaggtgcttagaaagtggctgcagctctcagtattattgtgaatgaaaaattctggcctcatatccggtaaatcaaaatacttcaccctaactcctaaggcaatattgttgcctagaatcatcagcatatttggagaccaataacgcagtttgcatattacatggagaatgtgggtggactaattgcatccaggcatggggtgactggcttgagattaaatcaaaaggaatttcctgagtttgtgatgtaagggaagctcaagagactggaatactcaggaagtgaaatcccagatacaaggactgaaaataatcattcaagtggtggaaaaggtgatagaaagattgatcaatggcaccgagtttagtgggacatctgcgctgtgctccctctttggtttcctccctttcgtggctgagaggtttggtgtatcagtgcttcttcctcctcagccagaaagtttcagtttttctatattctgcccaccctcttttcttgcctgtatttgtccattcattcaataaagactcatttagctccaaaatattcattgaggagctaaatgtgccaggtcctggagatgcaacagtaaaacacacatatgcatatacccacatgcacgtgcatacacaatttgcacacatacgtgcacatgcacacctccatgcatatgaacatggatgcacacatggccacgtgaatccctctcttcttggaattgacattctagttgaggaggacagaaaatttaaacaatagtagtaaggaaaatatgtagtttgtttcacttgacgattattgtaggtttccccacaattttttttttcctgcctctgct

SEQ ID NO: 46541 - DNA, 1929 bp, Homo sapiens
tggcaccaggaaccggtttcgtggaagacaattttttcacggaccaggagggtggtgtggggatggtttcaggatgaaactgttccacctgagatcatcaggcagtagttagactctcataaggagcgtgcaacccagatccctcacgtgcacagttcacaatagggttcactctcctatgagattctaatgccaccagtgatctgacaggaggcagagctcaggtggtaatcctcgcttgcctgtcactcgcttcctgctttgcagcccggttcctaacaggccacggactagggtcggtctgctgcccaagggttggggccccctgctgcagacccagtgttggtatatgcaaatattgcttgcccttttggagtctggaaatgttggccactgtctggtcattcacttgctttgactcaccctttctccacgtccttttctcaactttccctctgtggattagagccacaaatctatgccctcattttccagtcctgaaaatggagacatgtgacctggcatagtttttgttgtttcttccaggactgaagtaatctgggaaatgtagtttggctgccaagaatttggcctttcctagacacattgctggttgattagaacaacagaggagaatgttagtctgggaggcgtgctcacattcccagtgtagctcaggggaccctttcaccagataggactcacagacttctcaagtccctattgcgatgtggcttctgggacaccttcaacctctgtccctggtaagccaatggctgcttcatttcccatgttggtttcccccaattttctgggacctccacattaatacctactttcccgtttccttttaaatctcctggcagttctactgcttggaatgcattctacagatatacttgcgtagataagagatgacccatttcataatagcaatcacatctaacacttgctgaggatttacctggtttctggaactaagaattttacatatttttcatgtatttcattctttaaaaaactctgtgaggtgggactgatagtatcttcattttcagataaggcaatttaagcaggaagaaagtaaaatgtaaccaaaggtgtatttttttttaattgcagctgtggttttaataagaaaagattagaaacaatgtaatcaatgtgtgtctaattaaatacataatgctttattgccaataccataggatactgtgcagccacagaaaaatggtattgaatatcttcatataatagcgtggaaatccctccataatacatgaagtgaaaacaagtaagtctgtatataaaatgcaggctgggcatggtagctcaggcctgtaatcccagcacttttggaggctgaggcgggtggatcacctagttcgagaccagcctggccaacctgctgaaaccctgtctttactaaaaatacaaaaagttagccaggcatggtggtgggcgtctataatcccagctacttggaaggctgaggcaggagaatcgcttgaaccagggaggtggaggttgcagggagctaagatcacctcactgcactccagcctgggcaacaagagcaaaactctgtctcaaataaaaaaacaaaaaaaagtataatatgcataaattagctcaaccattgtggaagacagtgtggccatcatcttcagcaaactaacacagtaagagcaaaccaaacactgcatgttctcactcacaagtgggagctgagcaatgagaacacatggacacagggaggggaacgtcacacatccctgggcctgtcgggggttgggaggtgaagggagggagagcatcagatttttattattagttaatttgttttggtcgtcatgactagacagtaattcacatggtttaaaacaagtatcaaaatatagtgaaaacagtctcccttccacctgcgtg

SEQ ID NO: 46542 - DNA, 1035 bp, Homo sapiens
taggccttagccccgtggaagaaactctgtcctgtgtggtcttctgtgtgcagtggaaactttcagcaaggcttctaaattcttgatgatcacaggatcgctttgcaccgaaaactggcatctggcctgcgcttcattgagggttccctacttttggcgagagcttttgaaggcctgggtctgtgagttttcctttattagtaaatgataacaaagcactttaaagaaaggagacacgtccgtggtggtagttcttgctgtgtgaagaaagggagcactggatctgagaacaaacctctcccaagttggtccctggggctcctcctgctgctgctgctgggagccccttccttgcaccagtggtcggctgcttcccatgttctctcgcgctctctgtaggactctgcctgcgatgactgtcctcccttcctgagccatttataaaaacagactgtttccatttctaagtgactaaagggattccttgaagtagtgagatcaaagatgcgtttggaatttgtctctgagtgaatactaacggcttgtcatggagacatgtcacaggggagcccgatcttgggaaaaccaaatgaaagccttaggagccagagagcgatcagggtggggagtgacagatgcagggaattttggatcagacaaaccagaaatgatcactttccacatatgcgactttgggtgagttgtgtttgtatctgtgaacctcagttttcctaatctgaaatagcattagtcatgccgacctcagagagtcctagaaattaagtgactattatgtataaaatgccaggcatggtgactcagatccagtatttactcgatactttttcccctcttcataccctaatatggtaatggaaaatggattttgatggattttgtaggcacattttaaaattaaaagctattgcagaattccagctagtcattcactggtgttcataaggttagtgggtgcctactacgttccaggctcactttaagtggctggggaatggagtattatgagacagacac

SEQ ID NO: 46543 - DNA, 1031 bp, Homo sapiens
cctgcattaatttttttcttgctttcccagttatatatgcatatatataaacttcacagataccaaataggttattgctcataggtaatataatttgtacctgatgtaaaggctgcaactgaggtttcactgatggttggtttacctggaattttgtgagttggaaggcttactgaaatgaaggaaaatgcttatgtatgacccagctctctctctacgcattgaccaaaataggttgatcagggcaacagaaatgattaataggatagtgcagatttggataaagagcaaaaagattaggatttgaaagttggaggatgaagggagtcatgtaggatatagtcaggtggaattcggacttgctcacaaaatcccagaatactgtaacaaaagggcacttctttatgctagaaggagataatttcactttaaataaagggaaatggaatgtctttgcccagaggataacaagcaaatagaactcattttcccgaagaacctgtgtagtctggggtgtcagggatgtgtgttcaagaaaaatttaggcaaaacccaatgatagcttctcaagggtaagtttcaaacattcagacaatatccctaacccttgagtgaaccatcacacagggaaacgattctgttgtacagaatatgttttgatgccactgtcagacataaagtctggtgggaactggacttctactctgacccagggtgacaatttttatgtttttaaaatcggccgtcttccagaagtgttcattttacagtgcttatatctcagtacctgaacttctgcagaagagttttatttgagtcataaatttctaatgtcaaaacctccctgacaattattagccaaatgtttagcccaaaagagagattaaaaacatatatcttgtaacctagctacccaatgagttaacccagagagaattttcatgttggaagtagtttcataagactttggggagagatacctgcagatctgacatattagtggtcagaacaaaaacctttgtaatacatga

SEQ ID NO: 46544 - DNA, 1018 bp, Homo sapiens
atttatttgtcacttcagtgtttcttttcccattgctcttctctcagcctcttgtgtcagccctgcccaggctggcttttatatccttagcctttttttttttttctaagtatgggaaaacatagtttagaagtaatcccttctcacaaaatcacctctctcaaccactctgtggttattttatttgagggtggtggaaagagggagatgtttgtagagcctcagagagaaaagcacggttttaaatctaatcattatcagagtgagagctaaatacttttgcaaccttcatgagagatatccctgggaattttctggataaatatcattctcaagttttggcagtgtgcagaatttaggccacccacattgtatggggcataaaactgtttagtgaagttcaaataatgtgttgcaagagtttggttgaacttgtaatttaaccttgaggaaagcaaatacttgtgggaaaatatttgtgctcaaaatcaataaggaatgtgcaagtaggatgccctcactctgagagctgtagtttgcagctgaagctagtacaaagtggcatttgtcagtagtaagtaaaacgagcaaagtggatgggtggcaagactttgacattattggcctatcacattcagatcaagttcatctgcagatgaatagtcactaagatttgttaagtgtttactttgtgccacatagtacaacacagaactttagcactataagaccctgacctgtgagatggggaaattgactcttggagaagttagttactttgtggtggtctcatagctcaaagggggctataatttagtctcagatctacctgacctcacatttcagataacttattatctgtgcatgccatggcccttaaaagaggattacttgtaactttttatttattaatttatttaataaagagatgaggtctcactgtcacccaggctggagtgcggtagcatggtgcctcattgcagccttgaactcctgggctcaagtgattctcccacct

SEQ ID NO: 46545 - DNA, 1068 bp, Homo sapiens
accaaaaaattagccaggtgtggtggtgcacacctgtagttccagctaattgagaggctgggttgggtggattgcttgagcccaggaggtcaaggctacagtgaactatgatcatgccactgcactccagcttgggcaacagagtaagaccctgtctcgaatgaatgaatgcatgaatgaataagaaactgaatctttaggaatagttacttagagtcctagaagtctgacttaagtctgacttaaatcttaagtaagttaagagtctggcttaaatctgaacacagtatgtacattttagtaatgttctggacacagagacctgagccttggtacagattgtgtggtattattaccaacaccgttttaacatttatgttacaaaagacttctgcatgttggacaacaggaaagaaatacagtacttaactcacaaacaacaaaaggattaggacagtccttctgaaagcaggggtctcaacatcaaatgtgacaacagccatacaggctttacaaatatgtagactggcctagtataagagaacagggagtgggcacatatttagcgcattgcaatgggcataaatacctgaagttacttgacccgtggaagagcccttgacagccagataggcagcaacccctttcctagtctttgttgtcatacactgtaaactgaaattgtgctgcatttttttaagtggtacatttcataagaggttgaagtgaaaagaatgtacctagaattttcacctgggagaaaattttattcctgattcttggttatctataaaattatatacctggggataaaaatttcagtttagcttaaaacttaaattgttggccaggcgcagtggctcacgtctgtaatcccagcattttgggaggctgaggcgggcagatcacctgaggtcgggagttcgagaccagcctgaccaacgtggagaaacctcgtccctactaaaaatacaaaattagctgggcgtggtggcacatgtctgtaatcccagctactcaggaggctgaggcagatgaattgcctgaacctgggaggcggaggatgca

SEQ ID NO: 46546 - DNA, 1092 bp, Homo sapiens
tcacctgtggtcaggagttcgagactaccctggccaagatggtaataatacaaaaaaattagctgggcatggtggcgcatgcctgtaatctcagctacttgggaggctgaggcaggatagtcacttgaactcgggaggcggaggttgcagtgagccgagatcatgccattgcactgcagtctgggcgacaagagtgaaactccatctcaaaaaaaaaaaaaaaaaaaaacaaaaaacactcttgttgatacaaagaaagatctagaattaaaaactttacaggaggaaagtgaaaaggctggaactaactcacccaaaatatttagcaagttaatcataaataagataatagattttgagtctttcggttttcagtggagaactttatatttgattttgcctaatgtgtgaaactgtataaagcatactctatagtatatgttcctgctgcctggaagcagacacatcatcaaagtgtgtgtgtgtgcaagagaaaacacattaatttctctttctcagtttgtcataagaggggagtgctataaagaatcttctggctgggtgtggtggctcaaacctgtaatcccagaactttgggagaccaaggctgcagtgagctgtgattgcaccactgcactccagcctgaatgacagagcaggaccgtgtctcaaaaaaaaaaaaaaaaggaatctttttacctgcaaattgtaaggtactcgagggcagacattggcattttcagatacatgtgaccctgtgtgtttgtgtgaatttctgtgcacacgtacatccccctcccacgccttgacataatgcatacagataaatgttgaggttcagtggcagctgttttgtttcccacagacattttacttagattattctggaaaacattctgaagagaatcacaagcattgatcataaagttagaagatgtgatgtttaagacaacatggacataggaattgaaattttctttcccattgtctctcgagtgtttttgaggccagtgtttcttactcttgcttgagtatacctggataacaaaatccagtttctaagatttctgccctagagattctgatggattt

SEQ ID NO: 46547 - DNA, 1339 bp, Homo sapiens
ccacgtggccaatattgttattattctgtagatggtatttcttggaaattttgtttcattccctttctggaagtgagttggacttttacctgttttttggcatagatttggtctctcctcctcccagtagtggaggtgtaaggagtaaaaacttttcctagaaataaaacataacaagcacttactgagtgcctggtgtgtgttcacattgtgtgaggtgttatgactgcagaatgagttttccataatcactgtgtctgcattggagttggaggagaatatcttacacagagctcccaaatcccttgcaatttcctgggtgatcaactatcttttgttctaatgaggttacccttagtggacatgatgctaaggcagcatataaataagtgagggctcatgtgatgtgggctgtgtaaatgtgccaagatacttcagtgtgagaaaaaaagtcacatgtgatggcattagtctgtggaagcttcgtggagaaaactctggatagggactttggaagtgtagtttttcttggctgagtaggtctctttcctaggaaataattctgtcccattccctgcaggtatcaagtttggattttgatgaataaagtgtctcttcgttttaaaaatagggcactgaatcgccaaggcagtggcatacagggtagaacttcgtggccatggcccacgtggactgtaatggcttcaggcatttggttttgcttcacacttcaaagaactgaaaagtgaaggggatttatttattcatgaaaacctgccccacacaactgctctgtgtgcctggaattcttgttgtgggtgggcaggctgatctggtgagaacagtagtggaaagaggagaggaacatttcctccctaggatggaagtcccatagagcacgcatttgagactgctgagttcattgccatatgctagcacattaaacagagtgcgccatagagttggggctcaaaagtttctttgtaagggagtgagataataattgagctatgccttctgctcttaatttggtgttaggcatacaagcagggtaatctaatgacagaatgaacataaaacaagtgagactgattcaacagatgaggctgtgttgaatgtataggtgggcagaggtgagaaggagcaactgtccatcttggagttcaggaaggttttggacatggtgttgtacgaacttggtctttaagtatgaatggagatataagttgaatggaaatataccaggtatttcaggacaaagagaacacaggagaacatgcctaattgtaggaatggcagggcaaaggagtactggaattaaaaaacaaggtgggggcca

SEQ ID NO: 46548 - DNA, 1463 bp, Homo sapiens
tttggagtaaaatgaattaccctccttaggaaatctggtcgctctatgtggccattcctttagttcctgcccctcctccacagaaacacaccattccaaatctggcagctaatttttcatggtctttgtttcttcaaaattattttcaggaagtcttggtgaatatatgttggggtataaacagaccacaaagaaagaccccataggggtattctgttgatggattttctgcacgatcttttctttttcattcttccattatacttcctggaggagggactacccctttgttcgtcatttagttccagctgggtaccaggttgggtatttggggaggtttacagattaataaaactagaccactaccctccaggagttttcaattttagaagggaagtatataaatgtaattctaggtttaattttctaaaagtcacttcagaggaatacaaagtattagggaattcagaggcagcagaggcagagtgaggtggtgtgaagtgtgagctctgcagtcactgccttggtttgagttcctgccccaccgcttcctacccacagaactctggccagtgcttgagccctcctggtctccaggactttgttggcacagtggacatgccaaattttttgatgagagacatgacgagttagtgctggtggagtgcacaccaccgggcccagtgtgagggtcagtcctggtgagctgctgtgctctgtgcgttgcctgaagctttccagcaggccttagctgatgctcatggatccaaaacatcaatagtaagttactaagccttatctgctgctccttaaattgacagagtcaagaattaggtaaccagggaggagccacagaggtgtgtgaatgggaaactagacccagtcctggaagatgagcaggaaatggagtgggagacattgataccccaagaccctagttaggcaaaaagaaaaaaaaaaaaagacatctaggctgggcacggtggctcatgcctgcaatcccagcactttaagaggctgaggctggcggatcacttgaggccaggagtttgagaccagcctggccaacatggtgaaaccctgtctctactaaaaatacaaaaattagctgtgtgtggtgatatgtgcctctaatttcagctactcaggaggctgaggcatgagaatcgcttcaacctgggagttgaaggttgcagtgagctgagatcatgccactgcactccagcctgggtgatggagtgagactctgtctcaaaaaagaaaagaaaaaaaaaagacatccagtccatccagagagcccgggacccttatctagtaagaaggcagctgcaatagaaagaggaaggcatttggtgtgaggactcagatacgtattatgtatatgtggtggcaggtgggaggagggtggtgatggaagcttctagtcttggtggtaacattcacgatggatgacatagaagagg

SEQ ID NO: 46549 - DNA, 1047 bp, Homo sapiens
cttcagattataatgtaaaagtgaagtctttttgaacagagcagaagaaaaggatatcaagggcatgaagtggatgttactgaagggagtcgtggtgtgctgtaaaggaactcctgagagggacattggccgaagggtcatctccctcttcttggcactgaacgaccaccacagaccacaaaagggcttagaaccgacctccatttcaatgggacttttcagtgacacttgagacctcgtgtcatagccagtttgtgaccattctccaacccaagcattctgctgcttttacaacagattattttagaagctgcttaggagatgctactagggatgtgtcaggcttcaacaaattaggatttcctccccaccactctgatgatggtgagaccagcatggagactggcagagtgatgaatgcattggcttatcaaggtcatgagtggcagccggctgcattgtgtccccaattcaaacaaggatcccccaacactgcaacagtctaggattgtctcctaaattcttcacattccaagcacacaaaggaggtgtcctggagccatgtaccttggggaaggcagattatttgtaagctcttgtgttgccttcactgcagacagatgggcctcctctatcctaaacagaggctatttaataacgtttgcttcttgttaactttccttactcacctgatctaatgaacctatgctgctttggaacatcactggaaatgtttcagaacaaagcaagaatcatttggactagtacttcttttggagaggtggctattaaatggggtttaaagtttttcatttgtttgtttttttacctcttagatttggagcttcttctatggccttgcacatatcattctgtgactatgatgcccacattagcccagttgtcttacaagtatgtaaaatccttccagcagttcaggttcatttggcattcttgttaaatgtactgctgttaggactggaatgagaaaaatgatagaaatacaagtaaccataaaacaaaactagaatagaataacagacactg

SEQ ID NO: 46550 - DNA, 1029 bp, Homo sapiens
tctcagagcggcctcggaaccccagagaggttattattgtttgatcagtcagtcaacaggtatttattgaaattcttccaggtactttgagagaatgagagatgtatgtgagcttaactgtgcctggtagtgggacccatttggaaagagctgggctctggagttagtctgatgtgggtttcaatcctggttttcccactccttgggttaaagcttttgaactcctttaccttctcttagcttctctttagtcctagggaaaaatggagatggcagtatctttattttagggtcgtttgaaggattagcaataatatgtatcaaatgcttggccaaagtgtggggcacatggtaggaatgcagtggcagcgattattatcatcactttaattgcaaaactggaagttcagattccaggaggaggatgtagttgctgtggactggccttctcaggcaaaacttcacttggaataggcttggaagactgtataggagttacatgaagtggaatggtttgactcaaagtgcagaaatgggactacataaatctgttaggtttcttgaggaagtaggggagatcaggtaggggaagggcaagaaatcctacttactaggaaagatggcttcctagctagtttggggcacaaatactcaacagaccattgctatggtgaaaatggtagaaatgagaagagcaatggagggaggaagacctgtgtcatgaaaatacttatctgactgttcagcattattgatattgtggtctggatgactctgtgtcatggagacttgccctgtacattataggatgtttaacagcatccctggcctccacccactggatgccagtaggtagcattcttcacccccatacacatgacagtcaaaaatatctcctgactgccagatgtgccttggtggggtcactgaagaccactgctttagtaattagactaagcatcagtgaagatgagattttcatttcagtgttggaagggagaaaggagtggagttcatttaaaataatag

SEQ ID NO: 46551 - DNA, 1034 bp, Homo sapiens
accaaatcctctcactttgtggagtcttggaatagtgtccacgtaaggctggcctggttagtttctcctctgcttcctgagtccttgagtggtctttgtatatagcgtgaagtgcacagcattgggaagtctgtgtctgcaagcccatcaccttcactaggatacaacattttcatctttggacctctaggctaaccggagattgaaacttacttggcctctacctaaacatttcttgagcaactcagtgagctgtccatgtagtttagcagacgttccgatgattgtttcatggagtttgtgtcaacggggaaggactgctgagaggcagaaaccataatgaccagaaagctggaagtcatggaacacgtgtccacgtttcttcagttaatttttagaaatgagtgaatgtcacctgacagttggtgtctcttgtttttttttaatgaagctgtaccattgcaagccattttctctctctaagtttcctgtggaatttctttccttatcaagatagtaatactttggagttttgaatttttaagagattcagtcaaagcatcttgtcattttatccagttgctccacttcttaatctgtaaaacggagatagtgtctttgctattaatttttcttaagggacacagaatccaaatactctttgatctacaaatcttttgcaaagatgcataactgtttactgaacattttactagaagtcagcctgttgcttttaaaatctaggaatgttatttggcttaccaactaaacatattcatattttgcttagcatgccccctttcagatgacttgctgcagaataatgaggtgcaagttgaacaaagtacttttcaaattaccacaggacctcaccagttttaccacttacctccagatgtgtggaggccatcatgggagaatttacctttttatgtttggacatttttgtaaaaagcttgtggtgttgaatcaatgggttatgaaatggttttaggaatgtaacgagccatcccgtgattctacagagagagaca

SEQ ID NO: 46552 - DNA, 1862 bp, Homo sapiens
caagctatgcctgcataagtaagaaccgcagtataatgaacacttgctatgagccagacacagtgttggaggtggtataggtactccaggaggaagacgtctccagccagttagctcaggtgtgtttgtatggcaccagtgccccaagatgacaatattcaaaaatgccagacttcttgaagtttagacttgagagtctcccagtgtcatttctactacattcttttggttaaagcaagttacctggctaaacctagagtcagtgagagaggggattgttcaacagtgtgcatttagggagagaattgtggctatgttacaaacaatctaccagagacttacagacggcagctgtctattccccatttgacttcatcatttatgagcagacgtttgttaagcacatattgggtagcaaaacatctataatattagcttttaattttttaaaaaacttttatttccagaaagcttagctttatctacaagtacagttggtccttgaacaatgtagattagggggtgctgaccctctgtgaagctgaaaaaccatgtataatttttgactccctgaaaacgtaacaatgaatagcctgttgttcactggaagcattgctgatgacataaatggtcaactaacacatatttgtttgttctatatattatatgctgtattcttacaataaagcaagctgggcctggcgctgtggttcacatgtgtaatcccagcaatttacgaggctgaggcgggcagatcacttgaggccagttgttcaagaccagcctggtcaacatggtgaaaccccatctctactaagaatacaaaaactattttgggtgtgggtggtgcgcacctgtaattccagttactcaggaggctgaggcaggagaatcgcttgaaccgggaggcggaggctacttgagccgagatcatgccactgcactccagctctgggcaacagagtgagactctgtctaataaataaataaataaataaataaataaataaataaataaataaagctagagaaaagaaaatgttattaagaaaataataaggaagagaaaatatatttactattcattaagtgcaagtggatcatcatgaagggcttcttcctcattgtcttcatgttgagtagggctgaggaggaggaagatgaggggttagtcttgctgtcttgcgggtgacagatgtggaagtaaatcctcatgtaggtgggaatgagcagttcaaacctatgttgttcaagggccaactatagttgattaactcatatctctacagttaattttcaaacagatgtgatagctgaatgagaacttttaagatagtactggacagtaaccttattggaactggaatggcctttagactttttgtgtccagtttcttctcacctcctctttctcttcaaatgtgcaactgaaactgagagacctcagtcccatgtccaaggtcaggcagatacttagcggcagagtgaggactccagcccatttctgcagctctgctgtgcagtggaagatttgggacaagtacattatttaaaaatgcccacccactaaatattacattcctaacttttcccaatacacaaatatgcttgaacttttaaaagcttgtttttggtcgtgcttggtttggaatgtgaatgactaaaactacctttagcaatttcccaaagtgtaagttcaaatgtacagagaatttttttcctgaatgcccaacacaatatgcagttttacaacacataccagattcttagattcatttggtgaaggaagcctctgaattaaaacttttaaatatttctgatttgcaaccagacgaaaaagaagaaaattgacaacttttttg

SEQ ID NO: 46553 - DNA, 1070 bp, Homo sapiens
taattttaatttacattaactttaaaatatttgtatgccaaacactagttattttgaggggatcgaaacaaatcatagcagagataaggaactttcatactttgggaggattttttttaaataactgtatgtttactctaagtagatatgtgtatgcatgcattcacttatgatatgcacacacacacacacacacacacacacacacacacacacacacacacacagaaatttatgatgtcctttaagaatcttgggactatcagaaaaaagttaagtgaaataacaattttcaaaaatacatttttgtagtaaaaacgcaccatcggtgttacattactgtataaatcaaatttgctgaagtttataaatatttttatgtttactttaaacttggacataatcagatctatctgctgttgacgacatggctctcaatataaaaataatcaccttttctgcttaaagcctcattctcagaagtaaaatgtgtatgtgaggatattaactagttcataggattgttgtagaaaaccttttacatatgtggatactgaaattcttatggcctggatcagtggcctggatcatagctaatctttatgaaaagatcactgtattattacattgttactacaggtagattttcaccctggtccttgcatgaatcatttggttgtactgtccatgatgtccagtagtagattaaaaaaaaaagaaataaaaacaaaaacccaagccaatgcctacgacgttgctacaagtatcctttaacctgtggtgtgaagttatttccaaagatgaagtttgccattcaaataccatttcctggtgttcatttgatttctgtaacacctctttttctatctccgctaactctagatctgtagtccttccaaacatgctacctaccacttacactttgccaaagtgtaatttttgctctcttatctgcttcataagagaatgtttgtagtttcatgatttgtaagtgggagggggtgcttagcaggagttgagatcaccagcccagggaggaggaaatggaatcagaataagcaagaggaata

SEQ ID NO: 46554 - DNA, 1033 bp, Homo sapiens
agcgtatgtcactaatgtatagcatatgtcactaatgtataacatagttctaatcaactaaaaatttgtacagactcctagatgggctactaagtgaatatattttcctctgtcctctggtggacttcactacaacttttacatatttcgatactgaaattcttaatagatttggcttcaaattccagcctgatgagataatattggcatctgcccctgaagtccagtatcaggtcattcttgctccacttcaggcttctttcaaatttggtaatcgtgctcctcgtgtcttggatggctatattggcaagtcagaacccttcaattcatctctgtagacctacctgccttgggttcccgtaacccattagtaagtccctttgggtaagagttcccactaataatgtttttctctcgatttctttatcatgccttgaaactgacttgaaacattttgttaaatgcctagctaaaatcccaacacacttgtgaacagatgttagtatgatggaagaacagaaaaaagacacggccaagctaagatgttggtatgattaagttggatgaacagaaaaaatgtgcagccagatctatctccagaatcaaccaatttccacattgctttcgatctcatcctattatgttttctgtaagtaaaacttccactgcaaatattaattgatgttaagtcaaaagtactgacggtctggtcacaggggcttagggagaaacgagagaagcaaaaagggtctccccccttagggtaagctagagtcttgctgggtcagacaattaggcaacaatgtaaggcagtatataattaaatgctaaattatgtagagcagattatgtgctatggaatggagaaaatggctctcacaacatttctaatgtcctaaatcagtttcctaaatcagaatggtttcatacatccatatgtacttaaagcatgctcagtatcattggtcctttcctgcttttttgaagccatggtaatagtaaacattttctaagtatctactgtaggtcaggg

SEQ ID NO: 46555 - DNA, 1338 bp, Homo sapiens
taaaaaaggagttggaaaaggaatatgtagattcaaagtgacttaaagaatagaaaaaaaatttgttttaaaaaatggccaagactaaatcatagtgtctagggaggtacacctgaataataaaactataaagaaatacaaaatatgattactactaagaatagtctgttgccagtagtacacagaatgagcactcaaattataacagaagcattttggtattcataaatgttctttttttaaaaaagaacacaatcgaaattataatataggctgtaagtactgattttaattgtagtgaatgtgaaagtgttgttaatgaaaatataaagaatatttgttaaagtgtggacctagccaggaatactaggtagaaaaggtaactctttaaaaacatttttttaattgtgaagttaatttattgtcactttgtttgatatttattattagagtccctaggttaattctgtttttattgcttttcagaataattaagacctaaatcttctgccgaattctgtttggtttccttatttcttttgccatgttctttcattccacaaatgttattgagcacttccagtgtaccaagccttgtgtttactgctttgatgataaatgcaataaggtaatgctgcttttaaggatccttcaggataggctcttgtagcagtaaggacttagtatttttgctatagaagtgtatggagagctatctatggtgcaataactgtggaaatacagtttttattctatttggttcccatatacattgagtcctcctttggtgggaatttgatcaggttggtctcagttgaatcctggctgcatatgcctcagtaaggaagaaggcctaggggactgtggaaagcctggtggtggtcctggaaggcttgagaatacctggagctggaagctccttgctcattggtgacctttttcatatgcagcagagctcttggcattcctagcatactaccttgaaaggactgtgtcttgcctcctagaaattctggacttggtagaatcatttgtttatgttattttaaaaagaaaaaaaactctgaaatgtactttttggaagaaaaatgaacttgtttttggacttttctgtgtgttgtttctttaattgaaaattctgtctggagattgattttcaacccccttcctttccctctagttttaaattgtaacattgctttccaagcatttcaaaaaaacaacaaaaaagaaatattttattattactctatttttatttgctcattaataattcttgattttctatctatatgaaatcaaagaaaaattactgtataattttcatccagttgcagt

SEQ ID NO: 46556 - DNA, 1044 bp, Homo sapiens
gacatcaaaaggaactctaagctttaccaaaaaggttttattcgagtaattaatactcttcatgcacagagggaaattagcctccaacttgtggacatggtgaaaaattagtatcttcccatttgctcggcttgtttgaactatagttgattatttttaaagataaggagatcaaatttccttaatatttcagtatgttgctttttgtacccttaaaattattttttcctatgcagaattgactttgattaaaaaatgtttttgatgactattttcctgattcgtcagtatatctaattgtgttcattttactcatgaaaaatcttgtctatgagggacgtatttttagtaacatttttatagcatataagaacttttacagcaaaaacaggaatcattaagtgtgtgtgcttttatcataacttctcttttaatggaacttaaaatcttaactcgtgtttttgcagcactttttttgcacatggtaggttcttaatatttgaatggaattcagtgtgactgttctttgtgttctcaaaagtctgatctttgtaacaatttgtctttcacttgagactttttttttctttgcatatgtgcacgtctcactcttggttttccttaatcttttttaactaaacacatctatgactcatatttccctatttatgaataggagcaatttaaaatttcccaacatggtggtatgtgatgtaacataaccaaaggctacatgtttacccttgtttaattacccttcatttgtggaaagatgacgtatgtatttatgatgtaaatgtctttcagaatgacctttgggactaagcttttttttttttttcccaccaaaaaatggtcatgacctaggaagccttgttagtaaaatttaaaaaggaaaagttggctgggcatggtggctcatgcctgtaatctcaacactctgggaggctgaggtgggtgtatcaattgaggtcagagttcgagaccagcctgggtaacatggtgaaaccccgtttctactaaaaatacaaaaattagctgggc

SEQ ID NO: 46557 - DNA, 1081 bp, Homo sapiens
tgtctgcctaatgatactgggtttagttcttgaattctttatattcagaatatggattagggccaggctggccttgacaacctgaatcattaaacacttatggtgactggtgggtgattagccacataagaagaagatatattcataacagatataataggagcaatggggactcgatggagagtattaaatagtacagtgtcttccataaatgttctttaattgtggagattactgttctgtagattattcactcaggcattgagtatgcgtttattaagtgctttttgtgtcctaggctcattcacaagtctaaacttcaaatttggttcttaaattcctcaagaccagagtttagctaaaagtatcattatatcctgagatggaattttatcaaattgtatgcttaaaatgaggagatatgtctgtttctccatctcgcaagccccaccagtttaactgtcaattggtcttgtcaatcaactataagaggtgtaaaaatgtcttgggctataagtacatactccagggcgtatcctggtgacagagattgagaaactgattggaagagagtgtaatcagtagtgctggccttactgttctgaaatttctggtttctttccctcgctccaaacttaattctttcttctctattttcaatttcagaagaaatttagaatgagtgagggaaattaaaatgaagtccagaagaccagcagagatttcaccgggcatgtgggtaggaaagacgtgtgagaaaaccatttgaaatggaattaaaagaaaacgtgttcagctcactatataattatagttagcttggcctggtgttttgggttgcattacctgtaagtttggaactcatttgttgtatagaaattgataccccacatttacttaaattttgcccatctgtttcttgttaaaagaaactggacatctgctaaaatatccttgttttggattactcaatcttattgtcaccttataatggttttattttgggggaggtttattcgtattagtatgatggggaaagaacagaaagatcttattggaaaataaatttagaattttccaa

SEQ ID NO: 46558 - DNA, 1050 bp, Homo sapiens
aatatggattgtgtaaggcactgggctttaggcccccagcccgaatatctgtcatctattaagtacttactgtggataaagaaggcagtatacttaacatgcactatttcatctaatttttgcaaaagctctttgagtacattaggccagtctccattttattaatacggatgaggaaagtgagaccaagacttgagttcaatgacttgcccagagtcgtgcaaagcataaggggcggagtaggatttgaacaccgcatgaactgggctctggaatcaaacgcttccctaatgccatgccctaggtctcagcctggactgtgctcccagagtcacttaagcacttttcaaaacactgacatatgtggacccagcatttcgaggagctgggctctgggcatttgggttttgaaggttttacaagtgaccctgatgctctgtcaggcaggcttaataacgactgaattatataacatgcccagcttggtttcttgcttggttgttgaattgctgcatgaaaatctgatccctgcagtctttgagcctgcagcccagtgaaagagatggatgtgcacacaaccaagcatgaacaagatgcattatgacaagtactatggtagtacagactttgtgctctgtgataattcctatgacacgacttgcagttgatcccaggaggtagcatctgggacatagtcactttagcaagtcctatttattctagcttgggagagttccttgcatcttaactctgtatactctgtgatcaccagacagtcttggtctaggttattataaaagtcctagttgaggatcttgaatctctcccattcagtttgactgagagagcttggtgattagatcagtggtttgtatattacctcatttgtcttccaaactaatagataagttcctcaggatccactccagtgggattactaggtcaaagataaatcattaccagactggttgatggtatcacccaggctggtgtgcagtggcatgatcttggctcactacagcctctgcctcccgggttcaagcaattctc

SEQ ID NO: 46559 - DNA, 1031 bp, Homo sapiens
ttccttactaaaaaaatgaggcctcgctgagtagggccagatgagctgtatattctgagattatttatagtgtttatgatagagagaccaaaaacagtaagcacttaatagctttccttatttacaagtcagattcatctaagggatatttttcttttatttttctggtgcttgaaatgttcctttaaaatagattatcagaggatacacagtgacacaaaatttgttgcttgtgaaaatgcagagtggattaagcttttctttttcaaggctctgcaacaaaacaggtacatttttatttcagtaaaaacactgctttttttttttgcctccgtcacacacacgagtaacataggatagatatgtgtatgtgaacatgtggctcttgttcccagttgtgtaatggatgcattcccttaaagtttgcagtaaagtgaatgtttattaagcaaattgtttttccccagtgacttctactgtaaaaatggcattgtctttcagtaggctctgaatatagtatgttcccatattctttggtaagatgaccaatcaaccaaaaaaaaaaaaaaaacaaaaacagccccaataacaaacaaacaaaacaaccctttaggtaccataaatctataggaaatactaaccttctgatgaagctggcccgatgccacttattgttgtcccccacgcctaagctatggtatatggctttaataacaaaatggcaacacacaatagtaccacaacctggagggtgttactctttcttctgctcacccttcctcccattgttcccatgggagagaggacagacaccaaggctgtagcaaataggttattttaataacctcagcatccttgtttctatatgatatacatttgatagccaagttgaatttacccacctctctctaaacactttttcctaaccctttgtcaatttgtcacaccatctttggatgaagagtggtacctgatggtgtatgatgcttaacaatcgaaacatctgtaccttgttagccataaaggctcat

SEQ ID NO: 46560 - DNA, 1109 bp, Homo sapiens
tcaagcagcagcacgataaaaataccatattgcatttccaatgaactcctttaattagatgagatgaattaattggatttttgggacatgtctgtgaaagtataagatactcacttttggaactcccaggcatggtgtggcctgggagctttctcagtttgctcctattcaggacatggtgtaagaactgtcatttgaagcctgtcattttagtcccccttgggggttttacaaatggcctagtgatttttcagatagcagagaataaatcagcagtgatttggcctgcccttcagcctagggcattccctggttatcaccagcctcatcatcaggtgcttgtattacacgtttttctgtccacaccggcaggtgagatggtaatctaagagttgatttccaacacgtgcggagggactttcgaaagtccccctagtcccggtattctcttgccctgtataattttaggggtccaggcattcaggcttggatcgtcctccttatgtctttcagggccttggaaaattctggaatttagacaggggcagtaagtcagtggctgtagcccttgaatcccatttgggaccttaactcattctaccttgcattataattatttggtttttaactgtctaggtttctgtactttcaggggtaaagctgattcattctcctctgtatcccagagtccacctccaaggtggtaggttgcttgataggtgcttagtaaatatcatatttgattaactttttgtagcctcctctttagtctagaaattctagatcccaaatagaaggtaagatatggtatattctggacttttagttttctatatctccttttcaaatacagacctagggtgacagacaaaaaaatattgtgatcaaagtatatagcatttcctttcatggtggaaaaatgtgcctgataaatgttttctctgcattattttcctccaaatatattttaatgacagttatttggatatttcacactttatactcgacttgggctcagattaagtcttgtgttagttataaccttgaataacaattaggttcatgagaacagggatggtgtatatttgtttttaatctgtttcccagca

SEQ ID NO: 46561 - DNA, 1037 bp, Homo sapiens
cttatgtattggagctggggctacttcagcaaacaaaacaaactcctacccattcaccttaccattctagtctgtcagttttgtaaagttgaagtcagactttaaatgtatttttggatgttattttttttcctaacattatccaagggcatttttctgttctagtaaattgtttggaaaataggatttttaaggtgtgattttttttttttttctaacccatggttggaccagagtttgtttaaccatttacattttcttacatatattttatttgtttattattattttgagacagagtcttgctctgtcacccaggctggagtgcagtggcgcgatctcggctcactgcaaccttcgcttcctgggttcaagggattctgctgcttcagcctcccgagtagatgggattacaggcacccaccaccacacccggctaatttttgtatttttagtagagatggggttttgctgtattggccaggcgggtcttgaattcctgatctgaggtgatctacccaccttagcctcccaaagtactgggattacaggcgtgagctacagcacccagccttcttacatatttaacttgttttttttttttttcctcattagaaatagtctgtaatgggtttcaccttgttgagtgttttcttcttgactagggtctctctctcaaaacacaatatagaacttcctgtcctgtcctccctaactccccactccaatcccattctgggctatagctgtttttaaggtgaacacccatttagtgaagtagccatcattaaatgactgcctagataaacatttgtaggtgttaattggtcctgccagggggcctttgaagctccactgctctgttctctttgaagttttgtttttctccagccaaaatcctccctggtctcttactgagcagacatccctagacttcactccaagcactgtgcatataaccttgcctgggatttcagaatctgcaggccttacctaggtagatgttactcttctagctaattgtatgcagtttatca

SEQ ID NO: 46562 - DNA, 1028 bp, Homo sapiens
atcattcagcttccaacatcctgatttttacagatgtagaaactgagggacagaacgtttcaggggtttgcttaaggcaagaaaattgtttagtgacaagggtagcaccagaatgcaggcccccttaattttgccttgatctgcagtctttcatttctattctcaggcacccttgaaaattcaccagccacaaggagatccttattaatggtgtttgttatgggatttctcttagaattcttcagtaatctgatgaaaacttggaggacaacctttgcaaaaataaatgataagtaaataaataaaagcatgtacacaatttgttatatggtttcaggggctgacacacacctcccgctgagggcatcctcagacttacaaactcttgctctgggagtttacattttgcctgtttgtttagttgggtaggtctgtggagctgtttagtctaagtaggagttttttgaacctttcaatttggccctaaggggtttagggaatagactgtgcattgactgaacaataagttgaattacatgcacttacagcaaaaagaaaatatgtgcaaggcaagtaaaaatgctaaatacttttttctttttttcctcattatcccaaactgtattaacagacaccttgagcaagttcatgatccagcagtgaaccttagatgaatgttttccttctccaaaatgaaaggtgggaattgagattctcgggttttaaatgtaaaatattagcacctttctccccacagttgtacaatagcacaaaagcatttctaacataaacccaattagcacagttaaaaaataaggtagggccagccctatggaaaattatgaagttggcaagtttgtcttctgacaccgagattctgattctctccttcctttctcgcctctttctaaacctgctttctggagagcacctgagaacctcaatcacaaggaatccctgagtaaatgttggggtgttatttgctactttcagggacatttgtattattactgaattcagcctagcaa

SEQ ID NO: 46563 - DNA, 1127 bp, Homo sapiens
ctaatttttgacctctttgtgatcgggccaagaaatatgacacccacactttggtttatgtttaaagaccacaaggggtcaggacctcaggattgggtctgatcagaaaagtggcatttcgtagaaaagcaagtttgctctttctcccaagcagggatctctttagcagggacacttctggattttcattatgttcccctttggcataccttccagccctaaacttgcatgtagcccgggatggtgctgcgaaaggtttacattcactcgcctggtacacctggagttttgactcattcctctgagtgggttagcagaattatttgtctttgagaaatggtgcttacaaactttattgccatttattattggttttttggaacacatgaagatgaagcaagaactctcaaatttggagatacgctagcagagcaagcaacgtgtgtcgtgctctggcgtaagagcaactactgtgctacttatattgatgctttctggaagatggccttagatatgtgagatgcagaactcctcaagtcaagatatgccagtctctctagcgttttgggtggaggcgatattgaagttaggtctgtagacgtgatctgtgtaagtttgacttctcatactgactcatggtgtgacttttgattagtcaccttgagcattagtttgggttttgcagagtgggtttcagactgcttcaggggtgctctaagcactcatttggtaatagcttgtaaaaacacaatcagtttccatctagcttattagcaagtgtccatgggaaaaaaaaagcttcagtttaatttgctccctcaagcaatcacctgtaagtttcctttggagcaaactttatgcagcctgatgactagattgaaaatttatggtattatggtcaagttagagtatatacaaatatagagtatatacaaatgtttcaactaaaaaaaggttgcttttggtgaaatagaatattatgtgtcgataaagaatttagtgctaaaagagcaatgacttctgtctcacctgtgcctttgtgaaaattagacgttgattacaaaggtatagaaaagctgcaaggaatgaaagaaaatacttttctcttgtaatagagagaaaataaa

SEQ ID NO: 46564 - DNA, 1012 bp, Homo sapiens
aatccgagaggcaaggcaatcacttcgtcttgccattgattgggtatcgggagctttttttttctcccctctctctttcttttcctccgtcttgttgcatgcaagaaaattacagtccgctgctcgcccgccctgggtgcgagatattcagccccgctctctcccgtgcattgtgcaacccaaagatgaaagaccgaaggggagaaagttaaagaaatcgcccacatgcgctggatcagtccacggcttggggaaaggcatccagagaaggtgggagcggagagtttgaagtctttacaggcgggaagatggcggactggagctgaaagtgttgattgggaaacttgggtgattcttgtgtttatttacaatcctcttgacccaggcaggacacatgcaggccaaaaaacgctatttcatcctgctctcagctggctcttgtctcgcccttttgttttatttcggaggcttgcagtttagggcatcgaggagccacagccggagagaagaacacagcggtaggaatggcttgcaccaccccagtccggatcatttctggccccgcttcccggacgctctgcgccccttcgttccttgggatcaattggaaaacgaggattccagcgtgcacatttccccccggcagaagcgagatgccaactccagcatctacaaaggcaagaagtgccgcatggagtcctgcttcgatttcaccctttgcaagaaaaacggcttcaaagtctacgtatacccacagcaaaaaggggagaaaatcgccgaaagttaccaaaacattctagcggccatcgagggctccaggttctacacctcggaccccagccaggcgtgcctctttgtcctgagtctggatactttagacagagaccagttgtcacctcagtatgtgcacaatttgagatccaaagtgcagagtctccacttgtggaacaatggtaggaatcatttaatttttaatttatattccggcacttggcctgactacaccgaggac

SEQ ID NO: 46565 - DNA, 1045 bp, Homo sapiens
catatttgcacctttcagatacagccaactcttccagggcctagactgagctggttggagctccccaaagcagcattcagttgcttttccttgatatccaccctggctacctatattccctttctttatataggcacaaccattcaccactacgctggattatctaacactccaattctataactcatccaggggacacacagttgagtctgatgaagcctaagaactgccaggtgctgagatattgtaactgggaattaagatttagccaaggacattgtgagactactgctgactctcttggaaaactggacatgctttgtagtgcaaatgttcactaaatgatggtggttcattgttacttactttggcctttgcaaaatattctgaacaattcaataagtagagtttcctagtttgtttgtttttttaagtcaaaggaacgctgtgaaattattgaaagatgatgggtgaagagggacctaggagaaggcaaaatgaagaccattaaagagccccattgaagactgtatctctaaaaatgccttaatgcctggcacatattccatatttgcatatgaactactattcttttccaaactgtcaacttctgtttgaaatcattgtgggggatagtttggaaatatggtggcataaaatccaagcagtcaagagctaaaccagcaaaaaagaggaatgacttcattcacaggctttggcttctttattatgtggtggtcctctgtgatctcccatggttaacttcaactgtgctgtactttcttcccaagatgcatgtacggaatgttacctcctagaaatccagaaatagttgtggtgagttttgtttgataggaagcaagaggtggggaagtaaaggatacatatttttatgtctaaggactgtaaactgttgatgcttgacttttccttttacctacacctgtgctacacctttattaaaaggctgacacccagacttgtgcaggaaaggcactcttgggaatgaacagaaatgaataattatgagactttccatggtgcc

SEQ ID NO: 46566 - DNA, 1042 bp, Homo sapiens
agattaactggattaactgaaaaaagcacccattcagtcaatattatgggttttggaaaaatcttgctttgctgtggatttaaaatgaggtgcataatataatgccaactcattccaagtggtcattggcagaccattagctggaaaattgcttccagttttcatcactgtgcataactcaagttccctttggggagctgtctgtgcccttcactagaagtcctgttttagcatggcaactactggattattttattatgtgtgcagatggcatgatgttttagaaaaaaaaaattacagcaattctgcaatctcagtggaagtgttcacaatattatgccctggtaggaatgtaaacacgtctcgattatgttagttatgatgtctaaaggtatactgtccaactcttaagcactttatatgagaacactacaccaagatgaatcagcacattcagcacatgtgagaaatcaagtattttctttttatttttataaatcttagtggtttttttttttccggctcagactgtccaagacaaactccactactcgcatatccccagttgtttgtggtaggttgatgtaaatatggccacaatactgttagacttcacctccagatactttattgaacaactggtttacttctagcaccaaagggaagaagaagggggtccagtgatggtgatatcttagcttgcttctttgttcacaggcactattgaccacatgaacatacaggtactcaaatacaggaggcttctatttggctcctccaagggaggagttcctccaagggaaaaaaggggatggtattcttttaatcaaagaccatggtggatggatggtaagggcaacagaatgcaattcttttgtgtggtctgacgttaacacttcggaaaaaattctaagtcaagttgaaatcgccattctctcaagagagaaacatcaagagagaaacatcaagtgaccccactatgtgcctagagaaggaaaagggtcaagtcctatactaggttccttacttagggtagaaccta

SEQ ID NO: 46567 - DNA, 1091 bp, Homo sapiens
aagtataaattatcaagttgccatcaggttatataattttcctccctgctgctctcacaactgcatgccatcagagttttgaactaatatgtcaatataggggcataacgtggcttatattccacatggatttctagtttggatgtgtgagtgtttagaagagaaaattccttccttaaatcccacagcagatatgtgacagagagggcatctcttaaatacttccattaatggttttgtaccagtggctcttgatggagggaaaactccaattttgagacctatgtaatataatctcctctttgtggatgcaaattctcagtttttctatggttgtctccctaccaatgtggtttagtcatcttaagaaaggacaagattccttagtagtaactatgggaatactgttatttcatttaataccaagtcaaggtaactaagcttcccttgctcagtctctgtgtcatctatgagtttagtctgggaagatcagggattttgaagttagccctttgaacttagctctgattcttactagatgattcttacttggactcactattaacctttctaaacctcaatttcctcaattgcacactttagataaaatcattatccaaaaggttgttgtattagatataacacattaaaaatacagagagcctgtcctgcatggatattcactctacaagtggtttaataaaagctgtagttggagatggccatggtggggatggtagaaccatatttaaatgaggaggagaaaagactaccccatatcaaatgatattctaagacaatatataaataaatgttgtaaagactataagagtttagacaacagaacaaaagagaagaggaagtggccctgtaaatattcatgagatgggacatgatctgggtctggagggatgtgaagatcagaggcatggaggggatgaggatggcctttcaagtaaaaatcagcaacagaggctggaactgacagattttgtctatgaacttctgaagcattcagagacaggcatagtgtagagcagcagtcagagggtgtttatatttgatgcaagaacagataaacagccaaaagc

SEQ ID NO: 46568 - DNA, 1058 bp, Homo sapiens
gtacaagagaaagacgaaagtctatgaaaaatccaggatgcagggcctccacagcgggaagcatagagtttctatgatatgaaatgtaggctacaaatgaggcatttttagggggaagaacaggagctcaattttggacatgttgagtttgatatatttattatatgtaaaaattaaactgaagtcatcagttgcatatgtatatatgattctgtagttcaggaagaaaactgagctggaggtatagttttggattcctcagcctacatcatggtaaaagaaaaccaaaaaacaagccatgagactcaatggagagccctgatacgacatgtgaaaaggagattagtacagtgggcagtgagatttgtcttgcatttacccaaaggcaaaactcaagaatcagtaaaaagatgatgaagatctgactttgacttccatatgaaagtacgttttgaagcattaatgtttattaacaatggtgtggcctatttcataggatacgttttcggatgctgtggattttctgggaaagtgctgaatctagatcagtgtttttccaaattttatgtagctcaaaaaaagagaagaaaagaaaaaataatcattttaaattaggagattgacattttgtctttacccaagtaaagttgtttacacacacaagccttgatatattcatcataatttaggtttactaacccccatcttagatgtcttaaagtggattggactcttgcattaggtttaaacttgaacccactaactactgagagtccttgacaacttttggagtctgtggtcacagcatttagaaattttaaagtccattaataatattcagtgtgggcaaattaagagaaaaaaatcctctagtcttatctcctttaaaaaaaaaaaaaaagacactacaacagtgatgtctttaaacagtggttctcaaatttatggtcccaggactttgtcgcactcttaaaagtttttaagaacctcaaagagcttttgtttatgtaaattatgcaaatacgggaaaataacgaatacattggttaataaggatt

SEQ ID NO: 46569 - DNA, 1098 bp, Homo sapiens
acttattcctcttcttttttctaagccagtttaatagaacatcactaacgataaggatagtcactggaaagcaccaaataccaaggactggtaattgtgcctcaaaattcactttactaagtgcaaattgacacactcctcaaggatccaattgtaactattacccaattttacattgcagttggaaagaggcttcattggttgtggttgagttgtctacagtataataaatactttctgatggtttgtttctctattcaggaagtgtaatgataaacatacaacagagccaggagctggtctgcaattcattggcactacagattatttaatagaaacatggagatttataatgtgctgatttgcagagtggaacagacctcttatttaaattttatgatatgaatattttttaaatattgatttggttgtcactatgggctatagaattcattggcttctttgattcattaacaaaaggctttgtatgtagtgtccctgggatagtgtggaggaagataagcctgttgttgcatatcaataacacaaagtgatgcactaggagaaatcctgctggcttcatttgtaggggaaatggagaggaggagtactgttgttttagggagatgaattcagtatctgtttttctggcacccactcaaaaagagagaaaaataccatgagaaaactgtgaaacttggctaggagtgttttagttgttttattagcgatttaaagaaaacaaagaacgggaatcaagtgtaaacataaacaacatcaggaaaggaattcttcagtatgttccctgaaaagatttttgtaaaaactaatttataattaatggatgtgaggaggtacgctgtgtgtggcttactttgttttattctcacatttgctctgctaaccaataacagatggatattaccccttttgtggttgttgaattattattttcctttattttctttccaaacccctaactggtcatcttgaggtgtaaatgcctttctcccaaatgcacaaacatggaaaaatatggcatattactcagggttctccagagaaacagaggagttagaaatccaaatctaaatctgt

SEQ ID NO: 46570 - DNA, 1048 bp, Homo sapiens
atgaagggttgactgtacttaaccttgatcaaattacattgcttagctgcctttgagaaggtctgttgcaatttagggatagaatgatctaattcttggctatctgtatttgttggctcaaggagcaaaaatgtctccaaacaaagctgccaacccaatataatgtcacccatgataggaaaggacacaatgcatatgaaacataatgaggatgtacttcttaagaattctcataagggtcagaacaagagacaagcaaatatgacttcatgctatgtgagttccaggaccccagtacatgtatattgagttcttggacagggctcaaacgaaactacagtaaacttatatccgaagaggtaagcttttattactaacatgttaagctctgaaaagtatgacaattaatatgatatatttaagccataggttcattgtataatcaagaaaaaagaaaacctagagagcatttgaccatctaatttattttacaagttagggagatgagactcagatgagactgaatgacttcacaaagatcttgaggctagcagtgacacagtctacctaaaacacagtttatctaacacatgaacagtgcttttcactcttttatgctgacagatctataggaaataacaagtgcttggagccacttagttaatagtatttgtctagtggacgaagagtacaggatatgccatttgacaatgtaaaaggagggcggtgttcaggcgagtgtatcagagcccactaaattcatttgagtttatccacccaaactactaaattactaaagtgattctctttggagattattggtacttgccatcccttctgcctataatgttctccccttgatcattgttcagctagttccttgtcatttaggtcctagctcaaatgtgcttctccaagaggtctttcctgaccaccctaactaaatgaatccctagtcacattctctgacatcacttggtttgatgttctgcatataactttttctggtctgaaatcatcttgtttgttttctgtctctccacagaat

SEQ ID NO: 46571 - DNA, 1052 bp, Homo sapiens
aggctgaggcaggagaatggtgtgaacccaggaggcggagcttgcagtgagccgagaccatgccactgcactctagcctgggagacagagcaagactccatctcaaaaaataaaaaataaaataaaataaaacaacataaaatgcttattagggtatttggtacacagagaacaactaataaatggtatttgttttcttattcacattctctctttcaacattgactagacaagggctatatatgacttaagataatttgctctcctttactagtaaatacttaacttagtcttttttttttttttttgaccatttctaatatacttggtctcatgacaaattctgcatcaatcagtggtggtgaagacagcaacatgtaccccatttctttttttgctctttcttggtcagatttatttgtgctgtctgcgcattgtatttgaatatttgaaatgctaatggctaagggccatgtccttttggtctctgaggttatttcataaagataatctagaactcctaggaaacagagacaaccttgcccaactcctcatttaagagattagaggctgggtgtggtggctcatgcctgtaatcccagcactttgggaggctgaagcgggtggatcacttgaggtcaggagttcaaaaccagcctggccaacatggtgaaaccccgtctctactaaaaatacaaaaattagccaggcgtggtggcaggcacctttaatcccagctacttgggaggctgaggcaggagaatagcttgaaccggggaggtggaggttgcagtgagccgagattgtgtcactgcactccagcctaggcgacagagcaagactccatctcaacaacaacaaccaaaaaaaaaaaaaaaaaaaagagagagattgagaggttagaacactaaggcctagagaggttaaatgttgcacctaaggtcagaggtaggatggctactcagacctccagcgtcctcatcttattctcaacacaaacacaatcagcccctgcccagaaaagaattatcacttgcttatctttcccccaa

SEQ ID NO: 46572 - DNA, 1039 bp, Homo sapiens
taaagaacaaatgatcttaattttgccatcataataattttaacataccctgtcattttcactctgtgtgctccttccttttgacactgtaaagacctcttccagtgatcttttttccctaaggattactgagttaaattaactctcagaacttcctgttgccctaatgatgccaacatcagcatgtattctaccgtatactttttgaaagtgcaggtcattatttgagaaatttgtattaaaagtgtgttttcctttaggaaactccatattaatcttaaatttcatagatgccaagtattgcctagtacaatcttcttggaaatagcaaggcagtacatctaggaagttgtttggatattggaatgtgctaagattgtgtataagcaattaaaataagtatgaaaatagatcccttaatataaggaactggcctctttgggaactggcatggttttatagtgtgtccagcacttcatttgagctcatcttcttgctggtggaggtgctggaacaagaatgaatgaaagtccaggacacattctgaaccctagttgggctggggttcctggaggatgccagaatttgtctttaaaatagaaagagctttggactaaatggagtgaaggactctcagaacaatctgagattcttatgtctccaaacatcccagggaaccaaaagtctggccaagaaggtctggtccctcagagccatgtgaacaggatgaggcccctacctctcccaggctgatgaaattcaccagcagctcagaacccacagactgaagagtgctctgtacgttctcctgccccatccctcatttgccagctacagtagctgttagtttggggctgaggatttctagaggctccaagggggctggaacccttttcgagctttcccagggcaggtatcccaggtgattttgaaacaatggttaagcttctggatgttctccacctcccagttacccatttcctcaaaaaataagttgtcactctttaaggatactctcaaaggctggtgacaatgaaac

SEQ ID NO: 46573 - DNA, 1027 bp, Homo sapiens
aaaatatgggaatatcttttgcatttattcatgtcctttttaaatttgattttcaacataaaagttatttgttttttttttgagatggagtctcactctgtggcccaggctggagtgcagtggcacgatctcggctcactgcaacctccgcctcctgggttcaagcgattctcttgcttcagcctctctggtggctgggattacaggcatgcgccaccacacctggctaatttttgcatttttagtagagacggagttttgccatgttggccaggctggtctcgaactcctggcctcaagttatccacccccttgggcccttgggcctcccaaagtgctaggattataggtgtgagccaccgcactcagctaaaaaaaaaaaaaaaaaaattattagcagaccttacttggcatttagagtaatttaggtgacttggaaagcagccagacagaaacttcacttttcttcatcaaacaaattaaaagtataacaacttaaaatgcactaaagaacaaactcacattttaaaatatgttatttacctataatactgatcggctcttagaaatagagtatgaggcctgaaggagaggaattgtgtttatatataaagatgaaaatatggatatgaaatatccataaagatttatatccccatttatattacatatctgtaaattgcattctataattacatttcacttttattcttataatccttccgtagtcttattttacacagtcttaaatttcaaagcacaagaggatgttagaatctacatcttttaggtttatagacattaaattgcagccaaaaggggttaaattacttacactacaacctagcagtttcacttttctcccatctctttctcaattacaaatccaatttaatgtcttactactgtcagttaaatgtaaaaatttccccagttcaccttctttaaagttttgctgacctccataagaattacaacccaatttctttcttcctcacttatatccaagcattgcagttactcttag

SEQ ID NO: 46574 - DNA, 1032 bp, Homo sapiens
ttgctgtcaatctcttcttaggtgtaggtgttgttttatgaatctgggtgctccagtgttgggtgtgtataaaattaattcttggttttgttttaaacttcgtcagtatataatgcctttcattttgcttctttctttctttactattgtcagtttaaagtctattttatctgatgtaagaatggctactcgtggccgggcacagtggcttattcctgtaatcccagcactttcggaggtcgaggagggcagattgcttgaagtcaggagtacaagatcagcctggccaacatggtgaaacctcgtctctactgaaaatacaaaaattagccaggtgtggtcgcacatgcttgtaatcccagctactcaggaggctgaggcaggagagtcacttgaacctaggacggggaggttgcagtgagccgaggttgcaccacagcactccatcctgggcaacagagcgagaacctgtctcaaaaaagtaaaaaagaatggctactcctgcttgcttttatttttcatttgcgtagtatatctttttccatccctttactttgagtctgtaggtgtcttttgtcattgagggggtctcttctaggcaatagatggtagtgtcttgttttttatccaacatgccattctatatctttttttttaagagacggagtctcgctctgtcgcccaggctggagtgcagtggcgtgatctcagctcactgcaacctccacctcccaggttcaagcagttcttctgcctcagcctcctgtgtagctgggactacaggtgcatgccaccaggcccagctaattttttgtattttagtagagacaggttttcaccatgttgcccaggctagtctcgaactcctgagttcaggcagtccgccctcagtctcccaaagtggtaggattacaggcgtgagccactgcacctggccactctatatattttaagtggagcatttatgccatttctgttcaaggttaatattgaaatgtgaggttttcttcctgtcatagtgttgtgggtagt

SEQ ID NO: 46575 - DNA, 1030 bp, Homo sapiens
tgcagctgacagctcagaattattcgtatcccatttcaaggctgatcctttttctgtttaagagttttctttattgatatatccccttttctatacaaaattgcagctatcagttcttggaatatatgttttaggttgacattttattatatattcatgcttcttgttaacatttgatcaggaaaataatttgatgtttacttcattcccaccagctttaaaataaagagactttgttctatttaaattttattacatttgatagccatttttcctaaggatagctttcaatgttgtgtgaaatactttatttgaattttagctgctgttaatgtccattcagaattagaaatctcacaattttccaacctactttttcttaaatgtaggaataaaaagaaaaaaatcccactgatgaatggagaagaagttgatatggatctttctgcaatggagtaagttagttaacttaaatataaggttataatactttctgcattctcatctgtctactttgttatgcgtacgtaaaagtgtataactgtcctccaaatgagtgctttaacattattttaatttaatagaaaccctatgttaaaacagtttatgtaaaatcataactaatcagagataaaaagtaagtctgccagggcctaggtgaaattaagaggaaatgcattatggttgaggggtgagcacaactttgactaggcagcttccttattctctctttgtggcctctagagcagtgctcagactataatgtgcatgtgaatcagttggggaccttcccaaaatgcagtttctgatccagtactacactagtgaggcctgatagtttgcatttctcatgagctcccaggtgatattgattctttgtccttagaacaaaggtcttgggtgccttaagtctccctatgcttgcaaaacaatttaaaaaccactgttctaaactttatgtggtaatatttattgattgacagtgttttatttttaaatatgatacagctcaaactttctaattttgccc

SEQ ID NO: 46576 - DNA, 2001 bp, Homo sapiens
gggaatttcaggctatatctatggactttggatgaaaaaaacttttggtgttaatgagtaccgccattggattaaagaggtaataacagctagatcccttatccacttacaagtcttatgtcctccatttttaatgactgtaaaatacttttaaaatactgcttgaaaatccctaatttttcccagcaaaatgggaattgatttactgagaaagactaatggtctattttatctaatctccattgtcaacattggcccctaaaaacctttttttcccctaaggaagagaatatttaagtttcttaaacatcagattggtcgttaggtatgtcccagctccttatagtagtcgtttgtaactgtgcttcctaaatttgttagctttgtaaccttaatctttccaagtctctgtttaaggagggcaattgtagtgtctgcccataggcagagattattagacattatacaagtaatgtgcatgatgctttgcacatattaactgcttattatattctggctaggctttgaatgcatttatgttgtcattgtcacatcttttttttttttttaacgatttaaagatttggccaaaaagaaaacatcagttgtattttacttagcacattgtggtcatatacataaacattttaatcatatcatgcttagtgtcttccttctcaggtggaagaattgcagcctttcatatcttcattaaacaaaccttatcatcttccccgtattctcattttacatattattatcatccaagagtaaactcaagtaagccaaaaagttaattttcgaagacttcaaacacctagagctattaaggtatttgtacatctagaactggagtctcttctttatttcagaaactattaaagaagaagaacaaagtaacacaacacttaaaatatttcacgcactgttacaaatgttttataaatattaaaatgatcttaattctcctaactaccttgctatcattcccattttatagatgaagaaactgaggaacagaaagaaaggttaaattatttggtcaaagtatacagctagtaagtagtaggcccaggattccagcttggcttttagtttcttctctatgctgtttgccacttttctgtactacatctgtattatttaaagcagttaggagtttccagcacaattgtggtagtgtctttattttaacttatgcttttttttttttttgagacggagtctcactctgttgctcaggctgtagtgcagtggcgcaatctcggctcactgcaacctctgcctcccgggcttaagcgattcttccaccttagcctcctgagagctgggattacaggcacccgccatcacgcccggctaattttttgtatttttagtagagacgggatttcaccatgttggccaggatggtctcgaacttctgacctcgtgatccacttgcctcagcctcccaaagtgctgggattacagatgtgagccactgcgcccgtcttcacttatgctttttttcttttaattaaccaggcacggtggcatgtgcctgtagttccagcttcttgggctgaggtgggaggatcacctaagcccaggaagtcaaggctgcagtaagccataatcagctactgaactccagcctgggtgacagagtaaaaccctgtctcaaaacaaaacaaaacaactgcccccaaccccccctttttttttctgtttaaaaaaaaaaatccccctttttaaaagttcaatttatgtcatgttagagaagactggagaagttttaaaatgatagattcctgacataatttattcccattcctttttactcgcctaaattttttgaagcaaaatacagagaaggaaaaataaacttggagacagctcagagagattgagaacagccataagaaaaagttgccaggctgctgtccagccctgaagtcataaagtagagaagtctttggcttttgtcattctgccagctgtgtaggctgctttatttat

SEQ ID NO: 46577 - DNA, 1026 bp, Homo sapiens
tccaccgtgaatttaatttttaagtagttaatattttataaatgtgatcagtaaaagtgatcactattttcacaacattttctttcagcatcttgaaattattaaagaatagatttatgagaacatttatttatagttgaggtgtttaggaaatttccaatattaaatttaactctttcatttagatgatcttccttgcttcttcttttcaggttactcatttttgtttgccccaacttcttccattgctgaaacataccacatcataccttcatgaagtctttgaattttatgaagaaattcttacatgtcgttacccatactcctgttttaagactgtcttcattgatgaggcttatgttgaagtggctgcttatgcttccatgagcatttttaggttggtatctcttcagatttgaaatgcctaaattaagatcatgatatgaagaaaatttactgattttgcggtcaattttaagacgagctttgaacttttttccgcaatttggatgtgattggctttgtacaaaatttggttttaaaattttttaaatgtagaaaaacatgaagacaaagtttttgagataactcaaaaggctcatcttcatccagaattaactaatattagtattttccctgttttagtcttgtgttcataaattctttaaaaattgtacaaattattgtatgactagtatgaatttttttctagcactatttaaaaatgtactgatattgtcagaaatttactgatatcatcagtggaaaatgtgttctttgctttaagcaagttactaagatgatgaattttagctaaattttgaaaagattagaaaggtgggagaattttttctctatttagcttccattgttttaaaagtggaattattttattttcactgaataagtatttatttcttggttataatgagctttcttctcttttaaattccagcacaaatcttttacacagtgccatgattatagatgagacacctttgactagaaggtgtttagcccaatcct

SEQ ID NO: 46578 - DNA, 1158 bp, Homo sapiens
tatcctggctaacacagtgaaaccccatctctactaaaaaaaaaaaatacaaaaaattagccgggtgtagtagtgggtgcctgtagtcccagctacttgggaggctgaggcaggagaatggcgtgaacctgggaggcggagcttgcagtgagccgagatcgcgccactgcactccagcctgggcgacaaagtaagactccgtctcaaaaaaaaaaaaaaaaaagaaagagtgtgcttacagtggttgagattcctttgaactgtagaggaatataaggaaaagaaacacttggataagaggctgaaaggcatttctatctattttatccaactgttagctgacatgttacattacatatactaacaatttaaaaacatattggttatgtaacgtgtataagcagctgtctttttgctttactatttgtcaataaaataattcagcacttgaagtttttcgacatatattttgtgtgtgaatcttatggattgtagatagattgtagattgtctccacaggagctacactttggtgtttttgtttttgctgtacttctcttttcttagaaaaagttaaatgtagactttgtcagagaaactgtctctgtggatgggtaacctagctttttttcctctttgttttgttcctagataggctttgcctctttttcttttcttttttttttaagaccaagtctcggccgggtgcagtggctcacgcctttaaatcccagcactttgggaggccaaggtgggtggatcacgaggtcaggggatcgagaccatcctggctaacacggtgaaatcccgtctctactaaaaatacaaaaaattagccaggtgtggtggcaggcgcctgtagtcccagctactctggaggctgaggcaggagaatggcgtgaatccaggaggtggagcttgcagtgagcagagatccagccactgccctccagcctgggcgacagagtgagactccctctcaaaaaaaaaaaaagaccaagtcccgctctgtcatccaggctggagtgcaatggtgcaatctctgatcactgcaacctccgcctcccaggttcaagtgatcctcctgcctcaccctcccgagtagctgggattacaggcatgcgccaccacacctggctaatttttgtatttttagta

SEQ ID NO: 46579 - DNA, 1168 bp, Homo sapiens
gattgctacagtgcactccagcctgggtgacagagcaataccctgtctctgaaaaaaaagaaaaaaaaaaggcaagagtatgagccttcatcaaatgttggggaatttcatagatattaatgaagaagcataaaggatgatgtacctgtatagcatgaacacaaaggataagcagaaaagaataacaaaagcatttattaagcaaatactagatgccagctataattttaagtgttttccatgtaagtttttcagttgtctttgttttttgagatgtgatcttgctctgtcacccgtgtcacaatcatgactcgctgcagcctcaacctcccaggctcaagcaatcattccacctcagcctccccagtaactggaactacagccaccatgcctggctaattttttaatagtttatgtacagatagggtcttgctatgttgaccaggctggttctgaactccgggactcaagcagtcctcctgcctcagcctcccaaagtgctaggattacaggcgtgagcccatgcctggctgttcggttgtcataataacactaataggccaataatgtcattttttatgaggaaactgaggcacagtgggctggagttactagctcaatatcatacagttactaagtggtagagctaggatttgaatacagggagtctacctccagaacacctgcttttcacggtgacactacactgtccttaaccttgtagtgtacagtaaataaaatcctataagtgacccagaagtagtcgtggaaactaggagaatgcctattttccactaccctcgtttatagtgaatgggagagtaagtagcttcttgtctaggaggattcaggaaccatttcatttaaggcaagagggtagagagggagttttagaaaaggttgaaaagcacaggggaaatgtttaaaatggagtgtgggctccaggagaatggttatctgtgaagtggtggggagagagcaagaagcaaggagtgagaagctagatgacccgagaggcttgcagttatgccagtggctaagggcagcagagattgaagacttgtagaggttaatgggtccgaatgtttcaggcagctgtaggttagagccctaggtggtggcagaggcctgatggtacaaggagactgggcttttcctatcttcctga

SEQ ID NO: 46580 - DNA, 1035 bp, Homo sapiens
gctgtgtcatataatagaaatagcatagactttgaagttgtacaaacctggtggcaggatttgactctcatttattacttgtctgagccatagttctcatatctaatatagggttaaataatacattatttctagtttttgttttttgcttttttttttgtttgtttttttgagacagagtctcacactgtcactcaggctggagtgcagtggcgcgatctccgctcactgcaacctctgcctcccgggttcaagcaattctcctgccccagcctcccaagtagctgggataacaggtgcccaccaccacacccggctaatttttttctatttttaatagagacagggtttcactacgttggccaggctgatcttcaactcctgaccttgtgatctgcccacctcggcctcccaaagtgctgggattacaggcgtgagccacccgcctggcctactcctacttttattgtgtgggttaaatgagacaatacatataatgtacttaatttaattaaaacttagaaccactccccaccctatctctcccacaaacacctacacttacgcttgttgagaagacagattcagggggagagagagaaaataagtacatagtactgtatcataatatgttccctaaaatattcatgttatatattttttattgttcctacagagatttgtgtggagagaagcaaaccataggtgcattactcactaaatattctcattcttcgatgcaaaatggtgttaaagtttataattcgagaagacccatttcttaaaagaacaacggtcttttcttcaggactcaagttgctttataaagttgctggatagaagaaaaataacttgtacttttatttctgacttttagaaacctagtcttctaaggcatttttctcctcatcttaagcattttgaaactactgttatttcttaaatgttataggatgtagctttaaaattatatttgtactatgtacacagtgtaaacaaggacaaaagaattctttcctatattatgtctgaggt

SEQ ID NO: 46581 - DNA, 1052 bp, Homo sapiens
agagtggctgcactattttccattgatgttgaacatcttttcatgggcttattgacgatttgtatatctttggagaaatgcccattcggtttctttgcctgatttttaattatttatctttttattactgagttgtaagcgaattctttagatagtccagatacaagtcctttatcagatatattatttgcaaatattttctcccattttgtgggttgtctttcgactttcttgcttttttcaattggagtaaaatatacataacataaaatttaacatttttggggttgggggcaatggttcacacctgtaatcccagcaatttaggagggcagggtaggaggattgcttcagtccaggagtttgagaccagtctgggcaacatagcaagaatctgtctctacaaaatatttaaaaattagctggggctggctgcacacctgtagtcccaggatgaggtgagaaaatcgcttgagtccaggaggtcagggctgtaagtgagccgtgatcacaccactgcagtccagcctgatggcagagtgagactctgtatttaaaaaaaacaaaaacaaaaacaaaaagaggccaggcggggtggctcacgcctgtaatccaagcactttgggggaccaaggcgggcagatcacctgaggtcgggagttcgagaccagcctgacctacacggagaaaccgtgcctcaactgaaaattcaaaatttgccaggtgtggtggcgcatgcctgtaatcccagctattcaggaggttgaggcaggagaatcgtttgaacctgggaggcagaggttgtggtgagccaagatcgcaccattgcactctagcctgggcaacaagagcgaaactccgtctcaaaaaaaaaaaaaaagaaaaagaagaaaaaataaaatttaccattttaaagtatacagttcagtagcatcaagtacattcatagtggtgtgcagtcattagcactatccatctctagaacttctccatcttctcaaactgaaactctgtacttgttcaacaatcactcccatttcccctgtcccctc

SEQ ID NO: 46582 - DNA, 1031 bp, Homo sapiens
gtattttttgttttgttttgttttgttttgttttgttttgttttgttttgttttagatggagttttgctctttttgcccaggctggggtggtgaaatggcgcgatctcggctcactgcaacctctgcctcccgggttcaagcaattctcctgcctcatcctcccaagtagctgggattacaggagcccgccaccacgcccagctaattttttgtattttttgtagagactgggtttcaccatgttggccaggatggtctcgatctcttgacctcatgatctgcccacctcggcctcccaaagtgctgggaagtaggaccaataatgttaagtgtcacttatcttaatgtagcataaaccatgtgcttcataacttgatgttttgtttcattcacaaccaagtaaatttttcctaccattttataatacaaactaaaatctccgaaaagttttttcctaatgttaagaggtgagaaattactccattttcaagataatataaatgttttgacttctgtcatttctgaattctgaatttgaatctgcttttttgatatgtgcttatttcatcctaatgagtagcagtattttgcttgtttcatctaatgagtagcaggcagtgttttgcatagggatgcgtatggtaaagaatttgctataggaaacagaatgatgtggcatgtggtgtgattttaactgtttttgagcagtcacaagcaccagagaatattttctacaactcagatgaggctttttaaagttctgttttctcactcaaaatgtaatactattttcgaaagttactttgtataaaggcagtttttgctagtgacaagtatctgcaaaatagatagttgttacagaacatttgatagctatggaaagtttagcacaatttagagaatgaattaaggaaagttttatgttagctatttcttagatgattcattaatctcccaagtatattttaagcacataaatgaaaatttaaaactttcgtctttcacttcaaagatcaaagcttgtgtgtgt

SEQ ID NO: 46583 - DNA, 1065 bp, Homo sapiens
atcatcatccaaggatcacttcatgatgaaattgcaagaatttaagaactcctatttctgattgtattgtcactttctttagaaaccataatttctaaaagacacaaaaataatatttatttcatttacaagatacgtttgagtgtagatattttaagtattcacgatagttccgttaaataggaaattatttcatttcagactataaaataaatgagcctagttcccaaaagtgaattggtaagtattcagaagcttgacagtacattttatcaagccgatgggggaaacaggcacacttatacattgttggtggtagcacaacatggtgcatctcatctggaatcctgggaattaattaggtaacatataatgaaaatacatacatcaggagattgatccttgatccagcaatctcatttataaaaatacaccttcaagatacacatgcacatgattattttcactgtattcaataatggtacaataagaaaaacaaataatgcttattcataggaaataaattatcgagtattgtgcaattttttaaaaaaagaatgacagatatttttgtgacttggtaagttgtactttccaggatatattgttaagtgaaaacaaacaaggtaaaaaagaatgtagatggcatactacatttgtatgcatatatacctatgtatgtttacatacacacaagcatatatttatgtgcgctactttttgcgtaaagcacgggaagagaaagttgcaactactagactatgggtacaaaggaatagggaaagaatgagatttttttcagagactatctttaaatttattttttatgttaatcatgctaaaattttatatattagaaaaataaaatgacagcaacagtagaagtgagcacaactagttcccaaatcttgttttccacatgctattccctaccaaaaggaacttagttcttggagaactgattgattcacgatctggagcagagagagaactaaattattatagggtatacacatgcaaaagactattatttctgcatgatttataatagtgaaataatagaaa

SEQ ID NO: 46584 - DNA, 1024 bp, Homo sapiens
tcaccactttgatcattaccacaaccatctcaattttacatgggatgaagaaatttgaggctcagaaaaatgaaaagacctatttgaggtcagtgtatgagtcaggacttttggttgtattttgaaagtagcccaatttgaactggcttaagaaaaaaaaaaaaggaatgtagcagaccaagtccttccctctcgatggcaaggtggtcatcacagatccgtgattccatccaaccccccagtatttacaatgagggggaaaaagtctccttaacaattattcctggaatagaatttctttactctctatcactttctattctggaatgtgcattacactgcattcagtagaaactctgggcctggatctctttggtccaaattgtttcacacctacaaccctcaagccatcaaatcccccagaccacttagaatgagattgaggataaagcctgttaccagaaaagcagggtatggaaatggcagacaaacaacagatatccataagaagcatagttcacaaatgacagcttgggcttgagacaagatggttttaaccaatagttctatcctatggcccgtccttctcctcttctgtttaaatgcattgaatacatgataaatgcgcctggaacaaaatttaaaagatacaaagttatacagtaaaaatctcccttccaattttgtcctcctgtcactcagtttccctcctaattgaactcatctctatacccctccagggatagttatagtttccacatttacaagcatcatatgagttgtttttacatcagtgatatattattctcactgttctgtccggctcttttttcgctccactctgttaggtatttttggctctctgactttaatgacttcaaccacccaggcacaatgacattttcacacaccacttagttttcactcttgagttttttccgttttcctttttctctccttctccctaccctcttcttactgcatttcctcattttacctccttccatatgttcattatgtaatt

SEQ ID NO: 46585 - DNA, 1050 bp, Homo sapiens
atgaaccccaatgtgtaagctccatggcaaatacatagctttacatttttctattaaaacataaaatataccaaagtagatttaacaatgatatgcagtgatttgcattcattacctaatgactaaaaatattctagccaattatagcgctatacagtattttgtaggttaacatcttctctaattacttggaagatacactatgtcttattcaatttggtattgccaatatataattggcatatgattggtgctcagatttatgttaaatgacttaatgaatttttagaaagtgagtggataacaatataaggaaaatagtatttaaagaaaaaatattatatataggagagtgggtgattataaatgtataatcaatagtgaagacataatgaaatggaaactttatgtgccaaagagcattgctataaaccacttggggcaaaaactattggaaatacaaagataaattggtggtaagagtgtgggctttataatcggtcatacctggatttgaatcatggctctgatatttagtagtttggccaattatttatcctttctgaatcttattttcatcatctacaaaaatgagactaacctcattgtgaggattaagtgaggaaatgtaggtaaaagtgaaggagggagagatgtatcctgttctcagtggttatgcagcatttggtcaataaatatccccagagtgagaaccctcttcttgtcattttcacagttctttagtgccagtataatgccttgttctattaaacattcaaatggctgctgagtactgaataattttaaaaagaagagtgccgtaaactgtttccttgcttaaaaacagaaatctaactgtagtggctttacaaattaggggtttgttttcttacataaagctgagacataggtgatcaggtgtggctccatgaatttatgaaggacacaacccccttctctccttcagttcaaccaaccttagcactttctttccatgctccaggtcacagaatggcttctgaaactctagctatcatggccactgctgtg

SEQ ID NO: 46586 - DNA, 1032 bp, Homo sapiens
cattttcccttctaattgagtttatctgaatttcttctcttcttggttaatctagcaagtggcttttcaatttcattaatctcttcaaagaaccagctttttgtttcattgattttttttcttttggtttcaatttcattagattctgctctaatcctttttatttctttttacttgctagctttgggtttggtgtgttctttttttttctacttccttgaggcatgacattagattatcaatttttgatctttcaaactctctggatggcattttgtgctataaactttcttcttagcacgccttttgctatatcccagaggttttgatcatttgtttcactgtgatcattcatttcagaaaattcttaaattttcatctttatttcgttgttaaaacaaaaatcattctggagcagatttgtttaatcactatgtatttgtatggtttgaaggttacttttggaattgatttctaattttattctgctgtgctctgagaagatacttgatactgtttcaataatttaaaatttattgaggcttgttttgtggcctatcatatagtctctcttggagaatgttttgtgtgctgatgagaagaatgtgtattctgaagttcttgggtagtatgttttgtaagggtcttttagatccatttgagctagagtacagtttaagtccagtgtttctttgttgattttctgcctcaatgttctgtctagtgctgtcaatggagtgttgaagtcctccactattattgtgctgctgactatttcttttcatatatctaatagtaactgctttatgaatcttggagcgtcagagttagttgcatatgtatttagaattgctagatcttcttgttgaattgatcattttatcattatgtaatgaccttctttgtcttttccttgtgctgtttttgctttaacatctgttttatctgatataagaattgttactactgcttgattttggtttccatttgcatgaaatatctttttccacccccttaccttgggtccataag

SEQ ID NO: 46587 - DNA, 1026 bp, Homo sapiens
gttgttaagacccagggacaattctacgggctgggtatgaaagggaagtcggctcaggaggaccgagtgagggcaccgaggcgggacgcacgcacccggcgaaggtgcagtgtgggcgcccacggagtgggggagctgggaagaaagggggctgcggtgggctggagagaagcgggacggggaaggcgctcgggaagctgtccccgcggcgtcgtgcgctctggggacagaggaggggaggtctgggcgggcgggtggcgtgtgaccgccgaggctgcggcggctggaacaggtgagcggccgctgggttgtgggtccccgcccttcaccgccagcgtgcctcctcccacggactctctccagcgctgagctgctccgcggctccccttgctttggggttttgcaactggctgctggcttttttcccctcccctgtctcggtctctccttcttcttttaggttgctccaccccggtcaggatcaggcgagggggaaccagcctgagtgcagctgccaactcccgccgagtgcgtctgcgaactcccggagcggagtcccgcgtgccgccacctccccgcgggacgcactctcctcgctcccccgggccccgcgtcctccccccggccacccttccccacttttccccccttttccaatcacatggcattttaagaatgccggaaagatggcggtagcggcggcggcggcggcggctgggccggctggcgcgggaggcggccgggcgcagcggagcgggctgctggaagttttggtgcgggatcgctggcacaaagttctggtgaacttgagcgaggacgccctggttctgagcagcgaggagggcgctgcggcgtacaacggcatcgggaccgccaccaatggctcgttctgcaggggcgccggggctgggcacccgggcgcgggcggcgcgcagcccccggactcgcccgccggggtccgcaccgctttcaccgacctgcccgagcaggtgcccgagtccatctcgaaccagaagcgtggcgtga

SEQ ID NO: 46588 - DNA, 1056 bp, Homo sapiens
taaacagtgtgatgtgtgttatcctaggaaatgagagttggcaaacaacttctcattttgaatagagtttgtgtgtacctctccatatttaatttatatgataaaataggtggggagagtctgaaccttaactgtcatgttttgttgttcatctgtggccacaataaagtttacttgtaaaattttagaggccattactccaattatgttgcacgtacactcattgtacaggcgtggagactcattgtatgtataagaatattctgacagtgagtgacccggagtctctggtgtaccctcttaccagtcagctgcctgcgagcagtcattttttcctaaaggtttacaagtatttagaactcttcagttcagggcaaaatgttcatgaagttattcctcttaaacatggttaggaagctgatgacgttattgattttgtctggattatgtttctggaataattttaccaaaacaagctatttgagttttgacttgacaaggcaaaacatgacagtggattctctttacaaatggaaaaaaaaaatccttattttgtataaaggacttccctttttgtaaactaatcctttttattggtaaaaattgtaaattaaaatgtgcaacttgaaggttgtctgtgttaagtttccatgtccctgctctgctgtctcttagatatcacataatttgtgtaaccaattatctcttgaagagcatttaggaagtacccagtattttttgctggattaattcctggatgcagaattcctgggttttcattttaatgaaggaggatgcttgctaactttgagtgaggagtcatatctgattgtagcatgctttatggcatttttatagcttctacccatggatctgagccctggaactttataaaattagtttaatcctgtttcctcataaggcacacacagactagatagcaggtgccatgacattcctgagcccttttttttttttttcctcgagggtgaacatcccagtctgtatcttgggccttcgacaggccaacttcactcatcacaaggtgaggtgaca

SEQ ID NO: 46589 - DNA, 1034 bp, Homo sapiens
cttctcttctcccctttccgtctgaataatgggttttagcgggtcctagtctgctggcattgagctggggctgggtcaccaaacccttcccaaaaggacccttatctctttcttgcacacatgcctctctcccacttttcccaacccccacatttgcaactagaagaggttgcccataaaattgctctgcccttgacaggttctgttatttattgacttttgccaaggcttggtcacaacaatcatattcacgtaattttccccctttggtggcagaactgtagcaatagggggagaagacaagcagcggatgaagcgttttctcagcttttggaattgcttcgacctgacatccgttgtaaccgtttgccacttcttcagatatttttataaaaaagtaccactgagtcagtgagggccacagattggtattaatgagatacgagggttgttgctgggtgtttgtttcctgagctaagtgatcaagactgtagtggagttgcagctaacatgggttaggtttaaaccatgggggatgcaacccctttgcgtttcatatgtaggcctactggctttgtgtagctggagtagttgggttgctttgtgttaggaggatccagatcatgttggctacagggagatgctctctttgagaggctcctgggcattgattccatttcaatctcattctggatatgtgttcattgagtaaaggaggagagaccctcatacgctatttaaatgtcacttttttgcctatcccccgttttttggtcatgtttcaattaattgtgaggaaggcgcagctcctctctgcacgtagatcattttttaaagctaatgtaagcacatctaagggaataacatgatttaaggttgaaatggctttagaatcatttgggtttgagggtgtgttattttgagtcatgaatgtacaagctctgtgaatcagaccagcttaaatacccacacctttttttcgtaggtgggcttttcctatcagagcttggctcataaccaaataaagttttttg

SEQ ID NO: 46590 - DNA, 1051 bp, Homo sapiens
agctaaatctttgaagatcttacatgagctatctaaatcattgctttccttgctcatttctggcctctttttggtgtttgaacattgacaataatggttgtctagtattttctaggcatgtgacaacagtggttgtctagtattttctaggcatgtatatggatgttttttaaaaattgagattatatggtaatgctttgttgcttactttttgtaaataacagagcttgactcttacatttctgaatccatctaaaataatatagttttgttgtattttattataggattttgtaatatttattgtatgataaataataggatcaatttataattctgatcagttgagtttccctttacccaggtgaggattgttgtgaagaggaggggtaaaaagcatagtagatgtacaccttttttaagtgcctctggagcctggtttttacatgtcgacttcttttgcagttgctgatgattcctctgatcatgtcagtactttatgtctgggcccagctgaacagagacatgattgtatcattttggtttggaacacgatttaaggtactttgccttggttggaaaagtgtccttttcatttgtctgcagaaatccctcttcagtccagagatgtactttctgactcatccagaaggggtcactgcagagcagtgtaccataggcaagcccctttctgccctcctcaatcccagctctatttaattagccagcctggagtccgttgctggcctttgtttcttcactccctctgtacctcgggcccctcaaggttatgtccctgagtgatcttatgtgtctgtgttagagagaaggagagataactcatgtgaaaccctgctttaaaaatctgttcttatccctccctcgttccctgttatttgctttatactgtagctgaaacagattgtttttgcccccaaacacttctctttgtacattctttcacaattttccacctgtaacatcttgattctcttctttgtataaatcctacccattcttaatttgagttggaactgaacatatttcctga

SEQ ID NO: 46591 - DNA, 1748 bp, Homo sapiens
agaggccgaagggggtggatcacttgaggtcaggagttcgagaccagcctggccaacatggcaaaaccctgtctttactttatgcaaaaattagctgggtgtggtggcaggcacccgtcatcccagctactccggaggctgaggcaggaggattgcttgaaccagggaggcagaggttgcggtgagctgagatcgcaccattgcactccagcctgggcgacgagagcgaaactctgtctcaaaaaaaaaaaaagtttttgaacaatataaagccctatagactggttacagaagaagggtagcatttgttacagatgtagtctatacatgttgttttccttataaatgacatgatttgactttagaaaagtcattactcaaacgtgatttaacatctgtgatggccgaggagctgtgctctgtactaggaatttacattgaacaaaagctcttatggagctaaatggtctgttgggaaggacagatgctgaacaatagtaacaataaaacgagatgtgttctgtctttgggaaggtacagtgtcagcaaatcagtcgtatggggctttatctcctatcttttcactcaatgtgggaatatttagagctgcccgcaggccttcacttgctggtgtacagtttcctggggccgtacaccaggtagttttgctcatgtttcatgctcagtgtggttctgtgagggagcctgatctggacgcttgcaggccaggctttccttagacctcacatcaacttgaaggtaatttgagtctgccatctgctctccgcaaacttcaacttacaaaaagcaggcctgtttttactaacccagaggacatttgccatatggcaagttaggcaagagatgttggcgctggttaaggagatttgaaaaggattttctgatcaaaaggaaactaagcaaccccttttggccaaaaattataattgaccttggtaatggttaccagggaaggcatttggattcaattagaatgcgtcatgaagcatggagagcttcagggctatcctgtttaaaatgtctaagccaaataaaatttggaagtggagtttgttcaaatcctcaaggaaattaccatttggatttttagaaagccttgaatattacaatggaatcattaggccaggatctaagaaaagtggctgggtctttcagatacctggctgaagacagtaaagattataataaaaattggaaataaatggatatttatgtttttgatgctgaacatttggcaggccaccatctaggaattgttaagttattatgacattaggatgtttgggaatggctggtgactctttctctaggtagcatatatctctctgggtttacggtttcaaacatgagatatattgaaatatatttaggtcactcgtatagctactgaaagatacttctaatttataacatatacaacttggttttttaggcattctcattttatatggaaaatgctttgaagtttaaacttcttaaccttttttttttctccttaggaaaataaagcaaccaacacagaccatttaaccacggtactctacctccagcttgctatttgttcaagtttgcagaacttggagaaaacaattttctgcctgcagaaactgatttctttgcatccttttaatccttggaactggggcaaattggcagaggcttacctgaatctggggccagctctttcagcagcacttgcgtcatctcagaaacagcacagtttcacc

SEQ ID NO: 46592 - DNA, 1071 bp, Homo sapiens
gtttcggtggctcagagaaggatctgttgccaatcagccgatgccaggtctccggtgctggggatggttactaggcaggagaaacaccagtcagaaaaccctggactttcagaactgtgcatcaggcgtcctggcaacctgttgggcaggactgtcaggtggaaagcgggctcgtggggttcgcccctttctgtcggcttcacacatgatctcagcggaccttgcgtgtctgcacggcattctcatttcctggtaagctgtgttttgttttgttttttaaaatttcttctctacctgaggaccctcgccttttgttactagctctggcccatatctgtttttttgtgacggtggttactgtcttttcacattctgtagggggacctgtcgcagtatgtaacattgaacaaaatagacagcaagtcccggggtggccatcaagattcgaacattttctgttcacaatttctgctgaaattcattcacctcttttcatgatttttggataaaatttatagtaggacttatttcttaaataattacaacattttcttatagtggttggtattcctgtgtggtaactgtggtaagaaaatggctttctggtagtaagtgactccttttcatttatccactcagcactcaacaaacatttcagtcctactattttcctggttctgggttcgatgctaaggagacaaacaatatatcgtgtacatgcagtgctcatctagtgtctggtcggtttagccagcgcacatatacatcagctctttttttctttttgagatggagtcttgctctgttgcccaggctggagtgcagtggtgcgatcttggctcactgcagcctcctcctcccaggttcaagcaattcacctgtctcagccacccaagtagctgggattataggcatgtgtcaccacacctggctacatttttttttgtttttttgtttttgtttttgtttttttgttttttagatggagtctcgcactgtcgcccaggctggagtgcagtggcgcgatcttggctcactgcaacctccgcctcctgggttcaagcgattcac

SEQ ID NO: 46593 - DNA, 1071 bp, Homo sapiens; identical to SEQ ID NO: 46592

SEQ ID NO: 46594 - DNA, 1071 bp, Homo sapiens; identical to SEQ ID NO: 46592

SEQ ID NO: 46595 - DNA, 1071 bp, Homo sapiens; identical to SEQ ID NO: 46592

SEQ ID NO: 46596 - DNA, 1033 bp, Homo sapiens
aatgttagtcttagaattttgagatttggtgttctccaggtcgaatgaatgctccctgatctagcctcccacggtatatttctgtgtcttttctttcataaatgcgtgaatgactccggtctttgttattggtggtagtgtctcttgtccggaagcacggagagtacgcattcatttctgtatttcccaagtttcagccacataatgaccgaaacttaacaagttacttaacctctccaaactccaatatcttcaaaataggatttgcaaaatgggaatcactttggctttcataaggtggttgttagccgaaaagaaaaaatgtgcttaacacagtgacgggaatgcacagtggttgacaattggtacttgcaccgggcttagtggctcacgcctataatcccagcactttgggagaacgaggtgggcggatcgcttgagatcaggttcgagaccagcctgggcaacgtagggaaacccagtctccacaaaaaatacacaagttagacggtcatggtggcgcgcgcctgtagccccagctacttgggggactgaggcgggatgataggttgagtctgggagttcgaggctgcagtgagccatgatctcaccactgcactccaacctgggcgacagagcgagaccctgtctcgaaattattttatttattttattttattttattttttattttgagacgaagtttcactcttgttgcctaggctggagtgcaatgatgcgatcttggctcaccgcaacctccgcctcccgggttcaagcgattctcctgcctcagcctaccgagtagctgggattacaggcgcgcgccactacggccggctaatttttgtattttcagtacagacctggttactcaatgttggtcaggctggtctcgaactcccgacctcaagtgatccgcccaccttggcctcccaaagtgctgggattacaggcttgagccaccgcgcccggcctcttattttaatttttaaaaaggtacctgcgagttttaaacagctactctggggcc

SEQ ID NO: 46597 - DNA, 1040 bp, Homo sapiens
tattacataaagatgataaatgtttataagcaaatctagcatatgaagaacatatacatagatgagttgcacacaaagcctagtgtattatggaagacatatgtggcaggtaatctcaagagaatacaaaagatgtattttcacttttatttctaaaagtagtaaaaattaaaatatggttttctttaaattttcagttttttatgatgtttttcttttttagctgcctaaaacgttgaaggagaatcaattcttcaactcaagatgtctgatttactgtgaatttgcccaatctttgatgacattgaaaacgttttggggcatacacactcaaaaagcaggatccaatacccaaaagaaatggaacttaatgttgtgccaaagttaaactactgcagttggtggaagttctgcaatgtaaatagaacactaattaaaaaacaacttgtaaaaatgcaatttaaattttaatacagtacatttttcttctaatatgatggagacattctgaatcttagactttctgagggggtttaatgaccactagagcttgtcctcatattcagtccagtttaatactgtatgtctagtaagatgggctatatattgcctctattctttgagatgtgattaagcttagaactttgaccaaaaattttacagtaaaaattgttagaaatgggtaaaaaaaaaaaaaaaaaaaaaaccctgatttattactatgtcttatttatcagaccctgcactaagattaaaagttgtgcatgggcttatacaatttcaaatgtaaaaacagcctatttatatatgttgaaacaataagattttatggtttcactggcccttaataattggatccttcattaaacacatccatgaataccactgtttctactgttacttgttccattagaagctgatttgctttttattaaactgcaggaaattaattctgaagaaggaaaagaaactgacatggtaatttggatagggtgaagctttgaaataaatactgcaccaaaaatgtgaaaaagaatcac

SEQ ID NO: 46598 - DNA, 1030 bp, Homo sapiens
gggcttgctagaacagacatagttagttggtttggggacacccgttatgcttggaagaatggaaacttgaaatggtactactactatcagagcgccaattcaagtagtatgaatggtctgtcttcccttaggaaaagagggagagggagacccaaaggacggggaagaggaagaccgcgtgggcggcctagaggaagcaaaagaattaacaactgggacaggggaccatcactcataaaatttaaaactggaactgcaatacttaaggattattacctgaagcacaagtttcttaatgagcaagaccttgatgaacttgttaacaaatcacatatgggctatgagcaggtcagagagtggtttgcagaaagacagagaagatcagaattaggtatagaattatttgaggaaaatgaggaggaagatgaagttattgatgaccaggaagaggatgaagaagaaacagatgatagtgacacttgggaacctccacgacatgtgaaacggaagctgtctaaatcagatgactgaaatgtaagttaagaaaatttttaatctgcgtatatgttcatcaaccacatacattttgaacagtcaccttgttgtatcagtcatcttcatttttgatattttctgaagtagtttttcttttccctaataagactaggtaccactagtatagctaagagataaatgattatcatgtgtagttttattattattatgtagagtttaatgtcttaattattatttttcatatgaattgggttttttttactttgttttgaaggaaagttacccaatctctatgaagggagactggcaggcaggttgaggggattcacaaacaaatactaaagataactaaaatgtattttattgcaatgcccccttcactaaagcttcattttttgcctatttaaggaaataattcaaaaatgaaaactaaaaagaaggggaaaagtacaccaaaggaaagacttaccacagggttgaggattgtgcagttttaggaaactaggtgaaaatg

SEQ ID NO: 46599 - DNA, 1022 bp, Homo sapiens
tgctaaaaaaaagtgagagaatttataatattaaaaaatgttatttttttctggaaagaatttttcagggactgaaaatagcatcaattaggcacctgttttgtatcaaagtaagtgaaggaagcatttttacttcctctgatgtggatactactatttctttttcccccagggaagccttctctgcttcttttctagaagcctcctgcagtgtactgatatctttcttactgcactgatcatagttattctaagtaattgtttactgcttgctttccttgcttcactgctggtacctgaaaaaccagagactgcctgtcttggtcaccattgcatcattattgcctttcatgtggttgacattcaacaaatttgttgaattgaagaatcttgagaaaattgaggttgaattgaatagctcttccaggcacctaactactaattgacagaggtgactgcaaaacctgtggctttaccctattcacaatgactttatgaattaattactctgggcctgggattcttcttccataaaaatggggcagttgtactaagattaagatccttgtttcctccaaacttatgactttataataataattccgaggatacctttgtttgccctttggtctatttttagactatacacattatgcagaattgagcttttggaccaaatcttgaaactcttttgggacttctcagtctctttttagaaatatgttaaataatacactgaccttacttttgttagcaaaatcatggggacctgacagtggattatagcaagcaaatagtcttttttttgagacagagtctctctctgtcacccaggctggaatgcagtggtgcgatcttggctcactgcatcctccacctcccggattcaagtgattctcctgcctcagcctcctgagtagctgggattacaggcgcccaccaccatgcccagctaatttttgtatttttagtagagatggggtttcaccatgttggccaggctggtctcgaactcctgacct

SEQ ID NO: 46600 - DNA, 1045 bp, Homo sapiens
ttaccatcgaaagtaatctatagtaaatcaagcacaattgtttttatagctcttctataaatgagtgtttaatgaagtaaaatgtatgtaataatacatagtatagttatatttaaagattttttttttttgagacggagtcttcttctgtcgcccaggctggagtgcagtggcgcgatctcggctcactgcaacctctgcctcctgggttcaagtgattctcctgcctcagtctcccaagcagctgggattacaggcacccatcaccacactcagctaatttttgtatttttttagtagaggcagggttttaccacgttgaccaggttggtctcgaacttctgacctcaattgatctgcccactttggcctcccaaagtgctggaattacagatgtgagccaccatgcctggcctaaagatactttttagcaaacattattggggtcctaataagtattttgttgggccctgggaatatagtggatagctaagtagatactctttctgatcataaaagaagaacttgaataagaactctcaaactttttagattgtgataaaacacattttgctttcattaaatgcttttctgtagagaactattacctgtaaaattgtaaaaattgtaattgttttgatgagttcagaatcataagttgattgatgggtatcctaccctcaggagaagatccagtatacagatagatctacggaaactggctagtctagatctacaccctggagattgtgtttgagtggtcttgagagctcttagagccaatctgacttctcagagctccaaaaactatacctgaatgctacatactgagggattcttgcttccctggaaaatcctttttttttttttttttttactttgatatttccttccttccttcttccaagcctcccttcccctccactcctctcccctccccttcccgcttctcttccttctctttcttccttccttcctactttcctctcttcctccctccctccctttcttttctttctttttttttttttaaacaaatttgcat

SEQ ID NO: 46601 - DNA, 1045 bp, Homo sapiens; identical to SEQ ID NO: 46600

SEQ ID NO: 46602 - DNA, 1045 bp, Homo sapiens; identical to SEQ ID NO: 46600

SEQ ID NO: 46603 - DNA, 1045 bp, Homo sapiens; identical to SEQ ID NO: 46600

SEQ ID NO: 46604 - DNA, 1031 bp, Homo sapiens
aaaggtatcctctgacatttgattatctttgaccacaatttcttagatgctttcacttttattatttttattcctgtttgtatattcactttaatacttgattttctattgtcttgagactattttttacagttttcttgagacttatctctcaggtcatgattgtaggttaccagcaatctttaaaaacatttgctgtggatgtaaatttgtgttgtcaaattcctaatttaattttttaagaacttgatgtttctaaatgttttaacattttatttttatttttacattttaactttgaaaataccttaattgtataaaatcacctttattttttttaacacggtggataccttttgttttaatatgacctaattctttgtttgtactgtttaggcattccgtgatttttgtggatttgtaacttctagttgaatacaaacgtgttaaagtattttcagctggctaaacagaactcttgactcagagagaagtgaaactaaatagaatacagagtcccaaacattctcggtatatatacaaatgcagattccaagggattctcagtgtgtatatttttgctacctaagaacagttttatttttgatgctacatcaaaattaacatgatccctaaaaactatagtatcttctaaatgctcttttttttttttttttgagacagagttgtgctcttatcatccaggctggagtgcaatggcgcaatctcggcttactgcaaccttcttctcccaggttcaagcgattctcctgcctcaacctcccgagtagctggaattataagtgcacgccacgacgccgggctaatttttgtatttttagtagagacagggtttcaccatgttggccaggctggtctcaaactcctgacctcaggtgatccacccgcctcggcctcccaaagtgctgggattacatgcgtgagccacctcactcagccctaaatgctcttatttgacccagaattgttgtaaaaaacaaagtttgtggccaggcacagtgggtcatgcc

SEQ ID NO: 46605 - DNA, 1031 bp, Homo sapiens; identical to SEQ ID NO: 46604

SEQ ID NO: 46606 - DNA, 1031 bp, Homo sapiens; identical to SEQ ID NO: 46604

SEQ ID NO: 46607 - DNA, 1031 bp, Homo sapiens; identical to SEQ ID NO: 46604

SEQ ID NO: 46608 - DNA, 1050 bp, Homo sapiens
attacaggcatgcgccaccacgcccagctaattttgtatttttagtagagacggggtttctccttgttggtcagactggtctcaaactcccaacctcaggtgatccgccggccttggcctcccgaagtgctgggattacaggtgtgagccaccgcgcccggccggtatactcattttaaagaactcccaatttctgcatctcaattttcacactagagacggcatatattcacgttttgaaattttattcaaaatggtctaatagttatttagttgttctatatgatataaatagagtttttttaatgtgtagtttttgtgtttactaccaatattaggattggtatttaaatggttcttttaaagttttgatgagggaataaactttttttttcaaaattacatttatttattaaaagctaaggcattaaattgtaaaaatttcctgactaaggctaaattatatctagaataataaaatatgacttttttgtaggagaagacagactgctgctttggacctgttggtaatgatggcctgagctaaacatctaactagaagggatacccttccatttcaaagaacagaatgctaaggaagctgtggcaagtatgtgtttcattgttttggtatggtaaaactcagatactgaatgtactcactttagatcccatgatactatatttgtctaaagtttttaaaagctttccttaaaaagcagcagacatatgcttaacacttttttttaatatactttcaaattttaagagctataagtataggactgctttaatttaaaaggagacggcatcatacttcataataaatcttgtatatttataattgattttaaaattagtatttgataaaatctgctgtgtcaggcactataccaagtgctgtgataacagaggtaaacaagacaaaatgtacctttggtatggggaaattgatctagaaattttgctatgcttttgcctatatccagaaaaatgcttcaggatgtacaagaacaaattctgaaactgtattttcaaaacgtaggctac

SEQ ID NO: 46609 - DNA, 1048 bp, Homo sapiens
gtaccttgattaatactatttgaatttaacataagatgaatgcaccccagactcatttcaaagttatttaaataatgaagtcctacaggtaaaatctatgtggcagtcttaaatactgaactgaatgtttattttcactatcaaatatatacctgaatattaatattcttaaggttgtttactgaaaaagtaatgaaatgtttctttagcttattccatattgaaacttactatttgctcttcctcccctttatctagaaaatggagcaagaggtagaaaacttcagttgttccagatgatgatgtcatggtatcgagtattctttatattcagttcctatttaagtcatttttgtcatgtccgcctaattgatgtagtatgaaaccctgcatctttaaggaaaagattaaaatagtaaaataaaagtatttaaactttcctgatatttatgtacatattaagataaatgtcatgtgtaagataactgataaatattggaactttgctagaacaagaccctgtagtaatagtaataatagttgaagtttggccaactcttaataaagttattttggtaactaatgttttatggcacttaagaataattagcagcgttaaattttgtttgtattaagcacttttaattttatccttcctaaaaatagtttattgtatctgacaagaaacttacttaaccattgtgtccttcccatcttttttgtcatctttgttttcttcaaatgccctcctcccatctgccttgagattccctcgtcttcacttaaaagccagagtgcaagtcatgatttgcgggagggctcttgaaccacttctggctgcaccacaattctgtacttgagtatcacagtcattgtttttgagacaaacatttttataattctaatttgggttaataaagattttaaatatttcttggtttacttttgtaattatatacacaacaaatgtattaataactaccttgttaaacaccttttaatagcacaaggtttttatatttgcaagctgttgatatctttctaaaac

SEQ ID NO: 46610 - DNA, 1089 bp, Homo sapiens
agtatgtaaattgaaatcataatgcttttactctgcagattactaatccccaaacactggcttgtgactagtagcattctggctacatgggatttacatgaaaaagtaaaactttttttcctccaagcttccctttactgttcttctccttcccctgttccaaattaagactaggtcaggcacagtggctcacgcctgtaatcccagcactttgggaggctgaggtgggcggatcacctgaggtcaggagttcgagaccagcctggccaacagtgtgaaaccctgtctttactaaaaataaaaaattaggctgggcgcagtgactcatgcctgtaatcctagcactttgggaggctgaggtgggcggatcacgaggtcaggagattgagaccatcctggctaacacggtgaaaccccatctctactaaaaatacaaaaacaaaattagctgggcgtggtggctggtgcctgtagtcccagctactcgggaggctgagacaggagaatggcgtgaacccaggaggtggagcttgcagtgagccgaggttgtgccactgcactccagcctgggcgatagagactctgtctcaaaaaaaaaataaataaataaataatagataaaacaaaaaattagttaggtgtggtggtgggcacctgtattcccagcctactggggaggctgagacaggagaatcacttgaacccagaggtggaggttgcagtaagccgagatcgtgccttccagcctggatgacaagagcaaaactctgtctccaaaaaaaaaaaaaaaaaaagaattattactattattttttaatataaaatagatttttaattcttaaaaaaaaaatagacaaagtctcactgtgttgcccagtctggtctcgaactcctgagctcaagtaatcctcccacctcagcctcccaaaatgctaggattataggcatgagccaccatgcctggcccaaaattaagaattatatccaaggatctgtggtaggaatcagagagaaaatagctaagtgattctgacagctgtcaggttatctgttgctcattctgttcccctgcctgttcccctaaattca

SEQ ID NO: 46611 - DNA, 1049 bp, Homo sapiens
ctccagcctgggcaacagagtgagactccgtctcaaaaaaaaaaaaaaaaaaaatttcaagataaaatcaaaattttttaccattttatggtctgggccttacccacttctccaccttctcacagtatgctctattcttgtttctgtattttaatcatacaaaatactgtggtttctcactatttatcctttcatatatcagggtttttcactctttgaatttcagaaaatggttgaatgttctttcatcatttttctttaaatttcttgaagctcagttgaagaggaaaattcgcaaaaagtcaaactggtacttaggcaccataaaaaagcgaaggaagatttcacaggcaaaggatgatagccagaatgccatagatcacaaaattgagagtgatacagaggaaactcaagacacaagtgtagatcataatgagaccggaaacacaggagagtcttcggtggaagaaaatgaaaaacagcaaaatgcctctgaaagcaaactggaattgagaaataattcaaatacttgtaatatagagaatgagcttgaagactctaggaagactacagcatgtacagaattgagagacaagattgcttgtaatggagatgcttctagctctcagataatacatatttctgatgaaaatgaaggaaaaggtacgtctttttcaattaaaataatttactgattttaaaagatatttcaaagtttctaaacacctaattgcatcttagtttattgctttttgcttgcctttcagagagcagatgttagttaattagaaaacaatagcattatctttactattgagctagtaaggatagttacaagctgtggcatcaaacagacctagatttgagcctccagttcactacttagtagcttgtgacctttggcaagatacttaacttgtcagcctgtttgcttatctgcaaaattggggtagataagatagttgcttggtaatgaggcatttttaagattaaatgtaacaaactaaagtatatgataccctttcatttttaagcaagataagagtctg

SEQ ID NO: 46612 - DNA, 1029 bp, Homo sapiens
aggaattgtaagagctactatcttagcctaatatgctgagtttatttttggtatattattaaaagggggaaattaaaaattacattttttactcacttcatagatcgtcttattaggcatagagcctgtgctttaagagatactgcctatgccataattaaagaagaacttgatgaagactttgagcagctctgtgaagaaattcaggaatctagaaagaaaagaggtaggaaagtgatttggttgatttgtaccaacctaatattatcaatgaatttcagaatatatgaatttcagaagcatctgaaaaggatgcttcagatgtattttgtacttttagttaatccttcatgtaattttgaaatctggaaatccttttgacatcccacatatctatttataaggttgtagctcctccaaatatgccccgtcttactaccatgtgatgccaaagcaaaattccactcttgttggtgataaaagatcagacccagagcagaatgaaaagctaaagacaccgagtactcctgtggcttgcagcactcctggtaagtactcaagtagttttcatttatgaaattataactttattcttttctaatgccattaactttctcccttattttcctttatttgtgttaatgcagtgaattacattgattttgttactattaagacaactttgcattcttgaaataaatccaagtttataatgtaccacttgcaacccagaagtcaccatctaattgtggactgtcttgatttgaaactgatgtctgtaaattctggtctatttcttactcccccttattcttagaaggtaactccacgttacctattcaaagcctgtagggttttctaaggcctgccttccttggcagacttctaattccaatttttgttctttaagcccctttgtcagactgcttagcttctcagcctctgttattcacttgttttcccagattttagcactgtaattcctcactaccctttttttttttttttttttttttgagacggagtctc

SEQ ID NO: 46613 - DNA, 1162 bp, Homo sapiens
actctgttgcccaggctggagtgcagtgacacaaattatctttcactgcaaccttgtggagatagggtcttgctgtgttgcccagcctagtctcaaactcttggcctcaagcaatcttcctgtctcagcctcccaaagtgctggggattacaggcatgatattattatgacctacacaattggaagagacctggagagccacgtcttaagttgctctgaaggatgggtggcaattggatgaggaaagaatataggctgttactggagaatacagctgcccaagaataagaaacaattactggaggatacagctgcccaaggaatagaaacaaatacaaaacaaaaacagccttaaatcaagtgaaaggttttatgttaaatatattatcataatctcttacgtatttattctctatctcctatattgcctggcatcgaaacttgactcacatgttatgtttagagttaattttgtgatttgatcatttgcttgaattttaggttcctgattatgtcactgtaataaagcaaccaatggacctttcatctgtaatcagtaaaattgatctacacaagtatctgactgtgaaagactatttgagagatattgatctaatctgtagtaatgccttagaatacaatccagatagagatcctggaggtgagcattagtgaattttttttcagggggttgagttggggggcagctaacacttagggttgatttttgtgtcaggtgctatattataaacataatcaaaatactatttaatcctcacaacaaccattttacaaatggtaaaaatgaagtttagaaaggttaaaaacattgctgaaggtcacacttccaggaagggacagagtgagaatttgaatgcaggtttctttcattcccaaatccctgtttattaacaattacatgatagatcctctaatgagacacaaaatggcttgtatactttgtatatcagtgctcttcctcaaagtggaaaagtaggcactctgtaatgaaatagtttttaaaatattctattagttaagaccattataatttttattacaaaagcaatataatatagggcttactagtagtaatatttttaaaaatctagtcccccatttcctttctccaaaggcagacactgttaagtttgaggatatc

SEQ ID NO: 46614 - DNA, 1054 bp, Homo sapiens
ctgctccgagtgtcagtgtgttgtaaagcatggtttaaaaatcttggttacagaagatttaactcatgatagaaacaaatgtctgcgggtcagtgatgttaagccactagtaagaggagggctatggtggggaatgtggctgaatgtcctatcacaagagcatattcagttgcttttatctctgacctgttactgatgtgcagaagcttacccagacttgaaaaatcgattttttccctcagattttatgttcaaattgtcaagtatcttaaattttaccagctaatttggatgcttttaagacattgcctgcgctaaacaaaatctaacttagggcattactactagtttaggattctaatactagaccaatctccccattttaaagatgggtaaattgaaccctcaacccccatgattagttgcttatccaagggagcacttttacaagtgctattgtcccaacctgaatctaaattgcttttagtcccaattcatttcagttttttagaacttctttttaaatggtttcatgaatgatgtgtaattgattgattaatttggaatatcctaaaggaaatatttgcatactttcatatatgctagtagtattgttttatattgtagataatgtagatgaataagatatagtgtgtgattgataggtgggttttggcttttctaacatctaacaagatttgctatattctaatggccttttaaacttgatgataaacaattttgcttattgctgtgagtaaattaaaatatatgttaagtaccatggtaaaagtagttttgtctctgcatgtcctattagtaatcagataaactttttatatgtgacgcatttcattatcagtcacactatattcattgtgctaacaggaaggaacatatttaacaatacttccatcacttcataatcaagtaagttgagtacttactgtgttttgggatacttctaaaggtattggaggaattttggcaaaaaaattacagagtaattgtagcaaaactgtgccatctcaaatatatatatatatatatatat

SEQ ID NO: 46615 - DNA, 1076 bp, Homo sapiens
attctgtttatgtggtgtatcacatttattgacttgagtatgttaaaccatccctgcatccctggtatgaaacctccttgatcatagtagattatcttttttgatacgttgttggattcgattagctagtattttgttaaggattttagcatctatgttcgcagggatgttggtctatagttttcttttttggttatgtcctttcctagttttggtattagggtgatactgacttcatagaatgatttggggaggattccctctttctctaccttgtggaatagtgtttacaatgtttttaaactgaagtaatgacctttctacagtatagagtaattgctaagaacctgggcccatgactaggactgtctaggcttggagctcagctctactagttattagcggcctttggcaagttacttaactctgtttcagttttttttttatctgtaaagtgaggatagtaggacctatctcatagtattgtgagaattagatgagttaatacatgtaaagcatttaaaatagtgtctgccatacattaagtgcggtatgtatttgctattataactgtacttcgatgtttaaaaataatctccattttgcaaatcaaatgtcagaaatttcatgttggtccacaggttgtgttattgtttgcttttaactttattggtttatgaaattaaaaaactggaaatcatcagtatagtaatgtatagaatgcagattttttgaataaacatataggtttgaattctgacactatcaatgacagattctgatattttgagtaaattatttaacctggaagccacactggccctaactgtaaattgagcctactaataatccacttttccaaaattttaattaagattaaatactatatcaagtacatggtacagaaagcagtcagttaatgttagtcttttttattaattgggaggttagtctgaattctgtgactacatagtgagttcacataaaattatgtgaatacattaaagtctaatattcatggtaataatgaataagttagtttttcatataaagttgcagacttgtactggatataa

SEQ ID NO: 46616 - DNA, 1054 bp, Homo sapiens
aaccagcccaaacatttaatgcattctactacgtaaagcgtacaggagaatgattatcagaggtctttgtgacaattctgtatatgtctctattcttggaaagaaattttaaaatatttttatacaagtaaatcaatgcttcttataaaaatatttaaaaccttagtgccaaaagtttgcaatggaagaaaaataaagtttttaaaattctgctactcttttacaattttcacttacatttatatcttttttttaaagcactgctgaagctgtacttcaaaaaatggatgacatgaagaagatgcgtagacagcgaatgagagaacttgaagacttgggagtgtttaatgaaacagaagaagtaaatatattcttccattaagggaatgatttaatatccagtttaatttttttatagtacctaatccatttttcattaaatatctactttttccagcatttatttgatcagtcattagttactgctggaaatgtaagagtttatggctgtaaatatcttaattttaaacaagattggaggatccaacttaatttttttaataaatagattccaaatgttaatggcttttatttaaacatttttagagcaatcttaatatgtacacaagaggaaaacagaaagatattcaaagaactgatgaagaaacaactgataatcaagaaggcagtgtgggttagtctcttctcttgttctgtcttctgggattgaatttaagaactttttatttagtagaaaatagcctttttagctagaaggtgtgacatttatggtagtttgtgagagatcagaggattggtaacttaaaagtggggaaaggggagagcttaagaggatagtatgttttgtttgggaaagtaactgaaatcaacaatctaaagccaataatattggtctgcttatgtaatacatccactatggacaacacactgtatatctcttttttagtttaaaggtgattaaagttatgttttgctattccatttaggacttaattaccataatctattagaacttatcttaagtgaaaatcag

SEQ ID NO: 46617 - DNA, 1128 bp, Homo sapiens
agtaactgtgtcatgagggtacgatctacatacttacttacttgatcctggggttcttaactagggtccagtgattaggtatagtcttcgcagagtgtacacaaaacctctgaagtaatgtttaaacttgcgtataccgtagctttcatcagatttgcagcggttgacaaactccagctgcatatttttgtaaatagtttccttggaacactgccatgcccattcattttgtatgtggctcctttcaccctataatgttaggtagctgtgacagaggagactgtatggcttccaagcttaaaatatttagtgcatagcaattgaaggaaaagtttaccaacccttggaaggttgctttcctcctgcaggcaaaaagaagacagtaggggtgggtggttcagaaaaatagtgctttagtcattctgttcctagcatctgaaaggggcctggtttataaaatgtatagacctacatggtatgaagggaggagctcctttatgagaaaagtctgtgagcctttgaagaaactaagcctttacctgtagatgaactactcaaaagtttgtttgtttgtttgtttttgagatggaccctgtgctctgtcacccgggctggaatgtagtggtgcaatcttggctcagtgcagccactgcctcccaggttcaagtgattctcctgcctcaggctcttgagtaggtgggactacaggcacctgactggttttggttttgtttgcttgtttgtttgtttgtttttaactagagatggagtttcaccatgttggccaggctggtcttgaactcttggcctcccaaagtgctgggattacaggcatgagccactgtgcccagccaaaagtttttattttcttcttaattcttacctgtcttccaagagagatgaggaattaatgaagacttactttgttaatgagaatatataagttaactcatcagggaaagatggttttattttactttaagttgtaatatttgaaattccacatataaaccagcccacttgcaaatagcttgatacataggttgattaacagatgcagcctaaggatggaaaattgagtcactaaaaacaaattaatggcacatactgttttgcttagtagatttt

SEQ ID NO: 46618 - DNA, 1014 bp, Homo sapiens
cgggcgcaatggctcacacctgtaatcccagcactttgggagaccgaggcaggcagatcacgaggtcaggagtttgagaccagccgggccaatatggtgaaaccccatctctactaaaaataaaatttaaaaaatatagctgggcatagtggcatgcacctgaggtcccagctactcgggaggctgaggcagaagaatcacttgaacctgggaggcagagattgcagtgaggcaagatcgtgccactgtactctagcctgggcaacaaagcaagactccatctccaaaaaaaaaaaaaaaaattagtatgtacacattcatgcttttattattcaaagatgatacctgtgatacatatgagtacagctaacaaggttagctgacgtaggatcagttctcaggtatttgagtatctaaagagaccttttgtgactataacttagcttgtggtttatggctccacttcatagtctatacaaagccttcattcataatcgtagttctgtttctgattgcttgctataaagttttttatcaattctgagtcatttatgaatttctatgtgttggtgttggtgtatttctaaagcagtctgtacatacggttttttggtttttagaagaggaggcatgaaacccattttaaactcaagaaatcaattttaatggattaggtagtttggctaaattcatggaactggaatatctttggttcagggcgaaaaaccccaattagggtaaaatttgtttgatgaaataattgttttggctgggcactgtggctcacacctgtaatcctaccactttgggaggccaaggcagaaggatcacttcggtcggggagtttgataccagcctgggcaacataacgagaccctctctctacaaaaaataaaaataaaaaaattatctgggcatggtgtcgcacacctgtagtcccagctactgtggaggctgaggcaggaggatcacttgagctggggaggtcaaggctgcagtgagctataatcatgc

SEQ ID NO: 46619 - DNA, 1657 bp, Homo sapiens
aataaatgagaatattacatctctaggttaaaatttcagactaagtttgttttctctttgttttttagtttttaggaatttttttctggtaatacatgtgaaaatgtgaaaaatagaaagtgaaagtccccatctctgtcatccaatgttaattactgttaacagtgttgaacttacctcttgggaattagatgacttcggtttaatacctgtgctagtcttccttaggaaagaagatatacacaagataattcatctagagatatttataacatcagaaaaaattgcaggcaacctaaatataatacattcagcaatttgttaaatagattcatgtaatggctgaaatactattcattcattaaatttttagagtaatatttaatgacatgaaaaaatattgatattactagaaaaaacttataaaacatatagtattatctcagttttaaaatcatgtaaatatgtttgcataggaaaaaaatggtttttgcaccaagagattaaaagaggttgtctgtgagtggctgaaattaagggtgacattttcatttttccagtaataatgggcatgtattgcctttatttttatattgcttttgttagaactgtttttgaaagatgcatttaaaaattttttagtgtatactctatatagaggactcccacataatttttttttttttttgcccacattgttgagtctttcttgctgcctagtacttatttggagagaatgacaagccgttcactatgcacatcaaagattctcttataccacttataagattgtcttccaagtttcttaggaaatgttttttcctagtattgtccccatccaccccttttcttgttttgtaaggaaacaaaatctttttttatcctcaggaatatggtagcatttattttcttttttaatgtaccaaaatatacataacataaaattgaccgttttaaccgtttttaagcttacagttcattaagtacattcacattgttctgcaaccatcatcaccattcatctccagaactttttcatcttccagaattgaaactctgtacccattaaacacttactcccagttcctctctcctcctagtccctggcaaccactgttctactttctgtctctgaatgtgactgttctctgaatctcatattcctagactaatcatatttgtcttttatgacttgcttatttcacttagcatatcttcagagttcatccatattgtagcatgtgttaaaatttccttttttaaacaagaaggaataatattccattgtatgtaccatgttttgtttgtccgttcatctgtcagtggacacttgggttgcttccccttttgggaattgaataatgctgctgtgaacatgagtacaaatatttgtgcaagtccctgcattcgcttctttgagtgtatacccaaaagtggaattgctggatcatatagaaattttgtgtttaactttttgaggaattgccttactattttatgttaccaccagcaacacacaaggattccagtttctctacatcctcaccaacaattgctattttctcctttttttttttttttgtgagtagccatcctaatgtgtgtgaagtgttatctctgtggttttgatttgcgtttctctaatgactagtgatgt

SEQ ID NO: 46620 - DNA, 1028 bp, Homo sapiens
ctgtttataaactattattatcctcattactagattcttagtatctagtatccatatactaagtattctagattcctagatccttagagtttaagttaaggtggtattagtaggaatggagaaaaatgtccaataatacagcacaggatctgagagttgtttgaacacagggagggaagacgttgtttccagctaaagaagtgagcagtagaccattgggagttttgttttgttttgtttttgagacggagccttgctctgtcgcccaggctgaagtgcagtggcgcgatctgggctcactgcaagctcctccttctgggttcacgccattctcctgcctcagcctcctgagtagctgggactacaggcgcccgccaccacgcccggctaagtttttgtatttttagtagagactgggttttcaccgtgatagccaggatggtctcaatctcccgacttcgtgatccgcccgccttggcctcccaaagtgctgggattacagatgtgagccaccacgcccggccgaccattgggagttttatgccagaattgctaagaggttgggactgcttgtccttgaggatgaatagaaaacagcaaagcacaggccgggcacggtggctcacacctgtaatcccagcactttgggaggccaaggcgggcggatcaggaggtcaggagatcgagaccatcctggctaacacggtgaaaccacatttctactaaaaatacaaaaaaaaaaaaaaaattagccgggcgtggtagcaggctcctgtaatcccagctactttagaggccgtggcaggagaatggcgtgaacccaggaggcggagcttgcagtgagccaagatcgcgccactgcacttcagcgtgggcgacagggcgagactctgtgtcaaaaaaaaaaaagagagagaagaaaacagcaaagcacaaaaagaattaaggaggtctgaagcaatgcctgtattttaaaggtgagaagttgaatcatggaactaagagtattaagtaaaccaagggaccga

SEQ ID NO: 46621 - DNA, 1029 bp, Homo sapiens
taaataactgttttactagatgaagttttcaaaatgcatgttcctgactttactggtaattacgtctctgtacctgcactttttaagctgtgaaacagaatcattcgaaggctcagaggtatgtgacttccttagagccacttaggctacaacacctacacgctgcacccacagacacacacacagagcagagcacggatgcaagtcatctttcagaaatgatctcaagtatttgatttttttaagagaatgtacatatttattatgaacatttacctgatttattctaataatttaccccattcccacatctcaagtgtaggcagatagtctgaccatgtgaatgtgagacccaagttcccaacttatctctcacagaaaacccacatacacattctacctggtttctggcattctctatggcctggactgactgactgggatttttctaaggccaggagagaactgtccagccagtgatataaacaagcgggtcccatgtgtcccaagggcacttcccttcagcaacttcagaacacccatttagacgatcacagttggccaggtgcagtggctcatgtctgtaatcccagcactttgggaggccgaggcaggcagatcacttgaggtcaggagttcgagaccagcctgaccaacattgtgaaactccatctctactaaacatacaaaaattagccaggcatggtggtacacacctgtagtcccagctactcgggaggctgaggcaggagaatcacttgaacctgggagttgaaggttgcagtaagccaagatcactgctcaccagcctgggtgacagactgagactccatctcaaggaaaaaaaaaaaaaacaaaaaacctctagatggtcacatttgcctggagcttgcctctgttccctctgtccacttccaaggacccctcctggccacatctgtccacataccctgcactgccataggctcacatgctcagaaccctccttagctcatccacaaacactcttcggagctagctattgtagct

SEQ ID NO: 46622 - DNA, 1048 bp, Homo sapiens
atctctagaaacagcaacttacctacttgtggaaggacatttaaaacatagtttaccctatacctcaagaccaacacattttggaaattcccttgaggaactggaaggattccagaggccaagccagtcagactggaagtttgtaaccatgagtaggtgagtgctgactaaccaggccacagagaggtcagaggatcgagtgagtcttgggcatcaagtcaaccaggagaaggtttcggagaccatcacccatgtaatggctctgcagtgagcctgctgtgaccccagtggttctcagtcctggctgcacattcaaatcaccttcgaagcttgttagactacagaagcccacctctggagcttccgatttaattagttgaaggtggtacccaggcattgctacttttaaaatatctgcctggtgatcccaatcagttttcaagtttacagaccagctcagaaactgctttggagcccagatattatgttttgcatattaatgagaatttttaaacaaagtgcactgagacattaaactctagatacgacttctggggcgtgtactgtggtccatcaggaatttagtgatggaaagaggacagcccctcctatattccagctcaaagttcgaagcttctttttttgtagtactttctgcaaatcaatcattttacttctctaaactgtaaatctaggataaccatacctgtattgaagcatttttatgagaatgaaaaaataaaatgtaaaaataaaggcagtgggtgtgaaagtgttatataaatttcaaaatgcaatgtaacttacttttcagaaagttaagtaggattttagcatatccaaccatctttccagggtgattaaaacttgaagactgaattcatgggccagatacagttggggacagagattagcctatttgcaatggaacttttgaggtccttagaatggtcgtacatttttaaaatctttatattctccccagtgaggctcagtgacagaaaacaccaacatttacccaaacaactgccccgttcccctggtcctt

SEQ ID NO: 46623 - DNA, 1031 bp, Homo sapiens
catggaaactcacggaagaagccaagcaaggtaaaggagagtgggcaagtctcagtgagaccatttaagacataaacagctaaggagagtctttgagggccattatgtaactgttttcccgaacccagatcataggagcaatttgtagctggaaagagaagcatcggaagctttggtgcttacctttgttcattcatttattcaggcactattcacagcctcgtgtgccccagactctgctagcataggagaaaggaccataacaaaggcattgtctctgtttccaagattccagaaatgtaaccagggaggaaggcatataaatagcttgcagaagcaactgtaattatcacagtgccatggcatccactgttgtgttaaatcgggtttctcttggtggatgttcattgtggtgtctgcctggaacttgtccgcttctcggtggaaatgcagccaccttcttttaggagtattgttcctcatcccgtccccctctgagtaagcgctgtctgtctgcactcctctgaccctagtgatagttaggagaatggctaatgaccacagtcagggcaatcagagttctttcctgggattcctgtaaatggaccttgggaaagaagagcttttatttttttctgtttttcttggaaagtgaagctataagggaaggccaagtgctgtagagaccagtctcctgcctcagaaagatcagcagttgaggctgggtgcggtggctcatgcctgtaatcctaacactttgggaggccaaggcgggtgagtcacctgaggtcaggagttcaaggccagcctgctcaagatggtgaaaccccgtctctactaaaaatacaaaaattagccaggcatggtggtgcacacctgcaatcccagctactccggaggctgaggcaggagaattgcttgaacctgggaggcagaatttgcagtgagccaagactgtgccactgcactccagcctgggtgacagagactctgtctttaaaaaaaaaaaaagtggacagttaagaaaataa

SEQ ID NO: 46624 - DNA, 1031 bp, Homo sapiens
ggattgaacaaaagctattataaattaccaaccatgtaagttttgcacttttgcccttttaaacaagaccacagagatggtttgccagtacttattttagttttttcctttcttacaattttttgtccaaatttcaataattttcttctttccacgtttgcaattgtgctaaatttcagctgcagcatcaaaatgcagcaagaagcttctcgttgaaaaatactggcaaattctcagcttgtaaacagtagacattttgattgccatgtttatctcgataaatactgtacaaaagttgcttgcaaatattagaatattttttcatcgcctggagactagctctaaatattattggtaaagacctgcaaacttcctgcaaagctcctaccgtaccactagaactttttaaaagttttttgtagcttgctttcttccaaatctgcacaagatccattcctccaccctccccacccccctgtttttctctgtacaaaaatagtcccccaaaaggaagttcaggatctctctcatagaagttttcttgtcggcatcgcggtttttgcgtgagtgtgaatgggattggtgttctctttggcagctgccatttgctgtgggtgatgggatatatatatataaatatataaaagaatatatatttatatataaatatataaaagaatatatatttatatataaatatataaaagaatatatatttatatataaatatataaaagaatatatatttatatataaatatataaaagaatatatatttatatataaataaaagaatatatatttatatataaatatataaaagaatatatatttatatataaatatataaaagaatatatatttatataaatatataaaagaatatatatttatatataagtatataaaagaatatataaatatataaaagaatatatataaaagaatatatatttatatatataaaagaatatatatttatatataaatatatataaaagaatatatatatatatataaaagaatatata

SEQ ID NO: 46625 - DNA, 1029 bp, Homo sapiens
tttggaaccatgtaatagtttccagttgttctgaaaccatccagcagaaaccacctaatacctccattcaaaaaacattttatttggtaactatgatgtatcatttgattttctcctctttattttaacttcaatttttttttaaaaaaaatgtatctgaaggggaattacattttatgaggggaaaaaaagcaatttgaaaaggatattagtattttagctaattgcagttttatttcaatttcaaatactaatgaataaccagtgttttgacaatgttttatatatgcacatacaattgattcttggttcttccatatttttctattgagaatttattaactgaatgagaagtagaatgggaaaatgagaatctgagttctggacctagctgtgtgtctttgagtaagtcacttaacatctgtgggcctaagtggctacatcttcaaagtggagaatgaagtcagtatttcacagtgagtgtgcttctggtatttgggctggataattctttgttatgaagtactctgttgtgcattgtaggaagtttagattccttaatgctggtggtagcatttcccagtcattatcatatcccagacgaccctgcatatccaaacctcttctagtggggagggaccacttcatattgagaactactggcaaatggtctctaagaattctttcagcttcaacattctgtgaaagaattcttatttggggcatgattgaaaaagaaggtaatatatcatacaccgaaaaacctctgctgcttcctggatacgaaacaattttattttaaaatgaataacttttacgaatctgtgtagccctactcacagatctaccatttatgatgttccaagataaattattttattctagcttgccttaggctttttctctacagtattatccatagctatatgattttttaaactaaaaattatatagtaccatctctatatctaataagtaaaagcaacaagatttttttttaagttgtactattgttttaatatcttagcc

SEQ ID NO: 46626 - DNA, 1058 bp, Homo sapiens
tactgaaatcctgcaatactttaaggctaaatcctacctcttctaggagtctgtctcccacttcttagggaaataatttctcctttctggaatcttacctgtatttttattttattttattttattttattttattttattttattttattttattttattttattttatgatagtaaattcaaggaatttaagtggaaaacatttgacttctaagaaagagaatcttgttcctttgattttacactaatttgtataggcagaaaaaaatgtatattaaattttaatgccctatttctctggatttatgcaaattcattaataattcatttttcattattataggcaatccctgctttatataatttctatatgcatgaatctcagtaaccatgttttagttaaataacaccagttcccaacaactcagttcaaatttcatttagaacagtataactttcagtaattgtataaagtacaaactttgctgctagctcctcagtccataaatcactctgtagaaacatatgtacatcgtaatcatgaccaatcacattgcttttctttaatagtctgttggtgattggttactatatgtctgtcattcagttcacacagagacagcaaagcatgtaggtgtgtttcctccttgtctcccagtgataacgtgatgttttacaaaaatggataatcaaaaggaaatggaccaaaagagataaaagcgcagccaagaaacaaaaagtgaaaatgctgaagtgaaattctgggaagtgtaaatggagtatagaagaaatagctgactgtgggaatattgacactgctattgaactgctgtcatttaagagactccagatatacatccagaggaggttagggaaggtgaacttatggatataaatgaagaaagtgaggaggttgtggtgaaaagatgaagccgtttcaggggaagtgaccctggcaaaaagttcacattaaaggaactcttggagatatttcatgacgttgaaaatgtaaaggataaaatgttataaactcatccagatttagaaaagtgtgtga

SEQ ID NO: 46627 - DNA, 1087 bp, Homo sapiens
aaatctctaacctttagttttcctttagattttggaagattttttatatttgttttcaaaatgaattcctaactcgaatgactttttaaaacgaaatctaacatttaacctataggaaagctctccagactttgagttcattttcagctttactgggtattgtgagataactatataaagatatttagtaattaattgtatatatcaactctggagctccagagtaagagtcaagtttgggacttctacccatataggtagtaactagggctaggcagtataaatagagtgataggagaagatcccaggagaaaatgctgaaaaacaccagtgtttattggaagagaacaggaagaagaacaagaactagaaagagagagaggagtaatgtccagagagacaggaaaaaaaaaaaaaagatatcctagaagctaagggtggaagaggcatttcaagaaagagggaataagaccaggaacggtggctcacacctgtaatcccatcactttgggaggacgagttgggaggattgtttgagttcaggagtttgagaccagcctggacaacatggtaaaaccccgtctctactaaaaatacaaaaattagctgggtgtgatggtgcaagcctatggtcccagctacttgggaggctgaggtgggaagaacactatagcctgggaagcagaggttgcagtgagctgagatcacgccattacactccagcctgtgtgacagaatgagacactgtctcaaaaaaataaaaataaaaaaagagtgatctgatgctttagataggtcaagtaagaggaatattggggctgaggtgtgtgtggggtccattagatttaataacgtgaaagagattgatgtctttgtcagagcagttttaatgatagctatgtgaggagaagccagattttagttggctgagaagggagtatcaataaggaaggattcaactttctgaaggaaactttggatgtggaagggagatgttgggcaatagcttgattttatctgaggtcatctctttactcataagtcagaaatgtgaatttactttaagtatatgttactggtgtagaga

SEQ ID NO: 46628 - DNA, 1063 bp, Homo sapiens
aagtgccgggattacagctgtgagcaccgtgcctagcctaaatataaattattttaagctatgagcctctggaatggattgggaatagtttgcttttgtccaataagaaaaagggcaagaaaaacattttatactgcaaataaagatacgtgaataaagatatttcagtgcctttgttgagatagtaaaaaggaataagggaagtatagccccacctaggcccggcaagaggggaagaacaaggacgtggataagaagtatgaattgaggcaagaggagtgagagatctctgatgagccatgggcttctataagttgagttacactcagttaaatgaagctttgctacaatcagttattttaccaatatggaaagaacctaattacagtagtatatttcagcaagcttaattctgagttctttagagttacggggtatgttggaatggtcttattactagggattactgccagtagaagacagataatcaagtaatcaagtaaagtttttttttttccattatgaaaggcatatatgctgtttaacagtgtttaatcatcacttacatataacatgtccagagttacgtgtgacttcaaataacaacccttctatcatagctcatgattttgtggatcaagaatataggcagttgcaggtacagagttcataggaaataaaaaaataaaattgaaaaaaaaaggatataggcagggctcagctggatgctgtttcttatggtatctatggaggtcattacataaactttggctggctgatggtctggtcagaaggtccaacatcggtttgtttatgtgtctggtactttggtggatggctggagggctggcctcaactggaactgttgacccaaggagatggatgtggcctcaccagcatgacaatgttagcatggttgtaatacttaggtcagggatcccagagaaaatgttccaagggggctgggtagaagctgtaagactttgtattagttttctttctcttttttgagacggagtctcgtgctgtcactcagtctggagtgcagtggtgtgatcttggc

SEQ ID NO: 46629 - DNA, 1042 bp, Homo sapiens
ggcttaaaacaagcatgtattaactcataatttctgaggctcaggaatgctatagcatcttagttgagtatttctggcccaggatcttaagaagttgaaatcaagctctcagctggggtggcatcatctgaagtcttaactggggctggaggatccatttccaagaagtctcactcacatggctgttggctggatgtctcaattccctcccatgtggtcctccacagggctgcctgagtattctcatgacatggcagtgggtttcctctagagcaagtgatgagagagcgagagagcaagagagagcgagtgtgtttgcaagacagcacctgtgggcacctaagctggaagccacagacttttataacacagtcttagtagtgacagtccatctcttttgtcctgacacattgtgggagagtactacagaaggtgtgaatacaagggagtgggaatcatcgggggtacatctttgaggctggcttccacacttatttaaggtggtgtaattaatgctcatcagagagttacacagagagacaagaactggctattggagaggtaaaatgagagatatgttttgaaaaaaggagcctcttagggaatatttttgttataatatgtatactataagccacagacttttaaaacgcagtcttcgaagtgacagtccatctcttttgtcctgacacattgtgggagagtactacacaaggtgtgaatacaagggagtgggaatcatcgggggtacatctttgaggttggcttccacattatttaaggtggtgtaattaatgctcatcagagagtttacacagagagacaagaactggctattggagaggtacaatgagagatatgttttgaaaaagggagcctcttagggaatatttttgttataatatgtatacttaagatatttaaaaaatgagattgtttttacatatagcaaataaaagatgtattgaggtgaacagagcagtttttctatcaatgttaggtctcaattagcttgcattttttgattactctatgtgagtgg

SEQ ID NO: 46630 - DNA, 1098 bp, Homo sapiens
tagggtttcaccatattgcccacactggtctcgaactcttgagttcaatctgcctgcctcagcctcccaaagtgctgtgattacaggcatgagccactgggcccagcccaatagatttcttataagcgatttcaataaaatgaatttgctatgcaatataatcttagcaaagctgctgtgaccttcaaaactgtgtcatcagcagcattaatcaagagttccaattctgagaagtgcatacagagggacattcagtagtttcctaagaaaaatggattttcactgtcttaatttaaatgttaatagatttgcttttagtgtatcttgactgtcagataaaattttagtgtagtgtttgcttagtataaacatcaagcaaggcttttgtgtcacattacaaaacaattttttaaattcccattaatcttagatctccatccttaattcctttaggtgttaacatttaagatactaagggaacaaaaagcttaggcaaagaatatttaaatgttcaatttggactttggaactttctaattcatgtattaaaaatcttccacttatatataataagtatggagacactacggatcatcattactgtaagcacagaaactgaaagatgcggccaggcgcggtggctcacacctgtaatcccagcactttgggaggcccaggtggggtggatcacaaggtcaggagttcaagaccacggccagccaacatagtgaaaccccgtctctactaaaaatacaaaaattagctgggtgtgatggcaggtgcctgtaatcccagctactcaggaggctgaggcaggagaatcacttgaacccaggcggcagaggttgcagtgagccgagatcgtgccactgcactccagcctgagcaacagagtaagacgccgtctcaaaaaagaaagaaaaaagaaaaaaaaaagaaaggaaagaaaaagaaaggaaaggaagggagggaagggaaggaagagagagacagagaaagaaagaaactgaaggatggacacctgggcttatttctctcgcaagggtagaggtacagaaagccctcgccctcaataaccacacatttttccaagtaaat

SEQ ID NO: 46631 - DNA, 1381 bp, Homo sapiens
ttttggaagacttcagattttggtctgcacttttctaccatctggaacaaccagtgtatgattgtgtttgtttgtttgtttgtttgttttttgagatggagtctcactctgtcccccaggctggagtgcagtggtgcaatctcagatcactgcaacctccacctcccaggttcaagcaattctcctgcctcagcctcccaagtagctgggattacaggtgcccatcagcatgcctggctaatttttttgtatttttagtagagacagagtttcaccatgttggccaggctggtttcgaactccagacctcaagtgatccgcccaccacggcctcccaaagtgctagggttacaggcatgagccactgcacccggccatgatttgtttttaagtaaatatgtagtcaggaaaaaggagatgtatgagaaaagaaaaatagaaaattagggggcaagacagaaaaattaatatacaatagatgtagtgtctgaaaaataatggtaagtgaaggcggtgtatgaccatgttaaaaggatgagctttggaatcagcagatctttgggtgagatttacaactgcctttggtgtcacttcatccctttgtgcatcccctttaaaatggggagattgctgcctacctttcttaacataaggcacataaagcccatagtgacatgagtcatgcagagtatgtgcacaatcatggctgttgttacattcctcatactagaaataattaccaccctaaaggaagatgctagctattgtttttgtttggaacttttaaaagtttttttttttaatacttttttcttgttttagtacctagaccttttctggaaaaagtattttttaaagactaagaaagagaagcaaagagtgaaaacaaggaaaggcctgatctacttatggaaagtttatcctttaagccataccctgtattttcaatttcctggccttatgctacactcctttccttgttgcaatttagagctctgttctcttgggtaggaggaatttgctttgggcatttttcttggggctttaaaatgttaacactgtgcaggtcttaaaaactacaacaagaagattttaaaacaatcctttggggatttaggggaccctagagatgagcaattgaggccatgttgccatcaagcagcttacagaggagggattactacttgtgttgaggtatacccatgaaactcactgggctttttggatttgccttgatcctaattaataacaactgctcctgaagctgaacttttccagctcttgtcgttagatagttaaacctcaactgtaagaagcagtaataaaatcagaagcttcactaagatgagcaaataactcaagtggaaaattattttcattt

SEQ ID NO: 46632 - DNA, 1051 bp, Homo sapiens
actttccttctggccatgtttcccattttccctaatgagctccctgctgggctgtggtaacagaaccataacccaaagcaggtttggggtgatcatgttgaacttaacagtacacgcagactttagttttagtcttgagtgttcaaacatgtttgctttaatataaagacgaactttgaaaatgatcccctagcaagtccgatcaatgctcctccaggaggataatctgctctcttttgagaggaggaccctaatttgaaaagtaggccccttggctgccagcgttttaagcaggttttgactttagccctcacaggcggtgtgggcctctcaaggcttctcggaatctttctactgcccctgggcgccttcctttccttctgagggcttgagagggcagggagcctgccatgccctttgaggctggtttcctgggaatggagggagaagggctgatgttgctttagtgctcgctggtggccattcccctaacgggaagccatctgggttgttaaggagcgctggtcccttcagacaggagaagcacgatgtactgcccactggtgggtccccttagcttacaccggtcacctgttaggtggctgccgggtctcctgctgccacctggtgggtgagggtttttaatctttgggcagagacgaggaaaagggaggtacacagggggctcccaaagggtttccattccttgccctttagagcctggagagggcatgcagagggcctgtggcttgtcccagccggaggttccccttaaggggaccagctgccttctctggggagctgtctatggggtccccgcagccctccagtggaggcagaggccctggctcctgaccgcacttgttttgcataggactgggctaagcctgggccctatgaccagcctctggtgaacaccctgcagcgccgcaaagagaagcgagaaccggaccccaacgggggaggacccactaccgccagcggcccacctgcagcagctgaggaggctcagagaccacggagcatgactgtatcggctgccaccagggtg

SEQ ID NO: 46633 - DNA, 1016 bp, Homo sapiens
tggggctgacacggcctctatttcccctcatggcgatgttgggctagtggttccccaactttaaaaaggatcatcctttccagttctcaacattgtgattatgaaacagcttgcacagtttctagtaaacctttggaaggaaggtaagacacagtcactgttttgcttattgcagtaaaattcacatcacagaatttatcattttagccgttctgaagtataagtttcagtggcttttagtacattcatggtgttatgcaaccatcgccactatctaatttcacaacattttcattatccccgaaagacacctcatgcccattaagcagtccctccctgtttcacagtctccccacccacgctgaccctgacaaccactcatctgccttctgtctctggatttgcctattctggacattttatacaaatggaatcatgtagtacacagccttttgaggacacagtcccttgagtcttgagttttactggaacctttgccgagagcctgacatgagtcagttcatggagtaaatagagcattttatttatttgaaatgatgggaggtcagtttggaatgaataaagaaactgtatagccttttgactttgtaagttctaaagattctgcttatctttcaaagagaaatctctgcaaccccctttaattttttctcttgtaggggctggttcataggcaaagccacagtgaatttgggtataaatacacaagaaaagctatatgatttgtagctctcataaatgtttaaaatatttatacagagagaaaaaaataattctttaattatttttaacagttggcttggctgggcgcgttggcgtggtggctcatgcctgtaatcccagcactttgggaggcctaggtgggcagatcacctgaagtcaggagttcgagaccagcctggccaacatggtaaaaccccatcacgatcagtgacacgatctcggctcactgcaacctccgtctcctgggttcaagcaattctccagcctcagcc

SEQ ID NO: 46634 - DNA, 1049 bp, Homo sapiens
tcttattataaaagtggggtgggattagaaagtgatggcttaatgaggaaggaagcacagctcaaatgccattcatatgaccagggtctacctcacatacttgttagaatgaaatgtgaaagtgccttaaaagacgtcacctgctacatgaatgtctaccgcaacattattcgtgataaccaaaaggcggaaacatctcagctgcccattactggatgaatggataaacaaattgcggtatgtacataatggaatattattcaaccgtaaaaagggacgaagtgcagatgctacaacttggatgaacctcaaacgtgttagtgaaagtcaagagacaagaggtctcatatcatataattccacttatggggaatgctcaggataggtaaatccatagagataggaagcagtttccaggttgccagaggttggtgagagtagggaatggggaatgactgcttagtggccatgggggtttattttggggcactgaaaatgtttttgaactaggtagaggtggtcattactcacattgtgaatgcactgaacgcttctgaatcgttcacttcaaagtgattttgtcttatgtcaatttcacttcaaaatataaaacacacacatgcataatctgcatcaatgtcactatatatggtacaccctattcatcaccaggacctgtcagcctggatgtacttggtccccaaccctgtgtcagagggagaaccaaacacacctttacacataggggacccgaacagagctcaagggcaatggaacttgctcaaggccaagtcattgggaagtgacagttgtaggactggctcttgggttttcctgttttctatgcatctttattcattatttctacatggtgtttgctggcaggggaggctgacacattgggtagactagtgaaagatcagtgttcctcaagaagcttctattctgcccctcggagggcagtcaaagctcctccacatacctgctgtgaagcggaggctagctcagccttgttgtttcctgacttcttggagctggctttctctgtt

SEQ ID NO: 46635 - DNA, 1049 bp, Homo sapiens
atcccaaagcttctgaactgcctgagagactgcaatgttgccatccgatggctgatgcttcatacagcagactcaggtaatgcacaaaaggggtggccgtttatattactccacataaagactctcagaatcaggacctacttcacgatgcagagtggtttagcagggagagaggccttggatgagaatcaagttgctttttaaagttagtcattttttgtcaacttggataggccactagcatacctgaaaagctctcccctgtcaggtactgttaggtgctagggaataagaggatgtttatctctcatgttcaaggagcttgtcactgatcagaatggggagatcaaatgtagacatatgaaaaaatagaactgcagatctgtggtaggcagaatagtgccttccagcccacacccagagatgttcatgccctagtccctgaaccggtagatatattacatgaaaaagggggattgaggttgcctattagctgacctttaaggagatgtttctggattatcccagtggactcagtgtaatcataagggtccttgctgtgtgtggtggctcatacttgtaatcccatcactttgggaggccaaggcaggaggagagcttgagcccaggagttcagaaccagcctgggtaacacagtgagatcccatctctacaaaaagtaaaaaaattagctgggcatggtggcacacacctgtagtcccagctactggggaggctgaggtgggaagatcacttgagcctgggaggttgcagctgcagtgagccaagatcatgctactgcactgcagcctaagtgacagagcaagaccacgtctcaaaaaagaataataaaataagagcccgccccccccccccactttttttttttttttaagacaggatctcaagttccccaggtttgagtgcagtggcacaatctcagctcactcagacctcctgggctcaagcgatacaacttccgcaatccccgcaagcagctgggactacaggtgtgtgccatcatgcctggctaagttttttgtattttt

SEQ ID NO: 46636 - DNA, 1061 bp, Homo sapiens
attttggaaaagggattatggacctttacatagtatgaatacccatcttctaaacaggctttcaaaaatataattttgaggccgggcacagtggctcacacctgtaatcccagcactttgggaggacaaggtgggtggatcagttgaggtcagacatttaagaccagcctgggccagcatggtgaaaccccatctctactaaaatacaaaaattagccaggcacggtggcaaatgcctgtagtcccagttactcaggaggctgaggcaggagaattgcttgaacctggaggcagaggttgcagtgagctgagatcacgccactgcactccagcctgggtgacagagcaagacaccatctcaaaaaaaaaaaaaaaaaaaaaaaaggttatatatacatacatagcgagactccatctcaaaaaaaaatgtatatatatatatatatatatatacacacacacacacatatatatacacataattttgaatcttgaggatatattgaggatatagatggacctgtgatcatatctgaaactatattgagtcaaagtagaatggaattctactttattggacttttcagtttctaatatgtgtgttttgggtctttgtttcccattgtgaatatgactcagtgctgctcgatcttctgctgattcaaatatggacgatatttgtaagctgcttcgaagtacaggttattctagccaaccaggtgccaaaagaccatccaactatcccgagagctatttccagagagtgcctatcaacgaatccttcatcagtatggtcattggtcgactgagatctgatgatatttacaaccaggtgggaattaaatctattaagacctattaagacagtttaacagactgatttcacttccctctttaattactcctttccttccttctttcccaaaagagtaaaagcaggtagaaccttttaaaaccttttgagctacaccccaggatgataaaggaaagagggttattaattttgccagaatcatatatttcagggagaagatggaatttgagctattgggaagaagatg

SEQ ID NO: 46637 - DNA, 1085 bp, Homo sapiens
ctcagttccttgtcatatgggcttctccccagggctctctcacaccatgatatgttgcttcccctggactagcaagctacagagggtgcccaagccagaagttagtcttttcgaaatctaatctcagaagtgcactgtatcttttgtttctatcctatttccttccccccctcccccttttttttttttgagatgaagtctcactctgtcacccaggctggagtgcagtggtgcaatctcggttcactgcaacctccgcctcctgggtttaagcaattctcctgcctcagcctcccgagtagctgggattacaggtttttgccaccatgcctggctaatttttgtatttttagtagagccggggtgatcccggctctcctaacctcaggtgatccatgtgcctcagcctctcaaagtgctggaattacaggagtgagtcaccacacctggccctattctcctctttaggagggagtcagtaagtcagcttatactcaagggaaggaacctacatagaacatgaataccaggaggcagagatcattagggaccactttagaaagctgctgaccatacccagatatccatactgcttgctctctcatttccttctgacttctgcccgaggtgctctatggaaactagcatatgccccatcctttattatgttttttcttcacggcacttatcacagcctaatatataaagctcattttcacaaatttcaagatacatttgtaatcaaaactttttcttctcctttttatgaaacatttttctgtattttgtaatcactctagcatttttcagatatgaactattcttaatagcaagaatctcctatacttgacatgtgagaaaatttttttttttttttttttttgagagagggtctcattgtcacccaggcaagagtgcagtggcacgatcatggctcactgcagcctcaacctccagggctcaagcaatcctcccacctcagcctcccttgtcactgggactacaggctcgcaccaccatacctgactgatattcttttgatttttagtagagacaaggtctcgctattgttgcccagactggtc

SEQ ID NO: 46638 - DNA, 1019 bp, Homo sapiens
caaagacttaattctaagacctgaaaccataaaaattctagacaacccacagagtgggagaaaatcttcacagtatatacatctgacaagggactaatatccagaatccacaaagaacccaagcaaatcagcaagaacaacaacaataaaaaaaaacaaaaaacaaaaaacaatcccattgaaaagtgggctaaggatatgaatagataattctgaaaagaagatataaaatggtgaacaaacatatggaaaaatgctcaacatcactaattattggggaaatgcaaattaaaatcacaatgcatacctcctcactcctgcaagaatgcccataatcaaaacatcaaaaaataatcgatgttggcatggatgtaatgaaaagggaacacttttccactgttgatatgaatgtaaactagtataatcactgtggaaaacagtgtgaaaattcattaaaaaactaaaagtagatctaccatttgatccagcaatcccactactaagtacccagaggaaaagaagtcattatacaaaaatgatacttgcacatgcttattcctagaagcacaatttacaatttcaaaaatatgaaacgagcccacatgcccatcaattgagtggataaagaaaatgtgtgagagagatatatatacacgtggatgtacacatgtacatgtgtacatacacacgtggatgtatatatgtacatgtgtacatacacacgtggatgtatatatgtacatgtgtacatacacacgtggatgtatatatgtacatgtgtatatatacacacacacaccacggaatactactcagccataaaaaggaattaagtaatggcattcacaacaacctgaatggaatcgaagactattattttatttgaagtaactcaggaatagaaaaccaagcatcatattttctcattcataattaggagctaagctatgaggactcaaagccataacaatgatacaatggactttgggaactcaggggaaatggtgggatgcgggtga

SEQ ID NO: 46639 - DNA, 1078 bp, Homo sapiens
ccccgatgtggctgaagggattcataatggtcacaaattagtgttactgataaatattttaaaaacttgatcaaagttgactttttctaccctcacacttgaaaggtatttatctaaagcttactggcttcccatcctagcattgattagtagtttgtaaaagttaaggttaataattcatatttatataacattcagtttcacaatacgccagtgtaaatagccttactgactactatccattgatttctatagagctatggcattggaacttttatgtgaacttaaaatgctactgtggagactgaggcagttttgtttaggttaacccagatttgtttcattcctaagaaaagcctcttgcaacacgtttattattctgagaaatgatggcatttttggaaacttttctctcagaagcaggagtcatacaaatgaaacaatagattaaattcaaaaatgtggattctatttgagtccatgtttttctacgtatgatcacgacatagggttaaggtatccttctcccactctgcaaatgtctaaagcaaaactaaaaaagtttgtacttgctgaacccagccacttgaaagtaaaccagcacagtgttgccatcaccccaataaagctgtaagattaatcacatgcaccagacaaatctgcagagctagttaaagaatttattttaaacctcctgcaccacacagcatgttttaaacacttgacatgtaactccaaagtttatcttactagaaagaagacatactatcactttaagttctatgatttgacaaagcattcatgaaataatctgcagactgtttttgaaaagtaacacctgtaaacagacataactatcctaaattgtttattagatattaattatacaaacatatattagtggtgaaggtggagctggagagcattctaccttctccaagctgcatggcaagaaccagacatagttttgtggaatttagggaccatccaagccattgctctttcagctggcagatgtcagcccacgcatcaccctgtgcttatagactggtatggtgatctgttgggtgtcaggact

SEQ ID NO: 46640 - DNA, 1027 bp, Homo sapiens
aacaaagtttctttacaatgttctaagtaaaggaataaagaaatcattgtgtatttgtggtgaggtgaaaaggagcagaaaagtctagttaactaattttatatgattggtagacaaagatttaccaaaaaccttcttgtttgttaaaatatttttaaacttaaaagaccagtgtgatagtattaaaaacgttcttacttcatcttataaatttggactgattccttttccctcataagagaaaattttagcatggaggaattctgccagtcatttttctctaaaatatgataatcataatgtttatgattttaagtgctttatgccttacctgtggtgctgaatgtggcctagttggaaagatttgtaaagaaaccttcatttcctcttagagtccacctttttccttaaaatataaaagatttgtccttagagaaacaaatgaccagtattattaaaagcaagatttctgttaacttgagtcaagcagagagaaatccagatttagtcattcattaacatatgttttgtggctaacaccacaggtggtgaaaatgcccatatgtttgtgtccttgattctgctttttataactgtaattcttccttcatttttctcttactcccaagtgtgtaggaactcagattttctttagtatttcaaaatttcagtagtagtattgtagtgtagcttaaagtatctagttttcagcagctgagtaattgtggagcagttttataacttgaaatcctctgcacaggattcttgaccttctgttcatcagcagaatagttcagtgatactctcttgggtttgttgttagatatatatatcctctcttctttaacctataatatcatatatgttgagacactttcgaagtgattcctggaaaagggggtgagcacctaaaaactattaaagtttttttacttttttatatcaaaactcagtcattaaaagtaaaatgaactttataggaaaataaaaatagtttgtcttaaactatacatgagcaacatgtttt

SEQ ID NO: 46641 - DNA, 1032 bp, Homo sapiens
cttttgatgtcatctggccctgatgccatgttttaaagaggttctcaaaagctgcactgccagagtcagtggattaagccccacattttttttttactcatttgctgctttgtccaagtcaccaggttgctctagtctttatttcccttctttcataaaattagggagttgagctcgttcaagtcatttcacaaaccctttagtctgggctcagattttctatcctttgtcatcccctttctccgtttttttagcacctttagacatgtggtagtgaaagtcttcagaatcaaaatggagttactaatgttaaggaaacccagggaagctgtgtacagagccagggaaggctgtgaagagagtgttctcacacttgtatgcctgataatgaaagagactacaaagaccatatccttacacaaaggccatcaccaccttacacaaaatagtacttctgcaaggacatctgcccagcaactgcctgttcagcctccaactggtgtcacccttgttattgatctttgtagctaaggatatttatttcaaaactattatataacccttgtttctcctttaaaaacctttgtcttcctttacctccctgaatatgtatggcatagtttactatgttatgcatattcctattgcaatgctctgttctgaaataaacatcttttctttgtgatcctctctctgttatgtaggttgacagtaaaaattcaaagtggtttagtgatttgaactttgctttatataaacatttcctttttatatgctttgtgaaactagaaggtgtaataattaatggcatacttagttaaaaaaatttatatgatatgcacatactgcatttggtcctaataatgatctcaacatttcatttacaattagcttattccacagtattaagaaaacataggtttcttcctattttatataaatcagcctttaaaataaaacaaaccagcttttgcaaaattatttacaaagatacctggccttgtcatttgtcatttgaaaataattatggga

SEQ ID NO: 46642 - DNA, 1071 bp, Homo sapiens
ctgtaagactaaagaggaataactaactttccttttcttaccctttgcttcataagctatgatgagaattgtgtacttgtcttcgtacactttttactctctgagtatgttgacggtgacaactgggttgtcttacctattgttgtttccagggcttaatatgatgccttactctaaataggtcctccataaatggtggttgagttaatccaaggaaataaataaatatatgtgtgtatgtataaaatgtgcacgtgcatgatggcattcgtaaactttaaagttaactgtaataaaaacttgttttaaagtataataatgttttagactttcttcctttttttctttccttaaacagatagaaggacaaggacagaatcaccagcactggctgaaggtaaatatgtctttgggggaaatgattattcaaatataaatgaaaagttatgatttcaataaaaacttatattaactatatataatttaagggaaatgttctatacacaatattgagttgctaaaaatgttgttaggaaatattgattgtttagtttttggcttagaataggacctggtggggaaaatgtaaattaattagaactttttttaacagctttctttctttaggagaggtatgtgttttcctttgaattaagtcattttagctgtcaccagtatagttgatcaagaaagttctaagccataattttagtagtttaaagtatatatatgtacatatatattttttttcattgaaaacagaagggaagacactttacacataatcttaagaattctatctgttactggttttggtcctttttttaaaaaaaaattttttagaaacaaagaatcgttaccataaaaggtagttactgttaaagggtcctgagtactgaaacatttgtaatcctgcagttgttttaattataacaagttattaagtattcaaaatgtaattttttttacaggcagattttgtgttcttaagtgaaaatgactagcttaaaatccctttccgtgttcttcttagttataaacagagtatattttttcaaaactagctcatca

SEQ ID NO: 46643 - DNA, 1084 bp, Homo sapiens
ttttagtagagacagggttttaccatgttggctagcctggtctcaaactcctgatctcaagtgatctgcccacctcggcctcccaaagtgctgggattacaggcatgagccactccacttgactctaagacaattttttaaatgtgtgctctatgaatgcagcacattatgtgtagaacttacaacaaaattaattcccaaatccagttttaggcatttaaagtttttataaatctgctcttgagtattagattaactttttggcagttggtgataatgagtgtggagccagtagatatatgtgtagtgatacagaattttatttgcaatcatgtgaggactgatccccactgcaagcttagttttatcatgctaataaagaaatagccacctttgttcttttgcatttcagaatttggtcccagttcctgttgaaaatatctcaggatccagcttcattgaggggttacaaggttgaattcgcaaattctgaaatgtttctctccgctagtgtagatcacatcccattattaggaactcctctgacacctgcatttttcttgtagtatgattttatatggtgcatacatggttcaaaatcatatttagagatgtaacagctctaggagactgtagattacactatttaaaagactgaagtttaatctctggtagggagccattaaagggtttggacttcagagtggcacagtgagacacattttagaaagagcagcacactagttcagtggaaatttgatgcttgaaaaaggtaatgtgtttaaattgggtgataaactggattgcttaatgaaattatataaatgaagtgttattgtacaaggttttaaaaaatataaacttacatttttaagtggcataaagggacagtgttaaccgtggctgagtggtaaggttgtggatttttattttattcctgcttttcatggaaaatttagaaaatacagaatacgaaataaggtgctaaaatgggtggaactcttgtattctgagtttgaccctaagtcaacagatgcatatttctaaagtgagttttaaggacaccatgtgggtgttcaaaaga

SEQ ID NO: 46644 - DNA, 1095 bp, Homo sapiens
gtagattgtcttatctccatttcacagataggaagcaaagatcaagtgagtgggtctagttcactctggcagatttaggacctgagctgcagctcatggatggctacccagtgggtttggtcagaaactcaaggtacagctgggtgcagtggctcccagcaccttgggaggccaaggtgggcagatccacctgaggtcaggagtttaacaccagtctggccaacatggtgaaaccctgtctctattaaaaatgcaaaaattagccaggtgtggtggctcatgcctgtaatctcagctactcactcaggaggctgaggcaggaaagtcgcttgaactcgggaggcggaggctgcagtgagtggagattgtgtcacagccctccagcctggggcgacagagcaagactctgtctcaaatagataaataaataaaaatacaaaaaaaagaaactcaaggtacagtggtgggagtcaaaaaagcataaggagaaaaccaagactgaaaactgttattgagcttagtctgtgcctagttcagtccctagcattttacaagttttctctgagttaacaaacttgtgggggaaactgaggctttcagatgttgaataacttgtgtaagttgtagagcaggtttcagagcctaagttacatccagagcatagacatggtttcagctctgctgtgttgccctctgcattcacaggaatgctttgtagaaggagtgaatacatgaacacatgaatgaacaaatggattagggagttaggacatgaaaaccagcttctgtggaaacttggacctcaggctccccatggatgacaggttcttttccatagttccgcattttttacctgcaatacagcaatgcggttgcccaggcccctcccaggagagttgcagcttccccggaggccacacttctccaacaccttttgcctaaaggctctttttccctaaaggctcaactcatcccttgcaaaatacccaaagccaaatgagtctagagggtaaaccagccatgtaggatgtggacctttagcaactgaaggaaactgaggtatttcagtatgatgaaatactctgtagtcattaa

SEQ ID NO: 46645 - DNA, 1034 bp, Homo sapiens
tctcgctctgccgcccaggctggaaagcagtggcttgatcttggctcactgcaacctctgcctcccaggtttaagcgatcgatcttggctcactgcaacctctgcctcccaggtttaagcgattatcctattctcctgcctcagcctcctgagtaactgggattacaggtgcccgccaccatgcccagctaatttttgtatttttagtagaggcggggtttcgccatgttggccaggctggtctcaaactcctgacctcaggtgatccacccaccttggcctcccaaagtgctgggattacaggtacgagctactgcgcctgatcgtgatttgttaagtttcatttcattcatttattttaaaaagtacttaaggagggcctgtgtacagaaactctgtttggccctgggtgaccaagattgaccagggtttctgctcccagggaacttaaagtctgagttaaataattggaagtgtgcagtctttcattcagtgatttattcagccatgcaccaggatgtatcagttagatgctttgaattgcaagtgtcataaatcccagttcaaatgggataattgataaaagcagttaagtggctcacataaccaaaaattgtagaggtaggataggtcagggctccgtcttcctttccttaagatcctcccagctctgtacttctgtctgtgggctcttctcagattgacttccttcatagtcgtgagagaaaagagctaccatctctccctagagccactgaacaaacttcctgaactttgtcctgattggatcatttcaggacatgcattcatctttcaattaattgtggtgggaaatgggataatactgattggcttagaccattcaggacctgcccttggaattggaggtaaggtgtgcctgactgaagaatgcctcttgatggggaaggagtggagtagatgtggtaggattggcgtacaaagatgggtaaaagtattatctcttattagacactcacctttttcttattttttaaaatattaataatagagat

SEQ ID NO: 46646 - DNA, 1046 bp, Homo sapiens
gacaaacctgcaaaatattttatcagctgttattggaaagtgattttaagcaattgcttcctcagtgtcagggcacatgtgaatttccacaccaaacagagcatgaggaaccagttgacatgctgggttgtgactggcagctttagcagcctcggtactgaagccacaccagtgtccggatggaagtctgcatctgaggttgctcagtgtcccggtcattcatttacacattttaacttgcattaaagagctgttcttttctgtggcctagactcttttcactgatctcaaaataaactggtttttttcaaaaaaaaaaaaaaaacaaaaacaaaaaaaaaacacaaaagctgcatgtctaaaattacatggagttagtgtctattctttttccccttttgcagcaacttacacagcatttttaacaccttttttttctagtttttttgttcggttttgttttccatcaggaatttgagttctctctaacccagcttactgtgggacataggaaaactcagtagaaatacctttggtgatcttgttgagtttaagtctgatcttgatcttaaactcagtaagccactatctgcaattttgtacattatatagtattttgaagatatggaaccttatgaaaaaaaaatagcaaattagttctttttcccccagaggggaaagttatgttctgcaaatagtgtgtgtcttattttactgttgaacagcaattgctatttatttttttattgcctagaacttcaacatgttgtataggaatcctgtagtgccactagttaaatgccgaattctcatctggatgttaccatcaaacatcagtacacttgtcatttcacatgtgtttaatgtgacagtttttcagtactgtatgtgttaatttctactttttttaatatttaaaattgcttttaaataaacatattctcagttgatcccaaacttctgaaatcaggccattttgtgagttgttcactaccctgctgacaggagagaatcaaggcttcctctggctgtgctttcgggtatat

SEQ ID NO: 46647 - DNA, 1068 bp, Homo sapiens
aacatggaagtaatagttcccattgttctagggccattggaggttgtagaaaaaaggccttaggtcactgaaagaaacatttggtgttcaatatttacagctgtcttattactaagaagtgctcatggggaggccatgaccaagaactgttgaggttaatgttagttgcaacttggaggttaatgatggctatagaatccactcccctgtgagcagtacttaatagaccttcagtccatcactgtcagaggtgatagtggcagtgagggaacatctctcacaggcctagaggtgttgcatagggtctcttaaggaaagcctttctcactttttcacaaggataaagtgcttaattttgttttcagttcagtatcaaagggaaacttttatggtagcccctaggctaaacctcaagagtccatttcttccatttaagtcttttcttcatagttcttaacaatttgtactactgttttagcttcctctgtagttggcacactaaaattagatgtcttttttgtttcattgtcttcaacattctttccacagaacccacctggctttcaaccaacttgggtattttgacctgtatagaatgttctggcatccatagggaaatgggggttcatatttctcgcattcagtctttggaactagacaaattaggaacttctgaactcttggtaagtagtgacctgtacttgggaagaatgatattattgtcatgagtaattttaatatattgttttggattttttttgtatgtctgctgagtacaaagaattataattcctgaattttgtgagtttgcgtagacgtttaaaatgtaacttttgtggtatgtaatgctgactttctatttcctgtttgaagaaaggatgaatcatacatgtctataagtagctcagtgaaattggctcttttcttttgggatggtcttcttcaaaactacatttttctttatgaattagttttcatataactcgtggaaatagcagttaaactcaaatgttcacattacctcatggcttctgttgtaaataatgactaaagagtttatctcaattt

SEQ ID NO: 46648 - DNA, 1026 bp, Homo sapiens
gtcaacaattttcctgagatagacttctttgtcactaaagtatagtggtgcaggaaagaaagaaaacaagcatttgtctctttgatgtactgggacttatgctgttataagttagagaaaacaaaatgactccacacaaaaaagttcatttattagttttgataatggagaaggctggacattttctgtggtcttctatttggaactctggaggcagtgaagtttgtaatgatttagatcacagacttagaaatcattaccagttttgtgacattgagccaaaatacttaattttgatgatccttacttgtaaaataatataaaaattacctacttctcagggtttttgtgaggacgagataaggtagtgtgttgaagcagttgtcacagtgtttagcatagggaagtcacacaataaatagtttctactaagttctctttaagaatcaaatttcatttggtcaaagtgataaatgtacgtaaactaaaacatcagatagtgcttttactagttaagacttactctgtcagcatgtaatggaaaccccaaataacagtggcttcaacattgttaaagtttatcatagaacagagcattctaggatggaccaggtaccctttgtagcacttctcacttatctgtattgtcctccacaatctaaactcagtgattttatgtcatacctaatggtacagggttctttacaaatcatgacagggaaaatattaagtaggcaacaaatgtgcttctaatggaaacacagtggccttctgcctgcccctcttgatcctgttagtccctcccctttttccaactcttttacctgcttcctgacttatctacacgttcctcagtattttcttgctctttctagctttagctgtgatgtattgctgtggtagacgaggattacattcccttgcatagacaccccatcactttcgcacccttgttcatccattgtggttaatagaacaatttttattaaactagtttcagtgtttacatttttataggtataagca

SEQ ID NO: 46649 - DNA, 1032 bp, Homo sapiens
gtttgctacgctgcaggttcctttcaactgtgtgtatatgtgccatacacacagctcagtggccattcaggccaacattcatcatctgcgtttgctcacctaatacatttgtttgtctccatacaaaaccatctgagatttattgaatgtttttgatgaacctggcagtttggtgggtgtgttatgtagattatttcattgaagacattacaacaatcctgtggttactgtacctttaatccagatgaggaaactgaggcaaattgagatatataacttgttcatttaccctattagtatgtgttacagacttgaacccaaacattctgtctctgaacccgttgcctttgctcttctacaatatcctgcctctgtcacctcatgctctggttgtgctgtttccctcagcagaagtactgatcaagctactcccatatacatacctcaagctacagccctttttccacacccactcccctttaaggagtagaagtctaagaaaaatctaaaggaaattgctggaaaacctaattcatttagtaaaggaaaacaaattttgcctttgaaagtggtggtggcattcctggtgagggagccaagtagaagaatcagtttctactgtagtttggttactaagaaaacattattctgattgaataaaaggcagtcccaggagtttacacaacttgacaacagccagcaactttctgcttccctttttatgcttttcctggaaagggaagagcaaactagacagattgatagggccacaccttggattagagggctcccagaaagccaactcaccccgagggggtcagggttctggatcttcgtgcagcacctgcagcccccagctgagcagcactcaacaccctcctggggctcaggagtacccccgtgggaacccatacttctcagaagattcccaaaaatcctgttctcttaggctagtgaaggccagaaacgttaagcaaactgatacagtagaaattaaagagaaggtgctttggtactttatagactttgtaa

SEQ ID NO: 46650 - DNA, 1048 bp, Homo sapiens
tgttagaattatcttgcaggccaggcgtggtggcttacacctgtaaatcctagcactttgggtggccaatgtgggaggaacacatgagcccaggagttggagacgagcctgggcaacatggcaagaccccatctctacaaaaaattaaaaattagccggtcatgatggcatgtgcctgtagtcccagctacttcagaggctgagttgggaggattacttgagcccagtaggttgaggctgcagtgagccatgttcatgccactgcactccacgcaggtctacaatagcaagaccttgtctcaacatcagcaacaaaacaattatcttgccttctgcaacaatgtcgtggatgccagaagtttcttaggaatattgggaaagaatgtgtcttcttaacggatggatcacatttctctgttcttttcttttatccagtcttcttttctcacctacttaccctaactcccactgtactatgtgcccaaaagtcttctagcactcgcatgtagtaaagatcttaaaacagagctgcatcctgctctctgaaacctcttgaagtgagtgggccattttctgccttatcagtccgtctccttcagaaacactcattcctgtggcagtgtcccaccaccgcagccttctttccctcctcttccctatacctctgaactgacattcccctcagatggcttactgtactctgcagtgtgttcctcccttctgccgttgcccttgctatttcctccaccagaatcatggttctttgctgtctcactctctgtgcctgttgaaagtctgctgggtaaacccttaattttgtacacaagtgtgtgtgtgttaggggacatgtgtgtgatctttctagtattgactttactaactttataatacagtatgttaaaaaaaaaaaagacatgtgagacctgtgtttttattctgtttgatattacagacatcgctctgtattgtaagtagtcatggatatatagcggtaacagtagctgacattttggggcacatgccacatgccagacactattttaagcac

SEQ ID NO: 46651 - DNA, 1032 bp, Homo sapiens
ctcactgttgcccaggctggagtgcagtggcacaatctcggctcactgcaacctccatcccccgagttcaagctattgtcctgcctcagcctcccaagtagctgggattacaggctcctgccaccgtgcccggctagtttttgtatttttagtagagacagggtttcatgatcttggccaggctggtcttgaactcctgacctcgtgatccacccactttggcctcctaaagtgctgggattacaggtgtgagccaccgcgcccagccggtactcccttttttaatagcactggaaacatgaagacaatgtataaaatacattttttccctcatatgctggttgttagcaagtgaaaaaagtattcatagtttgtattctccatatatttatatattgtctagcagttaagttttatacctgtttaccatattccttttgttcattctgtttattatatatatatgatatgtaggaattgtgaagtagcttggggagaggttcaactgtcagtagtcatagaactaagaacaaaaactaacatagggagggagggagatcccttgactataatcctaactccttcagaatctctccgccccaggtcccttgcccccctccacacaggcttccatgtaggcactcacactatttgcatgaactctcaagattgtattgtgtatcagagttcttactctctgttgactatatgattgcctcagggtacttccacctgaggagttatcagcctctaatttagatgggccagagtgtgtgttaggtatctcttgtatgaggtcttcctggtcatctttactcacaatcaaagatgccctgggtttccctaagcctaccccaagccacttgctcactcatcaccccattcccgtattttccgagcctcccaccaccctacatctcccttctagtccttttcaaacctaccccctggaagtagagttggaatttattgggtggttaagtcatcacattaggtgcaagtagcatataggcagaaatgcccttgaaagtt

SEQ ID NO: 46652 - DNA, 1045 bp, Homo sapiens
acagtgtgatctggggtaaatcatttatcctttataaaatggagactaatgtagcttttgtcacagtagcagaatgtatatggaatcactttgtgaacttagaggaaatggaagagattgttacagctggagcggcccagtgccccccagccttcttttttaaacaaatgaggaacgaagctctaggagtttgctgtgcccaggaacatcataatttattagcagcaatgccagacctagaggtcaggcccgcagggttctttttgtgacatcttttgtcagggcaaagcatccattcatggaactgggctgaatctttctcatactcttcccttaaagaggcttgcctttttgaaacttggttctttccttgatcactctgtcatagaatctgttcttggagccgctgatgaagtccggtcattatcagtacctttacttctgcaaaaaaatgtgactggtattatcttctacttggttgtaacggtttacgttctcctccagttctgttgttctccgtgaggaatgtagttttttacatgccttttccattggagagttacaacaaaaaagcaaaataaatctatcttttctctgatatggcctccttatttgttttaaaagcatttttatgtttatttggataatatttagaaaatataatagatttaaacataattttaaaagcatcaaaatgcttacgtttctctaattgtgcaagaatctttatatacatagtttttttttttaactgaagttgcatcctgccagtaaaatttgaacgaattgctttataagttgataaggcccctttaaaacccttttcacttcttagctcctgtgtgtacctctgtttagaaggtgttttctccttcctaggctagccaggaggagagcttttgtgtgcaggcgctgggacgcctcaggggactggtaattgagagaggggtattgacctgggtcatccatctgaaagtacgtaagtgctgctgcccaaagccattattactgccttccaggaatctttgataagtgaattagtggc

SEQ ID NO: 46653 - DNA, 1051 bp, Homo sapiens
ggaaggaatgtgaggaggcggagtagcacagttatatgacatctaatccaaagtagaatatgcgagccttaagagaagtgcagagggctgtgaggagtatgaagtggctggcaaatagattcagtattatatttcatttattcattctgcagatatttatggaccacccttttatgttgctattgctgtgctagtattggagatacaaagatgaatatgacacctctcgggccgttgccaactgtcgagtaccaggaagagcgcttagataaatgaccatgtacaatggggtacgtgcaattataggtccactgttatttgctgttctgaattccaaatgttaagagttttgacatgaaattttgtttcatgaggcttttagaagctaaactagaaacgtactggatatttaaaaactgtgttaccagaatctgataatggagttctacactagtccctgtggggtatgttgtataataaacaataagtatactgtaatttctttctgaaatctacaaaagtatgaattctaaaacagccagccccagctaaaggattgtggatacaagtaagatacttcaggtgatttgagagtttacctggctgtatgggctaccctgggaatataaccactctttataacatcctttcttcgagaatggtatgtgctaagttataaacagctgacttagggccatcattttaaagtatgaagccttccagtcttcgcctccccagtcttttccattcttaaagtttggaccagtctgcaaggtagctgcctccctaaggatttggggtattctctaaaatttgaatatatgatattcttgtgccctttgaatacgctgtttaaaaataaattttaaagaatattctcatgtaaaagtaacacacatactttggaaaatacaaaacataggaagaaggaaaaaatggccacattcttactgtgaacacactgatgctttttctgtgcatgtttttgtttaatagtgttagtctgacgccttcttattcattataacatacccattttcccatgttattt

SEQ ID NO: 46654 - DNA, 1035 bp, Homo sapiens
atgaaatcttttcagggatgatcctctgagccttctgtctagttactatcactgctgttgcttttatgacttaattgcctttgtggtttaattcacttcatgacacatctatcaccatgaagtttagactcttcacccctatctttccgagtatttgcttgatgactcctggggtcaaggagaggttgataggtggttttatgctgttaaaaataagtggtcttggctaacttatcacttagttaaaacagtccttttaattttaattaatgcattgaagctacttcttcctcataattttctacttcataattctgttgtctgagcccataacaatggttatttctattatttgtagagaattataaagctctttcatatttgttctaccatttaatccctctatctttatctcctcccctcccctcacccccctcccccccccaaaaaaaactgtattagccccattttgtagatgaggaagctgagacaaagaaatcataggcaagtatgccaggtcggtatggttaatgtatggtagaactgggaatttctactatagaaactggacgattgggatattacgatttagaaaagagcctctgtttttttattgtctgctattactgaaattaccatagtgttaacatcataaaaatatgtctaaagactcatgctgagttctggattttgacagattttcaactaaacctaggaaatttgcttggtcagtctttgatttttgtggacatggttgggagttcacctggcagtacagcttgtgattaaaagtccagttttagaggaaccaaaatctgttcttcctttagagccaatctctgtttgcattgagttttctcattttcccctagccatgaatgaaatatcaggaaattccaaatgcatctcaatatcagaactgtcttctttgtgctaccctctgcatagcactcctcggtggctgccctttgcttctgtggtgagagccgcatgtggtggtgcagcccacaaggccgtcctggtcacgcctctgtc

SEQ ID NO: 46655 - DNA, 1946 bp, Homo sapiens
ccagcctcagcctcccaagtagctgggattacaggcatgtgccagcatgcctggctaatttttttatatttttagtagagacagggtttcaccatgttggtcaggctggtcccgaactcctgacctcaggtgatccatccacctcggcctcccaaagtgctgggatgacaggcgtgagccaccgcgcccagccagccatgcctttttactatagaaataaagatgaaaaatctcaagtaatcccatcaactaaagatgattagagttaaaacatgttggtttataattctttataaaatagccttttaaatccaactgatttggactagggttgggggtgcttaggaaataaggagtagataataaggtagtatggagtagatatataattgtaattcccccttgagttttgagagctacttacccaaaatagagcatgacacggtttcgcctccaaacagaatttccatatgaaagattgaaccgctttgtgcttgaatcactgtgaatgttgctgctgctagttctttctgtaatgtgaatagaatttccttagataagttgtcagtgtattattttccctttaaaaaaaaaaacttcttttttagctgttatagatttcttagatttttatatagaaatattttctaaaattttttttacaaaaataaaatgaaaattgtgcctgttgtgctgcatgtgctttcaagttagaatcagtcattgacatattaatggcttcttccaggttggaaaattaataaagattatccttttacttgaagaaagtgataagagaagtagaaagaaaatcaggctgagattaactaaggaagcagcctttttattctactttcagccattcagaagagggaaaaaatccagagtttctaataagaaaacgaaaagttgttttgcattctggaatatttccaaaagcattgctattgatgttgaattccactttggggttggagattaggaaatttttggaagtgttgaagtaaaattagatgttctttgtattattttttatttgacagtgtacaaataatgaaactgtaaactaaagtacaatgacataatcacagaaatgatcataaaaatggttatttaacttgaagtgggattgaatattcaaaaagtgcaggtggtgtggatgggcttctgggtgaaattaggttttctctttcagcaggaaaaaagacagagttttcattatactccctgccattggtgatatggtgtagacctgtaatgataacaagcactcaacatcttcattgaaaagcaccagaaagatgcagagcagaagctgtaaacttcacaagtgccatcaaatcagactgtttcttcaaagttgaatggaaaatttcagatgttggtcatgaaatgtttactctgtgacccaaaaccaagttaacaggcctccaagagaggtgcttgctcttggatttgaaatagtagccatagtgataacttctcttctctgtgtaagccctgtaattttgtgtattccatcattctctctggatttagtggttctgagaaagcaaacctagaccttgggccgagacttcacacagaaatatttggggatctgctctatggttctctgggtttgggcctcagtttccccatttttcagcttttgtggattctgatcattctccccacttgatgtgcattgtgtgtttgcatgtgtgtgtgtatgtgtttctagatatgtctgtgaattttggggtgtattttttaaatgctttgcttgtatttttaatgttgctaataaaatactagctacatgattttgagggcttggcacctcttgactaggtaacagtactgtgctaaactctttacatgtttatctaatacttttctcatgataacctgatgtgggtggacgtcctatttttttacaaatgagaaaaggctctaaaattaag

SEQ ID NO: 46656 - DNA, 1089 bp, Homo sapiens
tatacctttttctgaactgtaatatttgtattgtactattgcatgggtctgttgtgagggtgaggtgaacgaatgcatgtaaagcatcacaggctccttaggtcgtcttatcccccagtgcccaaatatgtgatctagggcaagccacttcaccactctgagcctgttcttcctctgtaaaatgagtgtaatatgtatttcaacgattgttgtgaagcaaaaatgaagtaatggattaggcatcttacactccacattggtatgtagtaaatgcacaatagaaatagttgctataattgccatccccatggggaactggctgtcactattttatatgtaggttcgattttaggatcaagggagtttgctaccaagtctggccattgcctcttctctgttctgacttaagagaatgttttggtggatgggtgagatttcaagttgagaggagaggaaagtaaaagacttataaaaatggaaagaaatgcatgaaaacagatgtattacagaaggtctttgagaagttgtggatgaggtttggctagcctttagtacttcaattttcatgggaaggagagaaacctcttccttcacccccatctatacataaccaacttttatttcctgataggattatgtaacaatttttttctgttaattatcatggacatgttaggatttgattatttggagaggactagcatgcttaattagcgttcagaatttacagtttataacagggctctctttgcagtgtactcatttttgttacactggagacttctaaaaaagcaaaaagttgccttgattatcaatgaggaatcaaatgcaggtggttggtggtacaggaaatcaacccaattactgattaatatgagtgatagagtgattttcctatgatcttatttgaagcatgcaccactcaattggagttaagatgatagttacaagtaagcagatcctaaatcaaacttaaatgtaatttaacatggaaaacatgaacatcttttaaaatatttttgaattaatctcacccttttaccaacctgtggcattattttcttgctgttgatgcccaagcctttcctt

SEQ ID NO: 46657 - DNA, 1028 bp, Homo sapiens
gcattattagattctccttcctccccacctcccccataccttttatagtctgttttgcgctagtagctcagtcctccaagtggttttttactttgggcagtttttctttgttgttttttgtttgtttgtttgtttgtttttttaagagacgcaatctcaccctgctgcccaggctggaatgcagtgacataatcatgcttacttactgcaggttctatctcctgggctcaagtgatctcgcttcagcctcccaaaatgttgggattacaggcatgagcaactgtgcccagccagtttgcttgctgttaacttaaatttttgcacatgcaatagcagagcgacatgtaactatcattcagtttcaacaattgtctgcttttggccaatctttttttcatttctgcctccttcccctgattttttgaagcaatatcaggtatttcatttcatccgtaaatacttcagtatgtacttctaaaagataaggacttgaaaaaaataaacctgaaccataatatgttttctcgtctgaaaaaaacacttcctcggtgtcattaaatattcagtcgctgttcaaatttccctggttgtctctttaaaaaaaaatggtttatttaaacggatctgtatgagatctgtatgttgaaattcatggacatatttcaaatttcttttaatctgtggattcctccctctttttttcattgtaattcatttgccaaagaaagtggtggtttatcccgtagtttcccatagtatggatagtgttgactgcaaccctgcactgtcatttaacgtaagctacagtctactcttaacagacttttgttattaataatttcctcttactaaagaataagaagaacctattccctttgtagaaaatgaggacaagtataaaagaagaaaatttaaaagtcatccataagcccactaaccagaggtagccgctactgtcacttcaagtattttgctcagatacatctctgtcctgcttattttcatttaacacatcatgaacatttcca

SEQ ID NO: 46658 - DNA, 1030 bp, Homo sapiens
caccaccttaattatatctgcaaagaccctatttccaaataagtccacattcatggatgagggggtggctaagatctccactttttgcaagaggacgtgtcaaacgtatgtaatattagaaagcgcccacagtacctggtgcatggtgggccttgttgttgccttccctttctttccactttatctcagcatctaaagggtgagcaccttgagggcaggaactctgtgttactctgagtgagtgcttccagatttcttgccagggaagtgagacggatgtttttcttgtgctgcggcagggacattcttgtgtggtccctggttgatgggaaatgctctttcttgctactgtccttagtttttgcttcttatgctgatggttgatgagggagtcatggggaaagaataccttgattggaaagctgggcctggtgggtaaagtggttaaaccaggctcctctcctggttctgctgtttgctggtcatgtgagcctggatacatttcctcctctctgtgcctccaggcatctcatctgtaccccttaggagtttgtttgtttgttttgagacagagttatcagggaacctgcccctgatagtcacgtaggttcttttctgttttccctaagcgttggccgggttgagaaataaagagacagagtacaaaagagagaaattttaaagctgggtgtcctggggagacatcacatgtaggtaggttccgtgatgccccacaagccgcaaaaccagcaagtttttattagggattttcaaaaggggagggagtgtacgaatagggtgtgggtcacagagatcgcatactttacaaggtaatagaatatcacaaggcaaatggaggcagggtgagatcacaggaccacaggaccgggacgacattaaaattgctaataaagttttgggcaccattgtcattgataacatgtttgagagcaaccggtctgaccaaaatttattaggcgggaatttcctgtcctaataagcctgggagcgctatgggagtctggggctt

SEQ ID NO: 46659 - DNA, 1091 bp, Homo sapiens
tcagttacggggagccaaccattttttgcttagtgctttaatcatgttctcttattaattcttgctatgactgcatgaggtaggtactttccttatggttactagctgtgctgtaagagttcagaaatggacagattgttgcgctgggaaaattggagaaagcttcctagaagaggtggaatttcagctcggactggacaagttgggcttcagatagcttaagaggaatagcatcataaaaataagtttggtctattttcttttaagtccctaattttctaagtacagcttccacagaacaggaaatccaattttaaagatgagagaactagggcaggcacagtggctcattcctgtaaccccagcactttgagaggccaaggcaggtggatcacctgaggtcaggagttcgagatcatcctggtcaacatgatgaaaccccatcactactaaaaatacaaaaaattagctgggcatggtggcacatgcctgtaatcccagctacttgggaggctgaggcaggagaatcgcttgaacctgggtgacggaggttgcagtgagcagagatcgcgccactgcactccagcactccagcctgggtgacacagcgagactctgtctcaaaaaaaaaaaaaaaagaactaaagtatgaaaggataaataactcatcaaagattcataatctggattctaacccagatgtgtttgttctaggggccaacttttaataagtcatactgttagagtacaggatctggcaaggaagctgtcatcatcattatcatcatcatcatccagtgcccagtactggatgtgggtgacccatgtttatggaatttaagaataatgaatgaatgaatgaatattagtcctttaagatcatgaactttcttttcttttgttctttgctctgtctttaggcagcaggagcagtccctggcacagggtagttccctgcttctaagaaaattatggtaattgaaatgtattctttgttttacccttaacaacaacaacaacaaaaaaccaacagaaagaaaagagtcccagaaatgaaatcgccttagtataggaacagtatttatcttcag

SEQ ID NO: 46660 - DNA, 1062 bp, Homo sapiens
tgaaaacctgaaacctgcctttccaggtgaagtggctccgagggtcaccgggcgtaatttgctacctaaggaaagtccagtggttcttgattaccatcccctgccctccatgctgctcaggtttcctgctcgtcctttgggctggcctggagaagaaagaaacaatacgtcttcttttcttcatgtccctacaatgtgccaggaactctccaagagacttggcctatattatctcatctaactttcccagcaaccccgagaaatgggcctggtaatgcccgtgcctgcaaggtggaagccgtggctggcagaggtgaaataccttcctgggaataccttcacagctaggaatggcagtgccaggactcgaagccaaccctcctgggccaaagcctatgctcttccctaccatcgccatgggcgtgggttgtggggaagatgcatcacaagactgtgccttcctgttctttctctttctccaggcagacccagaaggcactgcaggacttcagagagcaaagagggaagtcaaggaaccttatcctgtggtttcctctactgatgagtggtggagttgagaatgtccatctttccccaacagcatggtagcacactcatttctcttccctactgtcacctggcatctgattcaaacaccaaattacttggactccagagtctagaacacgtttcttatgtggaattcttggatttctgtctttccttcctgctgcctataatcttctgaggctcccaaatgtctctgggtcaaggactaacttgtaggcctgggttttgaggtccctctgcagtttgccaagtttctttatttttatttttatttattatttatttatttatttatatatttattttttagtagagacagggtttcaccgtgttcgccaggatggtctccatctcctgaccttgtgatccacccacctcggcctcccaaagtgttgggattgtaggcgtgagccaccacacccagcccagctttttttttcttttttttgggacaaagtctcactcttgtcccccaagctggagtgcaatggc

SEQ ID NO: 46661 - DNA, 1035 bp, Homo sapiens
tgcttgccagcctcgtgaccttcattcatgcagggccttgttttcttgattcagtggggccaatcccggcccccaggggagatggatgctgcagggatgtgcaagctgtagagggttccagagaatgggcctggcgttctgcaagcctggcacccctcctggatgcttttctccagcccttggagcttaggcagtgtagtgttaggatgattattggatttcctccacagttcctggctcattcttttgtagcccttgttacagccttttgtgataatattgggtgtggcaggcctcaggacacaggatgtctccaactttctcctgccttccttcccctgccctaacacaggactctaatctttccctgactttctgactgtgggtcttgagatcctccccagagagggtcctaccctgtaccctgggagaaggaatgctgatgtcaggaagcttccataaaaccccagaagactgggttggaagagcttccagatagctgagcactggaggttcctggagggtagcatgccccttcccccatacctccccccacgcatctctctatctgtatcctttgcaccagtaaatatgttttcctgagttctgtgagcccttccagcaaattaattgagcccagaaagggggtcatgggaacccaatttgaagccagttggtcagaagttgcagagacccggacttgaggcttgtgtttggggtaggagttgggggcagtctggggcactgatctctcaacctgtgggaactgaccctgtctccaggtagatggtgtcagaattaaattggaggacacccagctggtgcatggtgtgtgggcacagaagtcttctgtgttgaccgttcgggtgtgagagcagaggataggcagggtttcagagattttaggaaataggtgggaataacactttctgagacttggtttccccatctgtaaaaaaggaagtagtaatagtacccacttgggagagttctgtgaggactcaaatgacacgaggactcaaaaagctgggtacg

SEQ ID NO: 46662 - DNA, 1030 bp, Homo sapiens
tctgttacctgcctagcacctcacctgacccagagcaggtgctcacctgagtaagacatcgttttttagggagccaggagctgtggtctctttccccatctctgccatggactctctgagtgaccttgcattgtttgggcctcagtttccctggcatacagtcaggggtttggggttggaggatctccgaggtcccacccagctctcatgcattgtgggttggtgttagccctggagaaggaaggtgtcaactcagtatggaggagtctgggattggggtgatggatatggaatgaagctacattctccagcttgctggctccgcagcctcagacaatgctcagtctcattgagcttcagttagctcgtttataaatggggatgtttgcaccatctgtagagttgatacagtattctacaccttgtcatctagtatacttagcacacagcatgtactcagtatttgatagctgatactactctgtttgctcaaagacagtgttttggtttttcgatcctttgaggattcttgatagagtcatggccttctgcaaccatgtagggtttagcaaatgtttttggtagagccaggtagatattttgttttgttggccatatggtctccaccgcagctattcagctgcaccattgtaacatgaaagcagccatagatagtatgcaaatgaataagtatggttgcgttttaataaagctttatttataaaaataggtggtgagccaggtttggcccacaggccatagtttactgacccctgtcctacatgctctgatctccagggccagactcacagaaatttccagggtatttgtgttatattttgatttccaccaaccaagcacttttacactcataatcaaatttaatttttacaaatggcatgccattttaaagaagaataaactgaggtcactggttgaagagtagagacctttctgctatgatggatgggagatgggaggggatggggttaaccaagatcttattctgcccctggttctgcatgtgacc

SEQ ID NO: 46663 - DNA, 1050 bp, Homo sapiens
gtcaccatgatgatattgactcacctgcattcagcacttctgaggtgacgaggaccttccccactggcaagtttattttatgctcagaacagccttgtgggaggtgaattttcatggttccccctcttgtagttgaagacattgagtgtcagagggaggctcggagggatctgctggtacgccttcaatatccaggaagtgaagaagctaaaacatggacttcatcctttcactcctagtcttgtgcttttctcactacatgttctcagttacttgttgggggcagaaagggagaaattggagaaactaaggatgttgaaaggtgttgcttgtatagctgctttttaaaaccacccgtactgactgtgagtttcttaggtaggactcatatgtcacctagtgggattgtggcagtgtctgaatcaagaagcgtctttagcgttatgcatatttgtgtacgtatttaaaattaagagctttatttcacatttcacagcatataggtgtacttctttgggggactagtgcaattattgtgctagagaatagagagctaaggcaaatttcactttagaggtgagaaaattagacccagtgaggttaattattttcctggcttttgcagcattgctactagacttttcaatcattccttggtttacactgtgaagcattttccttccctaaacagacctagctgaaacagcctttttgccctgaaatccttactggtttttattgttgttgttttgttttgtttttaagattgtggactatctggtttatgtgcagaagaaatggatttgggggtggtttcagttaaggaatcactcacatatgtattattaacttctgccattacatagttggtgtccggtgctgggcctcaggacctgctgcactgagctggacctggggtcatggctggtttcccttggactccctgtggattttagcttcctccctattgagtggtactatagatgggaatgagattcagacctgagtgagaaacagtaaatccagccttagtttctctcatcccacaac

SEQ ID NO: 46664 - DNA, 1052 bp, Homo sapiens
gcttccaaagttacttgggttgatcgtctcctatttcagtgcaattatggttattcatttaaagtatggttttgttcatttgtttgtttgtattttgttttaagatttcctcccatacttgtttattgtatttactttcatcctttgactaggtgaattttggaggtgagcgtatttcagtgaaaggactgagtttcgcttctttttgtttgtggggcatgaacagagaatggcagaggcctgagggtgtaagtttccaggaaggagtagaagtcctgggcggccatggccctgaagggacttgccccattgaggtagggctggggcgcacctgctgacacctggattctgaaacccttcagcgagagtctttcttccagtgctttgtcttggttctggtttctcttccttcaaatcaccattctgatttgcatttattcccattttatagatgaagagtcagagagtcagagaagttgtgttttctcctctgctggggattggactgggggctttcccaccctgagcctgatctttcttccttggcacaccatcttccttttctagaaaatgagcgttaagaatgacttagttcaggccgggcacggtggcttacgtctgtaatctcagcactttgggaggctgaggtgggagttcgagaccagcctgaccaacatggagaaaccctgtctctactaaaatacaaaattagccaggtgtggtggtgcatgcctgtaatcccagctacttgggaggctgaggcaggagaattgcttgaacccaggagggttcagttagttcagattattctcagggtttcttaagtgaacactctggaaatgttctggtcttcatgataaaggaaatgcaggtaaatatcttttatagctttaacatggatcttttaaagcactttactatattttgaattaaatgatattgatgattttggagcttacaatctattgagggagacaggttaaaccaataagcacagcattaaatacatgattacaaatcgtggtcatattacaaggcaaataagcaggagg

SEQ ID NO: 46665 - DNA, 1060 bp, Homo sapiens
gctggaatttttccccttagtatttacagcagttagcacctgtcttgtaactttgagcagatgtttatttaaaattctcgtatgttctcattgtaatcccatccccctccttccttcaccaattagactgctttttgaaaagtatccctggaacctagcccaatgctgcacacataaaacatctcaataaatgtttgttaatgaatagttactgaataaatcaatgaatggatactttcattcacacctttattcctcccagcatttagtactgctttgcacattgtgggtacttgagaaatctgcacactcacacccccactcacccgccactcctgcaacttctccaatatatgggagaggactgacaattttatctagtcttctgggtgattcctgagtgattctccaacagagaacagatagaaatgaggtaagtgtggtcctctctcattctaatcccttgtaatctgggcctgccaatagaattgttgtgtttaccaaatcaatggtctggttctgactttcttccctatggatgttctttagcattttgcattgcttataatccatgggaagatgtttgtttgtttgttttttgtttgtttttttttttttttctttttgagacggagtctccctctgttgcccaggctggagtgcagtggcatgatctcggttcactgcaagctccgcctcctgggttcatgccattcttctgcctcagcctcccgggtagctgggactgcaggtgcccgtcactgcgcccagctaattttttgtatttttagtagagacggggtttcaccgtggtctcaatctcctgaccttgtgatccgcccgccttggcctcccaaagtgctgggattacaggcatgagccaccgcacccggcctctgtttgttttttttttttttttttttgagacggagtcctgctctgttgcccagtctggagtgcagtggcatgatcttggctcactgcaacctccatctcccaggttcaagcaattctcctacctcagtctcccgagtagctggaattacaggtgcctgccatc

SEQ ID NO: 46666 - DNA, 1026 bp, Homo sapiens
tgctttaaaatttagtaagatggatgcataatttatgcagtgaaatttgaaaggtttttcaaaatgataaggccaaacctaagctaaatgagggggtaggcattctttataataaagctgttatactctgcccagctaggccagttatccctagatgctacagattaatggggcaatctgtgttatgtaacatttgttctatattattctgcctctaatgaggtgaatcaaagacgatgtcagttttaattctggatgcccttgcttcagtatagtataatacataggtacagccttttttagtagttttcagatggcttctttatgtttttatattgaagaaccactaacttcccattggcctataaggttagcaattgattatttatagcaaatggcttgaaatgttagatcatcagtatttgtcaataagcctgtaataacttgtttccctagcccttaacttagtgttgaagaaaaaaattgtggtattcattgataggacttagaaagcacagaaattacttattatttaagatttgttctaccaattgatatttaaagtaaaacatttttagttactgaacaccattctgtaaatgacagtattttatcctgagtatatggtctgaaatgacttagggacaactttttaaagcaaataactaattacaaaattgggtcttccaatttatttcaaattagatgcttttgtacaaatattcttggttagaaatagtcatataaatacactgttggacttgttctcattgatctccacacctcagttccttctacatgagtcatgggcttgaggttacccagaaatggactgtgaacctataaaccccagcatgcatgtggtattgcgtcgagcatgttctgtgattcccttctactcttgttacagctttattcattggatcaatgtgcattatttgctgtgtgtgctcaggtaatatttttgtttcttttttttagtttgaatatcagtttgggcttagttactttttaaaataaggctgt

SEQ ID NO: 46667 - DNA, 1001 bp, Homo sapiens
aaaacccactctattcattgtcaactaaattaacgcttttttaaataaaaggagtcatttttaacaataacgtcagggcagcaggcatccatgaaatgtatggtcactgatcattagggttatcattctaatgtgtttactattttgaaactctagggagaagaaaacttatttttgcatatgttggaaaaatgtatcctcatgtaggatatcagggtaatatctttaatgtttcatacttaccaagataaatttgtaatgcgtattttcttttaaaattagatttatttaggagaaattgcacttggtgaaccactttctctttaattattagcattaactttatcatttttgtttcaagatgtcacagctattgttcagcactagaaattatataaattattagctgaagatgatgactggcaacatttatgtctgttcctcctcttaaatttcttgttcagaaagtctgttgttgtaaacatccccgactggaagctgtaagacacagctaagctttcagtcagatgtttgctgctaccggctattcacagacatcctcttgatataattctgtcccggagtggagttgaggaggctataaaatgtgtgggaaaacctcagaaatctttagctgcattcttttactgcactgacagtgcacgtattatgatagttgaatgtagggtgctctcctaataacaggatatgccgtctcgagcttcccagacttagcgtgctgctgctgggccttagagaatttagttaaataaaaagtgtcaccgcctattcctgtttctgccctgtcaatgaaattttagtctttataacctttccaagtaggctggagtttaacatcccaacaattcaggagactgattttctccattgtaaattctgtggaagttctggagaataatttcatcactaccacccagcagtatgcaatctagaaatttcagctttccctatacttaaaagagatgtgtgtgcaacatttt

SEQ ID NO: 46668 - DNA, 1029 bp, Homo sapiens
tatatccagatgcacaccttatattccaaattttgttgcctgggattgactgagtacccttttgagttccctgcatcagagacgtgtttacagttgtgcttcccagtcttcagcatttatggtttcatgtttgtcaaatttgtttgaagtataaaaacgataatcttaattctgttactgatcattccttcattctctagctatttgtcacatcatctttcttttgaaacgtttagggaattaagaaattaataattttatactcattctttttccactcacatatctcactggctttgttcagaattaaattgtttttggtccctgtgtactatttccttctattaattaactgacggttgtttctctcttctgtgtttttgatgcttttttttttcttttactgtttaaaactttttcagaagatgtagcgagtgactcaggtgctagctagtgttactgatttcccccccatgttagttaataccatgtcaaatataactgaagaactctgttgtactcacagattatgcccctcatggtcagcagactattcagatacagactttcagggggaaggttttcaaaaaagtgtggctgcaatctgtaaatgcttttaacatctgcacattgcattactgttttcaaatgtttttgtaccacataattttatttaatattcacaactattctgtgagagctttattcttttatgttgtagggttttcttattttacagattgggaaactggtgtggagcggttaaatgacttactcaagattacatagctagttataagtggaaggacaaggatttgaaggaacaggtgtggcctcttccaggaaacagtataaatagtcagactttatgaaggataaattggtaggagagtcatttatctcacttgtctgtaaagaggattctttttctcaagtagagcgtgaagtagattatttactagaaaagcttgaaaatgcatttcagaaaattaaaactgctttgaaattaggtgcataataagaattgct

SEQ ID NO: 46669 - DNA, 1034 bp, Homo sapiens
cctcaacagaggaccctcactttgaaattgagtccttgtggcatgtagccgggataccaaaagttttcagtaccagatgcagagagagatcagtccgtttgggatcttgttaattctttctgtgcagctacttttgtgctgtgaggtctcttttacatcttgctcctattggccatagctgacatatgtctgtatacagtcctgtagtggggtacttaattgttacaacctgaaaagattatttcttgtaatatataaataaatttttatgtttttctctcttctctctttttcaagggaactgtagaattggacaaatcaacacttagcatgtccccctcctgtaggtcttgttgaccttggtggcatcgtggaggtcatatgttcatggagataaacagttcttgaacggtttactccaggtggtaaaaacacatgggaaagtgatttgggctgtgcgtatcttggttttttaaaaaatcatttttatcgagcgtttattgtgatcatggccaaaaataaaataattctttgactttttttgaaatactatacacacatttctatattacatttttaagaattgcttatttttcaatttttctagtatttcttgtatattctaccacaggtgaacaactcattttttgggtgacatttttagagcttgcttgaggggcactagaaagaagggcagtaatgtgatgtgaatgtttcagcttatgaaaacagctgtgctctactttaagaaatttgacatttaaaagtgtaagattgcaaaacaaattaattactagttggttatattatgtgagaattttaaaaaagggattcactaaaagttgttttcaaatacttaatccctttaaatggtatttatctaatgtgatttgatttgtgaataatcagttggcatacaacaatttaggaacagatttttggcatatgtaagggttatcagtgtgttctttgagttctctctttaccaaaagtatttggggacaaagttaaattcagtgttgttccacttatat

SEQ ID NO: 46670 - DNA, 1049 bp, Homo sapiens
tgcttcagggtttgcatgctccgcaaatcccatttattagctaattggcgcttgagaggtttcaggataaagaacagattggaagaaaggaggtaacacagcataactgacgcagaggagttcgtgcggattcctggcaggtcccgtctgcgactgtgcagttgaaacccagaactgtaaaagccacagtgcctcctggctggaacaggaatcccggttgataaccgtaccccaccccccactttcgcatcccagcaccccattataggttacagctcctggcattttcactgcctctgcttcactcacataacagtggacacagccaagggaaggggggcggggcaggagctccagccaccatgcctccttgggggccaggtgtccctctccataggcatgggctccctgggccccagattcctgccacacccacgcaccactcactggtaagccctgatgcctgcggctttgctcctggtgagcaccctggctcaggaggtgtccgggctgggatgctggggtgtgtggcccaatgtgagcaggaggcatgaactatgtcactttcaggaggatgcatctaagcagggaggccaccagccaagtctccccaggaagaggaaggcattgtgtggtctgtccccaccctcattcctctggcacctcacacttgtccctgtggagatacccatcctatcaacggacagctgctggtgggagggaagatacaggagggagggaagataccagagggagggaagatactggagggagggaagatactggagggagggaaggtgccggagggagggaaggtaccggagggagggaagatgccggagggagggaaggtgccagagcgggggaagatgccggagggagggaaggtacaggtaccggatggagggaaggtgccggagggagggaaggtaccggagggagggaaggtaccggagggcgggaagataccagagggagggagataccggagggagggaaggtacaggtaccggacggagggaaggtgctggagggagggaaggtaaaga

SEQ ID NO: 46671 - DNA, 1035 bp, Homo sapiens
ggtgtgaatcctgcagctgctgcttgagaatcagggttcttaactgccagcaacagaaatggactctggtcaacttcagcagaacagcaggtgcctgggaaggctatcaggcagttcaaggagccactcagagtcaggatgggggttcaggaggctcggctactgccggacccagctgaggtcacacctggatgcctcccggttcaggtacacccttggggagctgctctgggacctgaggctacttctgctccactcttaatcctgttgctgctgctacatattgttttcacgggtccttggtgtcactgccgctgagccccgagtggaaacatccaggtggccaagatcatgtgcctgcgttttagtccaccaaggacagtgacagaggggacagggaagctctccccacagccagtaaaccagccgggacccacataccaccactgctgcgcacaggagggaaatcgacccctcccgccgggcccccacccatgggaaggggcggagactgtgtgaccacacaaagaaactggcaaagatctgctgctccctttgattgcaggtgaccatttgatctccgggagccctggctccctcgcttggaacaggagccacagctgccgcgtgggatgatggtaagggttaagccctcggaatttatgtttagtgcctggcatgatacttggcaggtaggaagctctcaattaacgccccgttctcgagctacactttgcagcccttgactgttccactgagagctcggggcttccttctccagcgtgctccgcgcacacccctgcctctgaaggcatcattatgtgattatatggatacattgtgattacaggttagccttaaccaggcttttatacattgagacacttacaggcttgcattttagttcagtctggagtgggctttctggtactttaaagtgtatcatgagccctccttcttcgttctgtgtattttcgtctatacttaatagctgttctctgaggccgcattctctgggtctgtggttgatctttt

SEQ ID NO: 46672 - DNA, 1027 bp, Homo sapiens
gaagatttaagcatttgagtctcaatggaatcaactcacattccccgaatccaggatcactcctgatccataggagattagaatcaattctactggaaccagtgaaaaatgaatgagtgaggggacatgaaagcggcagaagtttccccgctcctcagctgttcctcagcatctgagaggagtggccattgcaagccacctccctgcaggggaggccagggccgccgcagccacagtgtcacagcagagccctctctgaggagaggcgtggcagtaataaggtctgctttgtgtggttcacatctcctgggcctgctctgccaggccgtgggatggactgcacagtccaggggaatttagtacagactctctggtggtgcccagactggccgaacatttcatttactgtgcttttggtggaaaataactaccctctgtggctctcactacagaaataaagtcattgttaatagccagggtttctttggaacacagtctcagaaagtgaagtctgttggctacaacgtagaaaactgccgtgaaagcaggcatccggaagggagaggccatttgtttgtgtcgctgtcccagtgcctggcaccggctggcactttctgtctccggaataggccatgcccactctccctttggatggtccgtttgctcaccctggaacattctttgaacttggaggcagcacccagcagagctggaggcagcggcatttcagctgtgacctgaaggatgagtaggcgcccctaggaaacaagcagtgggaagaaggaatgcgccatgagcatccgctttcggggagcagttactgtgggttccgaacatgactaatgaggagggatcagtctcctctctgctgagtcccttcacagaggccaaaatcattgaccctactgtctactcccctgagaacctttcttgagcccgccatttcttccccactgtccgcatccccgcagagacggcctgtcagcccctcactacctggtggcctgtctgtcccctcccacagcat

SEQ ID NO: 46673 - DNA, 1069 bp, Homo sapiens
ggcacctggaagtcccagagagcagtgagccagtgaccagccccggggccgagtctcagccctgccgccctcctgctggctctgggaattcacttttctgagcctcagtttatctgtgcataaaacgaggccagtggtctctgccttgtttacctcacatgactgtttattcagcagatgcccaaatgcctacagcatgccacgtgttcttccacttagccctatgtgtcgagtgcccaccatatgccaggcatggtattgcacataaggtataaaccaacaaacaagacagcccagtccccgcccttcagctgcctctatctggaccaccaggcctggggctgggcagtggctggggcaggccaggttggctggaagcatctggcaaggtatgcccagcctgccacgtactgttccttcacctgcccggacctcagcttcctcatctgtgcgatgaaaatctgcttaagattagaggggtgacatgaaatgaaacccggttgtaggacctggcagtgcagctgctacattagtgactgtaagtgcagaactcggaggacccaccagctgaccaggatgccctcccagaagcacaatggccagcaccctgagcccgtctatgggcaggacagcaaacagcaggacagggcggtggagggacacttctctgtgccacaggcccgccccctccccaccccctgccagcccctcctccatgggagtccagccttctcaggcgggggccatgctgtgatcatggccccgggcacgaaggcgagagcggatgttgattcaatttacaaatgtgatgaatcgcctgccgactgtgtttatttgtcagggctgctgtgaagctggtgtcagtgggggatgtctgtgcgatcgaagccagtatctgctttgacaagagttagaagtagggtttgttttttcccttagaaactcttgctgttcactttgaatgtggagtgcggaggcctggctggaagccttctcctcaggacaaagagctggacagcagtggaaattctagagcaagtttccacaggtgggaagctctgggcctaga

SEQ ID NO: 46674 - DNA, 1097 bp, Homo sapiens
ggctccgcaggagttgcgttttccttgaccaaggctcacccctccctgaagcgcagtggcgaggcgagtgtggaaggactcctgaaccagctcgtcctggagcacctgcagctggcgcctctgcagtggggtgagtacccgccagccacccatcgattctgggtggatgtgctccttttctccaaatgcacgagcaaggtcttggggggtgtggctgggcaccccaaatgttggtgggtactgaaggtcatcacgggaaaccttgggggaaaaagacgggctcaccatactgcgccagcacctctgtgtgaggtcatctttgttcacctaggcgggcagctcagcactccggtgacagtgcagacatgagaagggctcatcgcccgttgaaacaggtgcagcaggcggatcttggcctacatcttgacttgcacttggtgtagagtgggccgtcttccgaaatggcaattgactgtgtctggcggggtgtgtgctctgcaactgtttccagaactgagagtggcttgggatggcaaaagagaacagggtgtggtgaaccccttgcgttcaccccactcaccacgactatgcatggacagcttttcatgctgtctgtgtggaaaattgtttggtttgtaaatgcctcaactcaacgttgtgttcaaccccaagagaacgccattactggacacttagcacagtttatttgactgcttcttcttgttgcacctgggaacttccaccctacactgtgcctttctacattgaactcaaaaatattttgctgagaaacaagcttagcatttcttttgaagtgagaatctttattatctggaaattatttaatcagctcatctattttggatcccctgcagacagtcagttgcaagcatacatatcccctttcttcctcttctttacccaagaggtcattgtgaatgagtagctcctctttgatccaggatccggttcattaataaatttgttctgcccctttcatgggctagagacacatggaaatgattccagtggtgtgaggagaaaacaagcctttctccttgcactccaccagcgcccttcagcctggagaccccctg

SEQ ID NO: 46675 - DNA, 1024 bp, Homo sapiens
tttagtttctcaatattttcttttgtgacttgtctatcttcaagttaacttaccctctccccagttacctccattctactgttctccattcaggaggtgtttttgtttgtttgtttttttctgaggcagagtctcaccctgtcacccaggctggagtgcagtggcgcaatctcagctcactgcaacctccgcctcccaggttcaagctattcaggagttttttttttttttttattttaattcattgtatttttaagttgtaaaatgtccacttgcctctcttttatattttctatttctttgttgtaaattcctatttttaaaacttcattttgaatgtgttttcttttgtcacgggagtctggttatagcggctgctttaaagactgtcttgtggctccagcatttgggtgatcttggggtacccattcgttcttctgaatcgatctcgttcctgttgtcagtttcccattgtgtcttgggcattgtgggtgttattttttgcagactgtgggttctcttgggagcctctggagaatagtgatgatttgtcttgtcaggtcctcagtccagttaggttcagaccttaagttctgcctggccctattgggatgggaggtcacatctcagctcctcaagctcacctccccaggcctctgctgcattgttctgggtctctccagtgtgacttggttaatttttaacaaccagccttggatcatagcatttgctgatttttgtagtgcaaatacttgccttctgggcaatttcaggctatccacgtgacgtcactggatgaagagtggagaagagatgctaacagttggctcctgggagcgggaaccagctagctgcagcacaccattgggtctgtcccacccgtgtgcctcttggggagtcaggctgagacacgtgtgtggctcaaatctcatttcacggctttcccatgctgctgaggtctatcctgtacataactcagaggtaaatctgaaacgtgtgtgtgtgtgtgtgtgcgtgtgcgtgt

SEQ ID NO: 46676 - DNA, 1137 bp, Homo sapiens
ctaccgcacttccactgcatttaaagacaaactaccatgcttattaaaacttcgtctttatgttgactttttgctctctttaaaaggtgcatgcttttttcttaccctatgttaatatgtcatgttacagttgactctgtattctcttattcttttctattttcattccaaagactttcatggagcacccagtttgtgctaaaccgtatgtcgggaatggtgctgaggttgcaccgaaatgaccatctgaaacctgccatgatatgtattgatgcacgtgtgtactcagcatgtaaatgaggctgttgttcttttcattggggtttattgagcacttattagactcaaccccctatggccggtacagaaaaacagctctctccctgctcttgagaaggttttgttacagtgggattagaaaggagctggcatttattgagacgcagagtgtgccaagcatcgtgccacctgcagccctaaggaacaggcaaatttatacccatttaacacaagaaacagactgagacaaaaacagaagcaatgcgtgcacagtaggctattctggaagaaggaccaagcttgggcctgtgtgcctccctgcaggagccccaccgctgcaggagctagggctgaggaagggtgcagcatgcatcctgtgggagcagagagcagggtctgatgggtgagaagtctcagccctgggtgagagcaccctgccctggcagagagaggagcttgtgggcccagggtgatcctgcgtttcccaccactccgtgtgccgggaacccagcaaagtggggcttggatgcaggttatctggcatctggtctccttctctggggtggaatgggatgactgtgccccatgtccacctcccttcgaggatgagagatggtcaagccagtggccttgtctgttctgcccccacctctcatactgtgactcgcttggaggggcccagaggcactggctgagcagaactcttcacaacttcatagaaacgtcctatgtgaaagtagtagtcgtagttactgtttttcaaaatggataggtaccaaggacattttccccttgcaaagcctcccgcagacaggcctggtgctgtgccggaaggccttgtggcgcaggctgtgcgag

SEQ ID NO: 46677 - DNA, 1059 bp, Homo sapiens
acactttattcagcacatttttcatccttagaaaacacattgctgtctaatgttatatttcaggttcttccttcctttaaattcttagggaaaaaaaaaaatcactgctgggcccaggtcagaaaaacatgtagcttttatgtggctgttgggtctgataacagaaacatgtggctttcatatgggctggagagaaactcacatttcagataaggaagaaatgggtcaaaacattttaaagctgctgctttccctgacaacatcctttgcttgttaagcacgcttcaatttgatttggttcccaggcttgctttgaagacatgctgtgtgctagagaaggctgggcctgaggagttggaggtgagtaagagtgtgcgtggtcccctgggagaggcagagatggtaccaacatctagaaactgcagtgagtgctagttaagtcatattcacggagttcctcctgtaggccgggcctcgggcgcaatgctgaggacagagatatggactgaggggcacatggactggtgggtggaaggcagccttgtcttgagagaatagcagattgaaacatttgggtgaccatctttttctggtccccgccccaaaagaacgtgcgacttgacatggttttccctcatttgtaagtgtttttatgcgaaatgccttacacaggaatcaaatgtgcatttctaaatgtactgattggccgggcgcagtgctcacgcctgtcatcccagcactttgggaggctgaggtgggcggatcacctgaggtcaggagtttgagaccaccctggtcaatatggtgaaaccccatctctactaaaaatacagaaattagctgggtgtggtggtgggtacctgtaattccagctacttaggaggctgaggtacgagaattgcttgaacctgggaggcggaggtcgtagtgagctgagactgtgccactgcactccagcctgggcaacagagtgagactctgtctcaaaaaaaaaaaaaaaaagcattcattttattcttcaccttgactatgtggagcaaaatactgagaataaagaga

SEQ ID NO: 46678 - DNA, 1032 bp, Homo sapiens
gcttgtatagccagagtgaccaaggagcatctcttgaggaggtagcatttgtcctgaggtctgaaccatgagaaagagatagccatctaaagagctaggggctctggtaagccacatcttccaagcagaaatcacagctggtgcagaggcccagagatggtaccacgtggtaatggaggagctgggagctgaagcctgctctccaggaccttgtcagtgatggtgggtttttctggggctggcggcgacaagctgcaggagagagccagggaatggtgcggttgctcgtcatgcatgagaatggtcactgtgactgctggttggagatggattgcagggtggagagggaaacgtggacgagtagaggcaggggagacgaggtggggagccagtggcattgtccagacaagcgatgacagtggcttggatgagggcggcagcagaggaggttggcgacagtggtcagaccttagatgcactgaagaataagcaagggtgtcttttaaggttttggcctgagcagctggacggtggttgttttatttactgagatggaggaagctcggtggggattagaatgtggggaaaacacaaccatattcttcaggcgagtcatgtgtgagcaccgttcggctcttcagcggggctgtgcgggagcctgttggtgttccatctgtgctccagggagaggtctgggctggagggagaagtgtgagagtcagcagcttagaggcagcgtttaaaatcctgggcctggatgacattcctgagggggttgcagagatagagtgctgtgctttcgaggcaccccgacatctgcagggtgatggggccggggggagggcacgggagacagaggaggaagagccagggactgggaagaaaagcaggcagctcaaaagctggaaacatggggcgtggcttaggagcaaatgacagctgctgagaacgtcaggaagacaaggccaggatgttgaccactggctttgagattggaaagagtcatttcagaggagtaggaggatggcaggc

SEQ ID NO: 46679 - DNA, 1026 bp, Homo sapiens
gctttgtcaacgacagcactgctgcagcagtgcacgagaaccagacctggagccgggtagaggaggtccctccccttctgactgcaacacagctccacctgcaacctgagacctgggtgagcatctttgccctgccccgtgccattgttctggctatacaccagcgacctggacaggttttcacatctctatgctggatgggctggcccagccggttgtgcactgtgaggtgctgcaggaggagctgcgaggacacattcttcttgacttctcagcataggaatgtctcacgtccagtccacgtccctgtcctagtcctcctctctgctccttccacacttcctcacggtggtctcctgcacgctcgtggctgtcagtatcagacgagggcagcttctgcattttctcaattccaaccactcctctccacttacctacccagtatctctactgggtgtcttccagtcatcctgcactcaacgcgactgacaatttacttccaaccggctttacaatttccctgactttgttgatggcaactttttccttccagttgcttaagccagatacgttggagtcattctttaccattctgttcaacttcatacctattcctcaagaattctggtttctctatctctaaaatgtatttggaagcagctacttcttaccttcttttcacggattcaggtcaccattcacactcacttggattattgcaataatttcctaactgggttccatgtttccagcttttctgtctgcagtctgttttgttttcaacatgtggccagagggatcctgttaacatctaagtgaaatatatcatttctctgcagtggctccctagctgctcagagtaaaatctaatgtttttacaatggcctgaaaggctctccataaccttatcccctcccacttacctccctgtctcctctcctccctccgacactcagcccctgtgtattttagctattgaaagaatatgtgggcacactgctaatttattgtctttgtggaggcttg

SEQ ID NO: 46680 - DNA, 1048 bp, Homo sapiens
gctgcggaggaccttggtgggcatcagtaccctgcggattgtagggatgctgaagctgcgcactgagacctagctgcgtatctcccctgcggaaggctgcggaggacttgggtgggcgtcaataccctgaggattgtggcactctttccgcagttccctgctctaggctgcggaggacccgggtgggcgtcaataccctgaagattgcggcactccttccgcagtcccttgctcttggctgcggaggacccgggtgggcgtcaataccctgaagattgcggcactcgttccgcagtcccttgctctaggctgcggaggacccgggtgggcgtcaatactctgcggatcgcggggatgctgaagctgcgcgctgagacctagctgggtatctcccctgcggaaggctgcggaggacctgggtgagcgtcagtaccctgaggattgtggcactcctgcagctgcgcagagacctagctgggtgtcctcccctggagaaggctgcggaggaccagcgtgggcatcagtaccctgcgcgtcacggggatgctgaagccgcgcactgagacctagctgggtgttcctaccctgtggaaggctgcagagacccgggcgggtgtcagtaccctgtggattgcggcactcctgcagctgtgcagagacctagctgggtgtctcccttgcagaaggctgtgggggacccgggcgggggtcagtaccctgtagactgcggcactcctgcagctgcgcactgagacctagctgagtgtcttccctgcggacggctgcggaggatctgggcgaacgtcattactttgtggatcccgggatactgaagcagctgagacctagctgtgcgtcgtcccctgtggaaggctgtggagaacccgggtgggcttcagtaccctgaggattgcggcactcctgcagctgctcgctgagacctgtctcccctgcggaaggctgcggagaactctggagggcgtcagtagcctgcggattgcggcactactgcagttgcgcagagacctcgctgggtgtctcccttgca

SEQ ID NO: 46681 - DNA, 1045 bp, Homo sapiens
tgtaaatctcaattaaaaaaaaatcctcaaagctaaacatttttccttcttctccacttttcttcttgccctttaccccccaaactcatgtcttctgaataatgattataatggctaccatggctcaggctcctgccgtgtgtcatctgccatgctaggcacttggtatttgccattttattaattattacaataaccccattttacagatgctgacatcatcagaggctcagagaagctgagccacttacccagtttcacgtactagtgagcaggtggagccaagactgaagcacgttctagtctgactactggacatattttgctgtctctgatatttccgtaccacattgatgaaatcttcctgataaatatttccaatgcatggatagctaagtttatgccatagtctatagacatatcttagactggggtgagcaaatgcttgcatggggcaagcgagtcccctactggaggtatgtggggaccagaagatctgtaccctgactgaaggcaattcaatcaccaagtttcatgtgacactgagtgggctaaccagaagatttttttttttttttttttttgagacagagtcttgctctgtcgcccaggctggagtgcagtggtgcgatctcggctcactgcacgctccacgtcctgggttcacgccattctcctgcctcagcctcccgagtagctggaactacaggcacccgccaccaagcctggctaatttcttgtattttcagtagagacggggtttcaccttgttagccaggatggtctcgatctcctgacctcgtgatcctcctgcctcggcctcccaaagtgttgggattacaggcatgagccactgtgcccggccacagaagatgtctttaatccaagggttctagtttgtgattccactgccccatctgttccatcttggttctctccttcctggtaattcttgtagtagtcttgtagactattaattgaaagctgttatcagttaatgggttgtgcatacgtcagtataaaacctagtacaaatgcagaccct

SEQ ID NO: 46682 - DNA, 1072 bp, Homo sapiens
aaaagcaagctaatttgaaaaagaacctcatggagattctaaaataaaaaatatatagtgacggctgggtgcagtggctcacacctgtaattccagcactttgggaggccgaggtgggtggatcacttgaggccaggagtttgagaccagcctggccaacatggtgaaaccccatctctactaaaaatacaaaaaacaaaacaaaacaaaacaaaccaacaaaacttaactggacgtcttgtcaggtatctgtaatcccagttacttgggaggatcaggcaggggaatcatttggaccctggaggtggaagttgtagtgagctgagatcacaccactgcagtccatcctgggtgacagagcaagattctgtctccccatgccccccacctctcaaaatagatatatggtggttgaagtaaacaaaaacttaaaacacagagttgaggagttaaagaagagactagatgcaattgaagacagagtaatttggaagatagagcttagggaacttcacaaaatgggttacagtgagacaggtagaaaatgtgaaagaatagttgagagcatagaataagagtctagttggagatccaggaatagaaagcagaaaaaatcctggagagaaaaatattcaaagagatggcaactgagaattagcctgagaaatgcatgcatgaggtcttaaattgaacaagtacatcaagttttgaattttcaagtttaatgggaatgataaatcctcagatccaagaagctgaacaaaccccagtcaggatggacacacacacacagtcacataagttaatcaaattactgaaaactggttgtattgagaaaaatctttagccagaggaaaagccacaaattacatgggaacaaaactgatgataattgtagacctcttgttggaaaaaatgctcctggaagacagtggaatttgatctttcacttggtaaaaaaaaaaaaaaaaaatagctgttaacttggaattctatatccagcaaaaatatccataaaaaaatacaaataaagacaaaagctgagagaattcctctccagaagacttactct

SEQ ID NO: 46683 - DNA, 1049 bp, Homo sapiens
ttttgtaacagtatacacagtaggcattggtaagtaaatgagaactctatgagctgttttctggaaaagtttaaaataaaatttgtcaaatatcaaatgattgttataaaaaaatcagtggaggcagtatccttggaaaaatccagaaacagttttgtttgtttgttgttttttacatcaaggcagatcagcaggtgaacagtgtttgggaaatataggacgggagaccttctctcaagaaactacataaacaactgtaattaattccattgtgaaaattgcattctggtttccaatatctatacctcagcttagaggaagcaaactggctggacccgcaggtttctgttttctctttcggaatattttgctttaggatgccttagacagtcacgtgcttcccagccggccacagtcccgcctctgcctggctgtccacttgcctccgtcacactcttcttccccctctggactcttagaggcctgggtctgtgagccctgcatccggcgttagaatagcacggtggtgacatgctactggaacacaggaagaatattacatctgttttcatctcatccttttgaaaagtacctttttatttcagaatggttttagatttacagaaaagctgcaaagatggaacagagagttcccatgtatccctcatatcagttttctccattgtcagtgttgtacattactagggtacatttgccacacaataagaaaccaacgtgggtgcgtcactgtgagttaaactctatccttgattcagattttactcatgtatccgctcctgtccttttctgtcctgggtcccattcaggacgctcgatgacatctatcctccgggtcttcttagtgtcttccggtttatgatggcttgtctctccttgtttttcgtgacgttgagagtactgaggagtgccggtcagatattttgtagattgcgcctcattttgggtttctctgatattttccttatagtgagaaggagtcgacgtgcccttcttatgccgccgccgcaggggtgcccacctgacttgtt

SEQ ID NO: 46684 - DNA, 1016 bp, Homo sapiens
tgttacttatgatttttgttcttattttgtagatggaatcagtgtgagtggctttcccctgtccagtccttttcggcaggtcgttcggccccgagtggagggcaaacctgtgaacccacccgagagcaacaaagcaggcgactacagccacgtgaaggtgagttggtatggcagacggcatctgccacgtgccgttcgggcttctgcaaagccgtttctgaagcacagctctgagtccttttcagaaaggaaaggctatgtgtatttgaaagctggattcttggtattctttgttcttggacaatgttttggaaagccgtcacagtgaagcttgagtgcattgtttggtgttgcaaactcttatgtccttggaacacggagattccgtgggctgaatccaggcgtgcggtgattaaagcagactctctcctgccgtttctctattcatttgaaaagtttatttattgcatacctcagttcggatgtttaccctgtacatttttcttaatcttttggcaacccttcccaattgttggtttggaagcaccaaggaagccaagacagatatgccggtagcaagtgaatgtcagtgcaaagctacgtgccgcgggcttgtaggccagcagtgagcagaggtggctgctggctccgtggagaggcctacacaagtgctccggggttttgagtcttcagcacatgggaagctctggctgtttgagctggcccagggacagcgtgtagagcaggaggactgcagggcctaagagctgtgactgggctgcaggcggcaatgtcactttcaggcacacttgtgttcaggaccagcctttgggatgctgtttacagtcctcatgccaaatttaagagggcagggactggttaggaacatcagaatcgcttggccaagatgcttgtgagtcagtgatacagtggactttgaggcattggagctgctgtcactcaaccaagaggaggggtggaggagcatggggtgctatctgatgaggtcatggcaa

SEQ ID NO: 46685 - DNA, 1035 bp, Homo sapiens
gagagattttataaattgtgtccatggtgctgagagaaatgagaaaaaagagagaaaataaactcattcaaacttaacagcttttgattgagtctttacaaataagtcttcgcacatatctacctgatgaaatttcagttaaccaggagttggttgttgaatgtgactttgggatgatggaatttttattgagcgtgtgtgtgtaaactgtgtgcgtgtcaactaaatactggatttgaccctgtaatttattcattcatttagttactatttactgagggcttacaatttgttagagcctgcatcagctactatgaggggcataatggtgaatctgacaagaattcagtcttcaaggagtttgtagtcatgaaggaatgtaagacatgcataatttgctgcagtaggaataagaacagctctttttactgaatgcttgccccgtaccaggcgttgtgataaatccttcctatgcaataattcgtttattcttctgtataacctcacagtatatgtgttctaattattcccatttaggggatgatggatttaaagcttgtagaaggttatttgacttgatgaagttcattcagccaggtagaaggggagccgcacctcagccccgacccctctgatctcctaccgggctctctgcatgtatacagatcagcaggaggtaggcacgggtctcaggacagagaagatgctggaactctgaggaagacgtacttgctttccattaggacagctaggggaggcattatggaagaggtagcatttgaactgagaccaaaaattggggcatattaggatatcagattgtcagagggaagagaattaccaatacataaaggtaaaaaaaaatgggggtagaacaaggagtgacaaggaataaattctggtagaaaaatggcctaccagttgcagggactgacatggttcaaagctgggccttaggcccagtgagggctgctttatttacggtctaccctttgctttgtggccctacctgaagcttcccagatttgctatcca

SEQ ID NO: 46686 - DNA, 1047 bp, Homo sapiens
tatgattattttttctttcctaagcatattccaaagtttctgaatgaacgagcatgccgctttctttatggaaattaaggatgagtattggctaatttcttagccaactgcttctactgctttggttttcttgaggatattttatgataaccagatgggcttttttggcacctgtagattttatgactaaatgagaaagcatctttaaaatatattctacctggaacagcataccctgacaaactcccactgagcgattgttgcctcctgttgcctttgttaatgtattttattctagtttatttttggtgcctctcacaagagagtaaaatgtattcaaccttatgcattagtgtctcttttgaaagtgtaccaaaatggacacatccctgcatagatcccaccactggagatagatgctaagcccctgcaagggtccttgtgatcggtttagtggaacgcatggtgtacagttttgacccagtgatgtgctacagaacaaccttggctggtgagcttttctggaagctcagtgtggggactgaaatgtattccttgggtcagttttgctgggtagtgaccaatccagttgtcatgaggcctagttctggctgtgcttctgatgagctgtgtgatattgagcaaggtacttaccttctcagagcctcagcttcttcatctgtagaattggtaagagaatgcctgactttgcagggtgtgaagagttggatggtgtgcactgagcgcctggtgccaggccacggacgtggcccttggccctcacccctttctagaagagctgtttttattgtgactctgctttttctttcccctgcacaaattctgctttcagctgtcattttccccaattgtcatcatggttgggatatggctgaattctagagagaagtattattttagcatacaaaattgtctttctgaatttcccacagagttgctcttaatagaaaagttgagcactataaatgggaagtatgaaattctctctgaaagctcagttttattcatgatgatctaccagactca

SEQ ID NO: 46687 - DNA, 1050 bp, Homo sapiens
ttgcattcatcttaggcttcgcttcagccccaaggagatcacagggaggtggtcccatcccctggggagccggggcccagtacagaacctgctggcagttgttaatttggcatggtttctgcataaagatggcagaagagtagcatttttattctactctttctcttgaaatctcccccgaacaacaaagtgtgaagaaacagtgaaaataaaaccattccctgtgaaacaaggaaatcatttcaaccccccgtaacaaagcatcggccacaggtgtcgtggaaactgggttagagggagggcgagagcggaagtgggactctgggaggactaaggaaaagctgttccccgagtaggcaacgcagcacccaaaagtaccccaacaatgaaagccaggcagaggggcctgggcagatgcctggagcagcaggaatgccgaggggttaccttttctgtgccaggcctttggccaagaaaggggaggcctggggtgggaggggaaggaggcattggagctcactgatcacacaacctgtgtgtgaaaggcttcactgcaagcctcacctgcattttcaataacaaaaacacgggcggcctgtctctaggataagggaactagtggcatagcagcccaagccgagctggatcacagctgtcggtggccaggtccctccttgtgtcactccggggccaggcaggagacaggccacaccagaacagaaagaatcgctatgaacaatggctgacaggtgcagagtgtttgagaggcaaagataatgtaaagcaacaggaagtgcgaggagggaggcagctcctgccctgggctggcacagcctgtgaagaggttggacgagtgtggcccagaagttgagaggaagtacccaggagcggcaactgagacctcagaggagtgtcccggctccggtgctggagtctcagctcggggcacccagacctctggggagggcactgtctggccctactgttctgtaaaataacactaagaatggtacctacatctcattgatttaactgagaattaaatgagat

SEQ ID NO: 46688 - DNA, 1029 bp, Homo sapiens
agtaattagacattttataacaggtcacattggaggctcttttaatatatgtgtgtaaaatatgtaaatgtgaactcttattgaaacgacatgtttaaccacagcctgtggtcttcaccagccctaagtgaggacggaggcttcaagttggatgtggctcgcccattagactgcttgtctccctcacatggtcacgactggccattgcttttatggccagagcccttagttaattcccccccagtgctgtgatctctcttcggtgtatcttctccatgctggaatcctgaggatagtttctttttttttctttttctctttttaaggtctaccagaaatactggaggagaatatatgtttaaaatctgagtttgaattagtcatggtaggaagttttgatccatggtatttgtagagtgagttaggagagattcatcatctcggtttggatgactgacaaagctgcaaccagactcagctagatttcagatcaggcggttgatgggaaaagagaggaggagctgtgatcatgatgtacttctaaggtctgctttcttttggtggattgttagttcccagtgagaaaacagagaacgaaatcactatgcttccatatgggctgtgtttccattagatataaattgcgtttgatttttgatgaaaaggcagcataaccctctagaggtgtcaggtgccccttgtcctgggaaggggacgcacactgtgattgatggggtccaagctgtatgtttttaggtgacaggaaaatttgtttatccatgaaatgctgatagtgtcttatggttatttaaagtcatattaattagtgatttaaagacacttagtttaaaaggagaagaacttgggacacttgatactgttgaacaaataacagtctcttgaaagacctttatataatgatatttggttaattggagtcgtctgagaaaaggacaaaagtcaggaggtctgagaggttctttccactcatctcagcctctaattactgtaacctccgatcaataatta

SEQ ID NO: 46689 - DNA, 1028 bp, Homo sapiens
tggtttcaaagacaatgcagacgtaattggcctttgactttgggacctcgggttactctcactccctactgcaaaacaaactaagggttgaaagcaaagcattctgttcaaatccagggccctttgtttgaaaagaacacagggcccacagctggtgttttgaagtagaagttcccactagtggcgcagtggaccgtctgatgcagacttgcaggaagtcggtcctgggaggctctgaacacccctccctgtgattaaccactttgctgtcagaaatgtcattttcccatacactgtgctgtgggcccggggcctccttcgcttctttctttgggttccatatgttgcccgatcttgaggttagcgctcgccccaatttctccatgagtttactctgagttgacaggcgatgatctgacagttggaggtgtctgggtgtttggaggtggccccgttctcatgttggctgctcatcagacattgagtttggccccggcggttctactacgtcactacctggaagcaattgcctttaacactctgctgtttggggtttcgatgctttttatgctgcgttgcgtgctttcattccggaagagctaagtgtcctttgcagtctctctgagaatgttttgtaattctgccgccacgctgttctgtgcggaccgacctcaagaggcttgggcccccgtgggtgtcccactgcctgccggcccagggtacaggctgcttgggtccgctgggctggccttgggctgtcagaatctggtccagggtgtttcgaggggacactgcacagccgctcgcccctcgactcagtcatgggagctgcagcacgcagatccaccgcaagcttcctgcacgcgcatctccggaatgctgcgctgggccctcccaccatcttcgcgtttgtgagaatttactcagaagtgagagaactgaagattcctggtgcttttgttaacacgtttctatcttattggttggtgtggaaatgttagatgtgttgttaggtttttaaatgctgt

SEQ ID NO: 46690 - DNA, 1044 bp, Homo sapiens
ggacaatcccagtggcccagacaagccatacgacattttcctgtgacctctctctgacccatctctcacgctcatgagaaaaggaatgtacaataaatagaaacagaaacttcctcagtgctcatgcgcctcacttgcagaacgtgagtatttcatttatgtttgaagcccttccccaaagtgaccgaggagttgcactctagctgccgtgccagcagtctcgtctgctgtgacgcttctcggtgcggatgcagtgcacctgtgactttgtcatgggggtgcccctgttacacacacacacgctgactcttttttatgaggaaaatcttcgactcaaaataattgcactgattttttgacaacttctttttacgatgtcccacttcgcatctgctgtacttgtttgagatgattgtaaatagatttgtggtaggagaagtgacatgaatgcaacacgtggctctgttgtggagacactgcctcgtattcagtattatgtgttaaagttgtgtggacttaactctgttccgccctttagcttcgtgtctgttgaccatttatgaaggacaagttcgcctcattttctttttcttctgaagggaagttctagatcggttactaggagaacatggtctcttggtgcctgatgatttagtcctaagcagactcgttgcagtcttgtgaacactgttgtggtctgtttgattcctcgtcgcttaccgtggctctccaaagcatggtctttgagttccacccagcctgggacagtccagacgggaggcatctgctccgcctgctactaggacgcaagggcctccttgcatctctgtggtcagagtcatcttaaagccatgaggttactgtcgtgtcaaagctgtcatttgtgcccgttattttgctggagtagcagcgtgtgctgtagcccccgtgtgtcactctgtggtcaggctaccctgtgtcacacccagcaagaagtttttcagccccagaccagtctgtgtgtgtgtccgagtcacaccagtgccattacggtgccctcgctta

SEQ ID NO: 46691 - DNA, 1576 bp, Homo sapiens
ttgccaatctagaaactgttgcactaagagtgacaccacggacgattttgaaggctaacaacagacaactctgtttgtgctgagtgggctttttgtctctgtacacagttttagtaagactcaaatccatgttccgtgtagaggcgtcaggaaggaggcgagcctcccctagtgctgctgtgcgctccgtaggtcccctcttcctgctgctgttccctccccggccctgcgcgacacttacctcggcactgtggtggggtggggtgccaaaggagctgcctcctgctcagcggcacccccccccccacctttgtgctcagctgctttggaggcagcaggaggggcagcaagccgcaggtcgggggtctcccgatacctcgcctggatattggcggcaatgacaaagggatgactattatttgtgaagatgtgtactcagagtggtgtgtgtgtgtgtgcatgcgtgtgtccctgtgtgtgagtgtcttattaatggcattagtctcttctggctgtatttttttttaatctttttaaatgacagaagctcccactctaagaaatggcagttccttttgttttagtggcaagtggcactttctcctgttttcagaaggatacagacatgctcgtagcttaaattaatggatgcattcaagctaaggagggaatcttgtgactaataacttttcaaatctgaaattagattagtttccagccatttttacaatcatctggaaccatgtgtctcaaaggtgtgtttcttccacctgcgtcaggctgtctgggggatggcggttcttgtttaacatgcagatttgtgggcctgctgccacctcctgcgtgcggtacttcagggatggccagggcatctgtgtctaagcgatggcctgcagccctgggctccctggggtctgaggacccagctctggtggcacccagcagggaggaggtgcttcctgagcagatgcctgagacagactgggctggcagaaaagtaggactacaatttttgttttttttaatcattttgaaggaaaactttcatttttagtgggccagagtacttcgaaaagggtacttttttatagccctatgcttgttttataaaacttttaatactaaaaacattaatagaccaaacatctccagctgggtcagctgcacacctttgtacatgtctgatgattcagagtttaaatggctgtagttacaatttctcaggtaaacaattgttttctcaaatttttaccaatccctgcattattaggataaattttgagacagtgtaaaaacctcaaagtacagtagggtaagtcccagccctgttcacgtgaaagccagaggtggcccttccccggcatctgatcgtctgatcatgtgggtgcctggggccttgccacccttccctgtccactgctgcccccctgggcctgtcaagatttgaggggtgcccactcgctggctttgtccccatcccactgttaagtaaggtgtgccttgctttaagcaaactgaatgtgaaaattatgtgtagaagtctgggtttgtttaaaagaaaaactgggattttatc

SEQ ID NO: 46692 - DNA, 1031 bp, Homo sapiens
tatcatctacttggcacccaggaaagaatacttcagagtgttagactccctacaggcacggctgtgcaaggacacagggaaggtttactgtgcaaatggaaggtgaaacagaagttaagcatcacagtgaggaaaaaggatattttatcacagtaaaaggaatcattcaccaggccaggcacggtggctcacgcctgtaatcctggcactttgggaggccgaggcaggtgggtcacctgaggtcaggagaccgagaccagcctggccaacatggcgaaaccccatctctactaaaaatacataaaattacccaggcgtggtggcgggcgcctgtagtcccaggtactcgggaggctgaggcaagagaattgcttaaacctgggaggcagaggttgcagtgagccaacattttgctactgcactcccgcctggggggcagagtgagactatctcaaaaaagaaaaacaatacccaaaaataaataagtagaatgattcaccaaaaagatacagcaactaatgagcttgaatgtacctaacaccaaattatgtaaagaaaaaaaaagtaaagcaaaaactaacagcattttaaggagaaattgatgaacacgccatcaaaggtggatatttttacacagctcttattatactgtttccagacaaaaatgaaaaactaaggaaaaaaaattggggccaggcgtagtgactcacgcctgtaatcccaccactttgggaggccaaggtaggtggatcgtattagtccaagagttcaagactagcctgagcaacaaagtgaaaccccatctcgaaaagaaatttaaaaattagttgtgtatggtagcatacgcctatggtcccagctactcaggaggctgaggcaggagacttacttgagctcaggaggctgaggctgcaatgagctgtgattgcaccactgcactccgacctgtcttaaaaaaaaaaaaagaaaagaaaccctgaaaattggaagagtgaaatgaacaagccaagccaggtctaatagctagatag

SEQ ID NO: 46693 - DNA, 1059 bp, Homo sapiens
catggtggaggacaaaaggcacttcttacatggcggcagcaagagagaatgacgaagaagcaaaagcagaaaccactgataaaccaattggatcactgtcacaagaatagcacgggaaagaccagcccccatgattcagtcaccttcctggattcctaccacaacatgtgggaattctaggagatacaattcaagtgagatttgggtggggacatagccaaacataacaggcgctgattccccatgcagtcaaaaattcattcataactttttttttttttttgaaacaatttctctgttacccaggctggagagcaatggcacaatcacagctcactatagccttgacttccctgggctcaagcgatcctcctatctcagcctcctgagtaactgggagcacagagatggggtctccctatattgcctaggctggtctccaactctggactcaaaccatcctcccacctcagccacccaaagagctgggattataggcgtgaaccactgcacctagctatgtatgacttttgactcccccaaaacgtaaactactactaatagtctgttgttgaccagaagccttaccaataacataaactgtaaattaacacatattttataggttacatgtattatatagtttattcttcttcttcttctttttttttttttgagacagagtctcactctgatccccagggctggagtgcagtggtgctgtctcggctcactgcaaccttcacctcctgggttcaaatgattctcctgcctcagcctcccaggtagctgggattaaggcgcccaccaccatacccgactaatttttgtatttttttgttttttgttttttggtttttgggtttttttttttttttgagacagagtcttgctctgtcgcccaggctggagtgcagtggcgcgatctcggctcactgcaacctctgcctcccaggttcatgccattctcctgcctcagcctccccagtagctgggactacaggcgcccgccaccacgcccggctaattttttgtatttttagtagagacaggatttca

SEQ ID NO: 46694 - DNA, 1049 bp, Homo sapiens
ctccctccttccctcacaaatggaatgtttgtagtagcctgaggaactcttttggcgccattcttccagtaacatgtgctcacttagtgtctctgtcagcattttttaagcaataaagtatttttaaattaagatatgtacattatttacacactgctattacacacttggtagactacagtatagtgcaaacaacttttgtatgcactgggacaccaaagcattggtgtgacctgctttattgtggcaatctggaaccgagcctgcagtgtgactgaggtgcgctgtgctagaatcctgggattcctgaatgaaaggatttgcctttctgttcccaaaggtttcaaccttcaatgcagagacaagactaacacttatggaagcaactgaaagcccatttaaagcccatttaaaataagactgggtaggacatgtggcagggcgtgccacctgtggcctggggaggaggtgcccatggggtgtctggagagagcgtccacggagaggtggaacctcgattactccttggagcatccttggaggatggaggagatgggggaggatggctgcttccagtgggcctggaagtagtggggaggtgaggtcgagtcttggatgcaggccagggatttgggactcggctgttggacaggcagtgggagccaggacctgctccgtgaatgccagtgtggtggcatcttcttggtgaaggcatcccagatgtctcctccttgtgggctttcgtttctttaacagagagcacatggagagcgcatccctaggtggtgttagaattcccttttggaaccatccgtgtcaaatgtgacaagtgcgtatgtggcccatccgtgtcttgtggcctcttgtacatgtggtccacaccttggtgcattattcacctgtcggggccaggggctcacagcccagggtgggcatccagtgcccttcttgtcatccccatcttcctcgtgcatgggggttgtgtctgcacacttctgctctgtctcctcttgcacgctttggctttgatcctccagcttgtatctgca

SEQ ID NO: 46695 - DNA, 1050 bp, Homo sapiens
tggtcaggttggccttgaactcctgacctcaggtgatccacctgcctcagcctcccaaagtgctgagattacaggcttgagccactgtgcctggccttattacagtatttctaatattgttcagtaaagacagatggtggatcaaagaggatgtttttgacttgtgaggaaaaatgtattcataatttatggggaaaagttttcttcgtaaagatcacaggggtggctttcaggaccatttctcaaagagataatggtggttgcagtttcaggttgaaccacaaacatttattttaaaaaaccccaacaggaaattccgtgttgatggttagtcatctgcgggagcttaggtgtttgtttatagtcagtcctagactgtacgggtgtgtcatgctcttcctgtgcacgctgtattgctcactaaaataaggttaacatattttcaggctattactcattaaaccaaaagaggggagcaagtggtttagggatgatcatcagtctgatctggaggcgcaggctgcctgtgtcggcctcagcgcagcgttccagtcttccctgggggagttctccctgctgtccttgcccagcaccttctacagcccctgcctttggggtgactgctcccctgctcacgttgcctcccatggcccattcttttggtgttgccaagaaccaggctgagacaggttggaaatgctccaataatttctactcagggagaacagaaacgaaagccttccaggaaccgcgcctgcagaacacagaagtgctcaacagaagtgcgaagatgctgctgaggacagctccgctgcccccgctgtgaggactgcccccacccggggctgcacccagagctgcacccagagcttccttccctccttcattccgacccagccttcccatgggcccaagggagtgaaggcaaaagctccttctcagcgtgtggatgcagccagggagcagtggtggatggctacatcctgtgtccccatgcccacaggaggaggggtaggggccatttcctaagctgggacccatgaggtcctg

SEQ ID NO: 46696 - DNA, 1027 bp, Homo sapiens
cacttgaacccaggaggcagaggttgcagtgagctgagatcacgccactgcactccagcctgggcggcagcgagactccatctcaaaaaaaaagttttggtctatttttattgatacgtaataggtgtatatattttcagggaacatacatgtgttaggtaggtcagattcttgtatgttttgggtgaaaaaaggattcagtttggagaacaagactctttctgaagtacaagagatgtcacatggaccctcatcagggcggtcagctgatttgatggctgatgttggtggaggggcaaactggaaatcacagtcctagccctgtggtctgctgcccaggtgccctggctgtcacctcaccccatggagctcctggctcctcagctgtgcaatgaagacaagtccaagagcgaggacatgagaagagacaagaatgtgctggaagtcttgtactggagtaatgttgatgctggagaaatgttggcttcttagttgaaacaggctgggtgctgtggtgcatgcctggaatctcagcactttgggaggccaaggcaggaggatcacttgaggccaggagtttgagaccagcctgggtgacatagcaagacccctgtctctactaaaaaggataaaatataaaataaacaaacaaacagtaaagactatttgtaaaaggtagagtaatagccttcctatggataccttatggttttgtcctaaaaacacttgggattgagtcataaacccataaggcatttttactaagagttggtgtaacaagaagatattcttttattcatctgtgtattcattcagtcaacagttgcacaaaaacagacacagtccttgctatattgcagtgcctacattctagtgggagaggcagatacagagtcggaatcacaaaagaaatctagagttgaaaccagaaaaggctgtagagaagagtcagagaaatgtacgcataaggcattcttcatgtctccactgagaggtgtcaggcttcgagcagccctggaccagcgtg

SEQ ID NO: 46697 - DNA, 1095 bp, Homo sapiens
tagaccccatctttaatctccgccacgccgccgtgggggcctgagtcaacccgcaccatccgaggctcccaccaattctgggctggtctctgaagttggggccagcagcaggcctgcctttcggatagcaaataatagaaagaaatccataattatgtcatataaaagatgcggccagaacactgcacgtggcacggcctgtgatccaaaatgcgtgcaggcatcgtcgttaacttttcttcagtcctctgaggaagtagaataccatttcgatttgttttaaactgtgagctcgtctctcttcaggaaggaaattgatcaaagaagcaaacactcctggatattttgtctgcttgattttcagcaatttactcctaattaattattctgactaggaaaaaaatggtacctctccaggatgccagtgtttagaattgacatttcaaatagctggttggacaaattggagaaattttctgatttctgtcatttgttaaatttgcttttaagtatccctcagggagctgtattcattccaagtgcggggaattaaagttgaatctccatgcaattgaattagcctgagccacagggatgggctgcagaagcctgctgaagcttacagggagattttacttaaagctaaagcttatttcacggagtctgttctgacggttttctaacgccaccgtgatgtacagtttactgttttattaacattggaacagtacttcttttcacaatgtacagtgattgtaatttaagataaatgtgggagtattcttatacctaaggaaatgctgagtcgaaatgctggatttctaaatatatcactggggagaggacagttttttccctttataatgacagtgttgccaacatgaccttatagctatgtaggctggggatattttgatatgcagtaggaaaatgtcacagaagagataacatcaatagaggctaaattttcccttcatgatatttatttttaacatctattctactctgttaaaaaataaggaccctcatgtgttcatgtggaaaacatagtgactagggagagagggatgtgctcattgcgatggatgaagttct

SEQ ID NO: 46698 - DNA, 1030 bp, Homo sapiens
tcggctcaccacaacctccgtctcccaggttcaagcaattctcctgtctcagcctcccaaggagctaggaatacaggcacacgccaccacgaccggctaatttttgtatttttagtagagacggggttttgccatgttggtcaggctggtctccaactcctgacctcgggtgatctgcccacctcggcctcccaaagtgttgggattacaggcatgagccaccgcgcccagccaattatagaatttttaatttgctacgcttccaagccttgccaagatgataactttgtgtgtaactttgtcagaatgtataggcttagtttggctgttcttttcacattgtgctgaaggcatcaacttttggagaatgtttagtgagtccttaatgctgtggagaggttcttggaaactgcgtttttaagcaaaacaaagtacatcaggttcttgaataatgttgttttgttatgatgttgattaggaaaaaaatggatttgttaaacatcatgtcacttaaacttgctgtttccaagaactgccaacagtgttaagtgaactgcatgctcctcgcttgctctcgcagtaggtggggcctccatgctcctgcctgcaagttcttcctgcgctggaaatgggtggaggcatctccctgggtcccctccttaggcatcagaacctacttggtttcttcagacaaattaaaatgtcatcgatgccctggaaggatatacttcagtggtatttcttggcatatttaattatggaaaaaatcttaccttacttatagtagacctttctaagttgcaaatattttactgtgagcatgattgatttataattacgaaaaagcaacttagtctgcataatttgttgatagcactggtcatgttgagtatatttggagcctcgaaggcatggaatattgagcagagtgcggaaaataaagcggtttttgacaccgtgcttcattttgcaggtactaactgacttgtccatttgctaagcttcatcccaccgggcaattttcctgcac

SEQ ID NO: 46699 - DNA, 1017 bp, Homo sapiens
gcttggagaagacatctgcccggcaccctactcgaggtcacagctcgaaaggccacactcaagtgcctctccttggggtagcctcacacttaggggtatgtgggtatgtgcaccccccacttcctcatacagaacattcaaaaggcttaagagaccaggcacggccaggcacagtggctcacgcctgtaatcccagcactttgggaggccgaggtgggcggatcacctgaggtcaggagtttgagaccagcctggccaacatggtgaaacctcgtctctactaaaaatacaaaaattagcccggtgtggtggtgggcgcctgtaatcccagctacttgggaggctgagggaggagaatcgcttcaacctgggaggcagaggttgcagtgaattgagatcgtgccactgtactccagcctgggcaacagagcgagtctccatatcaagaaaaaaaaaaaacaaaggcttaagagtcaatgtggaataaacttgatgctttttgctgctttctgcaggagttttaaggtaggctggcttcgtccccgtgctgtgcacgtgctgtggtggtgagtccagcgtctgagggtactgcctgccatcgccgccttgcactgtgcagatgcacctgcagtttcaccttagccaccggagcaaatgtcagcacagggaaaacacaagccgctctggccctggggacctccctgaagctccccggaccacacttagagaaccgctaagtcagaagactcctaactcctgttctgtttaactctcgaatgatctgcatgcgcgcgtgtctacttaatcccagagtgtttcggagagatgttccactttaattaaattgtatcatgatttacacacatgtttgaataaaaccacccaagaagagcatctgatttggaatctaaaatctcatctgcatggagtggccgcctggctgagtctgtgagagatttgggggactgtgtgtttttttcaaagtctttggatggactgttgctttgagcatatggg

SEQ ID NO: 46700 - DNA, 1051 bp, Homo sapiens
aagggttcttgtacaagaatgtggaagactcagtgcaaaccttgttctgaggaaggcacatgctctgagggtgagcctgttggcttagggctcgctgatgacagggtacgcattgattcagatgaatgatatcagaaagcatgtttcttacaaaatgccctcagaatgggaacagatatcttttgttcttttaagtgactttgcaggtatttggtcccattgtttgcttggatattgtcaaagtttgttttctaaacaaagccccagagagacagagcaaacacatgagtgctccaactcaatagtgtgtttaattcagaacagaccgtgggcaggatctgtggcgaagccgcgtggagagctgccacaggcatgagcaagcaagagggtggtccggttccgaaaagcaaaaccaccttgagcgtggtaaaagtttcatttaactgtggctgccccctaaacatcggctgtagtggacagaagccaccatttcctacctgatgtcagccacttctattctgtccctgaagtgtcagctcctggccaggcggtggggcaggccccacttcatgctggttctgtggctttgaactcacgagcctgccacccttcagagggctctgagcgggctgtgtgccgggcgagaacactgcctgggccggggccactgtggcatgagaagggccgcctgggggcccggggcctagagcaggtgggcaaggagtgggtgctgactatgtctgctctgggccttcggcgctgagtcttacaggcctggccagggggctgtctccattatttcactccatttttgtttattttattttggtttgctttgtttataatattttattttgagacaggatcttactctgttgcctgggctggagtggagtggcacgatctcggctcactgcagccttgacttcctgggcacaagggatcctcccatctcagcctcccaaagtgccgggattacagacatgagtcactgcaccagcctgcttttgtttatttcaaaagtggaacgttttaaatgctgtgtttggca

SEQ ID NO: 46701 - DNA, 1029 bp, Homo sapiens
cccgccgtgatgggggcgttactctgcctggcagtagggcgggcgttcctcctccctttgatcccctttgttgacctctgggtctttactttgcaagcagggagggataagaaaacatttaaaaaggcttatctctgataaataacactcatctgtctggtgtccacagcggccttgagaggctcgggccagggacacagaagatggcctgtgtcgctcagaactcacctctatacagacccaggtgcgccggaccccgacagctcttggggaccttccttgcccgctcgtagacaggagcgacgccgaaagggcgccagctgtgcccccccgggccatgaacccagctgaagccggtggaactagaaggccacgtgctgcccatggctttgccgtggtggctcgagtggccctattggtgactggggcaggggggccttgctgggcgcaccttggtccctgtgcgtgctgctgcttcgtgaagtatgcagtttgccagatgctaaagcgcgtgcctcactgtaagaacggtcacattaggtgtggatggattctcagtgctgagacgctcactcatcacaccttaacttcgctgttggccctggaagctttttggggggtggtccctgttctgtgcagctcccctgaggagtgcagagcattctcctggaatgttctgaaacatttgagggtgaccctgtggacatagcctggccattccaggactggcaggtgaacacaggatctggtcggggatgcgcatggtagagtcggcgggaactctggttggactccctctgggaagctttgcaaaggatatgccattggaaggagccaggccgggggtgaggcccgttcatggtgtgtgattgaggagagggcttgggggcagcatcaaaacaggactcaccagtgagccaggtgtaaagcaccccctggatacgagggatgaaagaccatggttgagcagggtcaggggctggggctggggaggggcgagttgcctggtggtcagcacaggcccaccaa

SEQ ID NO: 46702 - DNA, 1091 bp, Homo sapiens
gaataaaaaatatctgcaggtacacacacgcacacaggtatgtaacacacacacacgcacacacacacgtgcctgcagctccacgtgcctggctccctggtggggctgccgtcctcctcattcctggggcctcacacacgtgggtgttcgttccctggggaagcaaaagtggctcaggaggcagtgcatctggcagccccagtaaggcagtgggtcagggcaggctgggccgagctctggggtggggcctgcccacagctggtgctcagtcagtgggcgctgcggccgggggagcaggaatcacagaattacctgaaagcttcttccggtctctgccctgaagacctaggaagctgatttcacagatgtcccaggtgattgcccattaggccaggtttgggaccccctggttttgggataagggtggggagaggaggtagaagccctcgagcagctccagggagcatcctcctgggagtggaattgagggagggaggagcccatgccagaaacctggaggacagccccgagacagtgggggcagcagccctggggggtgcatctgtgggagatcgcgtgttgggtgtcccacagtggactttgtggtggtctcctttactgatgaagcgtggagctctgacaagtgaccgccatgcttgtgtggggtgccgcctgtggttccatgttgctgtgaacacagctagtccactaccagacggaaggggacttctgaaggtgattactggggcttcagtaaatgcaatgcaaatcggccaatacctgtttttaaggacctatatcccaaaacaaacacaactgcagcaaggcttagaaacagccagactcaggagcccaggcggcccctaacccgaatctcttactgtaattgacatccatcttgggaaaatcctactggggcagtaactcagggcaatgttgttgttttccacgtcatttctgagtgtttcagctctgttttgtccttagagagttagtgtactctgctgccagaaggcagccactagaaactttcatcttgcagctgcacataaaaagatcaaaaactgaagttcataggtcataaccatttg

SEQ ID NO: 46703 - DNA, 1025 bp, Homo sapiens
tacaaagaatataaaagctatattttgaagacttgagttatttcagaaaaaactacagccctttttgtcttacctgccttttactttcgtgtggatatgtgaagcattgggtcgggaactagctgtagaacacaactaaaaactcatgtcttttttcacagaataatgtgccagttttttgtagcaatgttatttctcttggaagcagaaatgctttgtaccagagcacctccaaactgcattgaggagaagttccagaaccatcccctttttccatttttatataatttataaagaaagattaaagccatgttgactattttacagccactggagttaactaacccttccttgtatctgtcttcccaggagagaatgaagcaaaacaggaatttggttttcttttgatgtccagttacaccatccattctgttaattttgaaaaaatataccctccctttagtttgttgggggatataaattattctcaggaagaatataatgaactgtacagttactttgacctattaaaaaggtgttaccagtaaagttcttgttgtaatatcctttcttttggttctgtttcttcagatggcttttcaggtgacttgtcagataagataacatacaagagagttcccaataattatcaggaagcctctcactaattagtttctttttttttatttaatcttctaaacaagtcaaggatgttaccacagaagggtagcgtggcgtaagttaaccttttcattccatcgtcacctattaaatgcagagctcaggatggaagtagcaatggtcttcaatgaaagaaccttcccctgcgcagggtctcactattccgctaactcggactcaaagcataattcacttgtcaaggaaattgttagcatttcccaggcccaccctagtcttgctagaatctctgtgagccacagagcagggagcaaatagaactgagatctccagcactagggactcagactccaaagggagggatttgagtgaattttttccaggta

SEQ ID NO: 46704 - DNA, 1047 bp, Homo sapiens
tgcctgcacttgtagtcccagctacccaggaggctgaggcacaagaatcacttgaacccaggaggcacaggttgcactgagctgagatcgcgccactgcactccagcctgggagacagagcaagactctgtctcaaaaaacaaaaggatgttatttgccttttccgctaatagagctgctgacaccttagcacaaatcagggcagtgggatgaaattgtactagtcatcactgtgttcttcacccctgtgctcacacaaaaagaaaaaaatgctgttttacagaagaatggccttgatgaagcagtgaaaaatatctgatgtgaagacatgggaagggcatgttagccctgctgctgcacacctagacacgatgtcttatcttgaggaaagcactatacagttgagttgcaaagctggactaaacactttttttcatggaagaccagctttacttgaaagaacagctggcagacatactgttcagagttgcatatttggtagacattttctcaaaagagaaagaggtgaggctgtgactttgaagaaaacaactgtttgttaccggtataaaattcgagttttcaagcaaaaattagaattttgaaaaacttattaccgtgatcttgacagctttctaaattcttagactgttatagtaagctcaggatggtattaacatgtgatattttaaaaatatatgttgtttactgaaatgtgttaacattgggaggatctctatagctcagtaaatcagtatcttccaaatgacctacacaggatgttaaaaatcacacatgagtagaagttccattgaaagtacaagataaatagtggatttttttctccttttttccccccttaattctatggattttaatgtaacagatgataccattgtaaattccacattgcaactcacctttaagaagctaccacttgcattttggtgtcaaatcaaaaaacaataccacagttgtgcccagaatctaccaaaatactcctcccttttccagttgtacagctgtatgagtttactttttttcccc

SEQ ID NO: 46705 - DNA, 1063 bp, Homo sapiens
aattcccagattagaaagtctggtgcactgatgtcactctttcctgagtaatttttgggtggttgtttactgcacactatctaccaggagcctagaaactttgaatgagtgtcattattagaactctagagttgtaggaatgtaggaagagctgtttgccacagttaggacgagggtttcaaactgtctgctgagccctggggcatctgcgtggaatgggaaactagcaaagtctcgctttggctgcattctgaggggtttatgtgatggcaaacagccaagatgaagaagctgcctagcagtcgctgcagcggctgcagcgttatgtgggacttcagatagcttctgagtagtcaagcagtggtaagtagcagtgttaccaacttatggggtttccagcttaaagcaagtagtattttcagaagcacttgtaaatactgttgtgtttttgcttattttcctgatcagataaagcactggttaagctgaacgataggaagattgtattgagcaatttagggagattattggccagattgctaattgatcacgtaagtgctggcgtgatcacattaggtgtgaaaagaatctgtcctcagacatgtatatgcttgataaagtgctgcgtgggatttctcagaggaattctgttctgctcaagataaactttggcatgcaaacatttcatcttggcccatccttcattttctgcaacctctttttcttaccagctgtctttttcttacctatggctgtgctttaaatggacttgcccatttggaccaaggctattctagaatcatttcgtggagagttagaaacctgatccttctttcccctgtgtataggatcctttattgttatcatctactgttagccaactggtgttccttagataactcagggtggggtctagtgtgtgctaactctgggttgtcagctcccctaagacaatgtgttgtctctctagcacaatcctggaggaagagaaggctcagcaagaagagcgcatgaggatggagtccagaagacaggccacagtgtcctgggactccggagggtc

SEQ ID NO: 46706 - DNA, 1033 bp, Homo sapiens
taacatttaggcctcatttcattatggcctgagattgtcttctcatccctttcacacacagtagctaaactaaccctcctgtcagcccagaatgcctccttcttcatttggggagatcttacccatctttctcggcttctttcacgcactgggtcttctgtgacttcacagctgactagccttcaccctctgagtctccaaagctctttgttcttcttgtcaggcttaccctatgctgctatagatggctgcaacccgtgttcaattcagttcgataaacactgttgagcacctacagtagctgagcctggtgctagtcactggggcaaagatgactaaaacacttttcctgccctcgaggagctcacagtctagtatgtctcatcccctactagactgaagctccttgaggacagggatggtcatactcacctcggtgttgcccaaacctccaggccagtagcctagctagctagatacaggaagagtcacccaggcactgaattcaaggcttagaacatatgagtgattcttaatactaaggaatgctccactgaggtaaattatctccaaaaagtatccaatacatatttttagaactacatataattactttaaataggtacctgtagtataatttatggatatcttcttatatactactagcacaggtagttgagcattcattcattctgcattgttctgttttagaaatggtgtttaactttgcgttttgaacatatacaattaggctaccaaataggccaccattttatattataaaatgtcactatataatataattgcttacttggacatttgcatataacagtgtatcacaataactaaataggttattaatttttttcaaaatttttattatttccaagattttaacaaagaaataataagtttggatagccctttggtcgttaaaattatggtagttaaaaatgtttcccaaatcccattcttcttcttgacctcgaaagaattctccttccctaccttgaaagaatatttgcaagtagac

SEQ ID NO: 46707 - DNA, 1010 bp, Homo sapiens
atctctctcccctagcttctgacttagcatggcttacaagacccgtaataacttagtcccggctttcctcactaatctcatctaacacaaccctccatctctgtctccctcacactttgtgatccagcaatacctacttataattctcctaacacagctcactgcgttttcacatgctgtcttcactcccagaaatccctttcctgacctttgccacctataaacttttattcagttttcagaacccagctcagatgttacctgcttcaggaaggcttcctaatcaaccctgccccgaaagagagaattactcctttgccaccttttgaatacttctgtttttatatttaaaacatccattgcttgttcaggtgccattttgtggctactactttgtgccaggtactgttaaacccctggaggaagcacgcagggacattagtgtgctgaatccctcagagaagcatgtgcatactctaccctgttgcctggcctggagaggttcttgttcgcttgtgcatgtccccagctacactcagagctcttgacgggcatcattgtgtcttactgatttctgtagccccaatgccaagcttagaacctggcaccatataagtgctcaataaacatttgttgaattgaattgaattggagtctagaatgagacttaatactgtaataaacaagatactgtaatataacacataggcatgagaagctttattatataaacaataccatggttcagtgtgtgctgtgtcacctgttttcacacttggggacttcctccattttatgtgagtttttatgggtttgtttttcatgctgtattttagtctttttcctaaaaatcatcaactgcagggtccaggcctttcaccatctagcccagccttctcaccacatgttcaagctgttcaacctgctagacaggattccttttaaggagagtatttcaaagaagaattaagacctataggtagaagcacaaaggattcatccagtctgaa

SEQ ID NO: 46708 - DNA, 1996 bp, Homo sapiens
aaccgaggtttgctctccctccctgttctttgcctctctatagagggaaggacattggtattttatttatctaccatctaaccattcctcacccctaagtgacctcgaaacaccaaggaaatgaaaagtagttctcccaaataaatggaagcctcaagggttcaaatagttaaagctttttcctttgatactgaaaatctcagctagctctgttagattcttaagcagataacaaggaaaatttattttctaaaattaatcttctagcttccaaaggaaaattgcctattaaatggatggctccagagtcaatcaattttcgacgttttacctcagctagtgacgtatggatgtttggtgagtactcttaaaagttttgtattctttaaaaattatatttcatatgttatacaaaaaaaaattatctctttttggaatatgtaggttgatttgccttccctaacctgatcatctcctcatcagacttcttttgattcatttgacagtaaatagcctgacatctactgtgcatcagcttctgggcacagcttctgtaagggtccacagttctaattgcccagctccttccatcactcttcctttttgttcccctttgctgtctcttctttcctcacagggggatattttgcttatttccttctttcttttctctctctccctttgccatctcattcgttcctttcatatgaatgacattaaacagtaaacacttggcccctccaacccggaagtatctaaaattctaccttgtctctttattctggagtccagcctccttcctgacctatctcaagacttggaagtttgatcctttgtcttctgtagcttctgcttttttgataatctcatttgttcctcctcacctgctgcaaggtcatcattctcctgctctatggttattgcagttccttctagctggtgtagaagtgtggctctcatttattctttgctacttatttaaactactttatccaaatttttaaattactcactatttttaacatgaatggcacttccctccactctactctccatttttcttggtgttattccttctacccagaataccttatcctgataccttcttcttccagttgaaatcctacctaaccctcaaggtccaccttaaatgtccttgaaggcttcttcctttctttacctttcctacactttctctctttgtcataccactcatgttgatcctgtgaatagacttgtggacatgttatctctgctacattagaaactactttggaggagatgccctgttaagattatgtaccttttttctcctataaataaaaataacttgatccagtatgtgttcttatttttttcttctgtttacttactgttgattcttaattatcatttaatgcccccatagataactaggtaaaggaaagaactttcaaatagaacaggatatggcatgacatgattagaaaaagctctgaagtccagttgatgtgtgttcaaatcccaaggccttgattattatctgtgtgatccacagagcaagtaacttatcctttcagagaaatttcatgtttcaaaacttctaagatgcctatttttttacatgttaacatttctggaactggagtgtatcttaaaatcagtggcattttacagttggtaataattggaagcattattttaatgtagttgtccttgctttccactcaagtagagtttgttttgttaatattgttgttactgtaatgtctgaatgactttaaaagaactcttttggtaagaataaaataaaaattctaagagggaagaaagaattgtatcatactttagttttcaacattctcctcccttttttggtcttataaactaataaagtttcctagaatcagtagatgtgatttttgtcaaatgtggtaaaatgcagtgtttaaagaaacataaggttactgtgaggattaagggtaatatatgagactgggcacggtggctcatgcct

SEQ ID NO: 46709 - DNA, 1077 bp, Homo sapiens
tggaaaactcttaaactttcaaaacataaagtttacttatgacataattttatgttgcttccatatttacaaactgtagttatttgtaaaataattgctttaataactgtgcttttatagccttcatatattaatacctaaactaatagttcttaatagttaagcatataatttaatagttggggcaattatttagaaaactatcaaatagatataaaataaatcggaaatttaaaaactcctaggaacaacatgaaaaatatctacctttagtagaactcattgtttcagtagttcttctaataccataactaattacatgaattcctgttaaaatattgtttaagagaattccactgtgtttaaagcattttcatagattgatgtgccacagatgaaattttacttatggatgatcaagaaatacgtcaagtgttatttctacatttggaatattttacttaagtattgatgtgtgaattatgttttacagccagggattatgagattcaaagagaaagaatagaacttggacgatgtattggagaaggccaatttggagatgtacatcaaggcatttatatgagtccagtaagtcttttaagactaccaaacaactagactaattttgactatttaagtttaaattgcttttgtttgtcttcatgagtccttagttcttctaggtattaatatttacgggtgtcttttataaagctcttcataaatgtcagcttatacttggcgtattcagaaaccaaaaaatggcaacattagctcctacaaggctgggcctgtcttttattcattttaatctttcagcctttgtcatcagtaacagtttttataggtgactgttctttggatggaattagcaaatcagatgagagtcagaaacagccagtatacctatttacctgcatttttgagaaagaaatgttaatttgccccagtttaccctccaaaaaagatgaataaattttaaaaatgattgctttaataatagcttaatgaagtatcatttgcttactatgaagttcactcttttgaagtgtacaattcagtgcttttcagtgt

SEQ ID NO: 46710 - DNA, 1031 bp, Homo sapiens
tgtcagggaaggtcccactgagagagtcgcacctgaaggggtggaaaacagaacctacaaggatatctggctattccctattgaaggctggggagtgctaggaagcatgcctggaacagcagagacccaggtcactagaatgcctaagggggtgatcccagggccagtggctggtcaggatgtaaaggcattgtaagggctttggcttgtactcaagtgatttgggaagccattggagggtgtgaagagaggagtaatgtgatctggtttatgttctagaataagtactctggctgctgtgctgagaatagaccatggtaggttggcctgggtacagataaagtagagggaccaatcaggaggctattaccatgatgtaggcaagtgatgtttgggtcaggggttctggaatgacagtgacaagtaagaggactttggatagagttggacagtaaagccttgcatttgctgcactgggtatggattggggagcagcaaggccctgtgatgactgctggttccacctgaacaatgggaagtatgcaggtgcacccaccaggactcagttttgaatatcagcaagtcccagcaaccttcagacatccagagggaggtgtcatgtagacaagttcaggtcaggggagaggtccaagctagaggtatgcatttggagctgcaaagtgtgggtggtatttgacgctttgaaactgtatgaggttaccaaggaagtgaggttaagagatacaggtgtgagcactgggttctctaatcttcatcaggccagggagataaggaagaaccaataaagaagacgaagaggtgccatgagagggcagaagaaaaccaagagaatatagtacaaggttcgggaggcccagggtgggaagctctcagaaggacagagtgattagctgtgttaagtgctaactgtaaatgaacaattgggcttagcaaggcagatgtcattggagatgttcaaaaagtattttccgtgtatgggggtgggggggaactgattagaatgaattcaa

SEQ ID NO: 46711 - DNA, 1054 bp, Homo sapiens
agtgtgtcattatttgggattgtttttattgttgagttttaataacatgtctttaatatttttatcttttgcttagagttttatgagtagctcctaaatttaatcaaagacccttttagcatctattgatatgatcctttttctcctttatcattatagtagattatattaatagttatgataatattgagccaattaataatatacaatattcttttaaaatattgagttatatttgtagaatttttgcaactatttgtgagattaatctagacttttttatgttaactttattagacatggtgttaaagttatattaatttcattaggtgaattggaatctttcagtgatttttttttaaaaaaactttttaagctcaggggtacatgggcagatttgttatctaggtaacctcgtgtcacacagtttatcatacagattactttgtcacccaggtattaatcctagtactgattagttatttttcccaatcccctccccacttttaccctccaccctctggtaggccccagtgtctgttgttgccctctgtgtgtccttgtgttctcatcttttagcttcccttataagtgggagctaaaagatgcagtatttagttttctattcctgtgttattttgctaaagataatggcctccagctccatccatgttcctgcaaagaacatgatctcattcttttttttttttggctgcataatattccatggtgtgcatgtaccacattttctttatccagtctaccatcgatgggcatttaggttgattccatgtcttggctattgtgaatagtgctgcattagacgtacatgtatatgtgtctttataaaagaacaatttggccgggcgcggtggctcacacctgtaatcccagcactttgggaggccaaggtgggcggatcacgaggtcaggagatggagaccatcctggctaacacggtgaaaccctgtccctactaaaaatacaaaaaatcagctgggcgtggtggcatgcgcctgtagtcccagctactcaggaggctgaggcaggagaa

SEQ ID NO: 46712 - DNA, 1034 bp, Homo sapiens
tactgtaaacagttctgcagtgaatctttttgttcctgaatctttgcatgtatctctaatcatttctaaagaataatgtcctggaattttattttatggataagcattgtggtttttttaaagtttttgatttgtgctttccttcagaaagatatactgtttttttccctcctaacagtggaatgtgcaagtacctttatacctttggcctggtgttttctgagtcatgtgcacatatagtacaaacttctgtttaagaaataaaactctatatatgaactttacagttaaaaatggttaagatggtgaattttgtgttatatgcattttgccacaattaaaagaataaagctttgataaatacatttatagttatttgacaagtatactttttggcagtaatttgaatgtaggtgttagtaagtagttggtaggaaagaaatcttaccattattgttgtggtctttactcattgctgatttttacaagatgttttggtaattttgtcatgcaggccaaaacactaagaaaactgatccaacaaacatttagacaatttgccaaccttaatagagaagaaagtattctgaaattctttgagatcctgtctccagtctacagatttgataaggaatgcttcaagtgtgctcttggtgtaagtatgggaatatgggaaatagtgggctagtttgattttactttttcttgtctcttgctgtatatctaaatttctgatgaaaaaatgctaacttgtcccatttttttcaataaaatgatattttttcattttaccatgtgaaaaatagaaaaagaaaataattaatgtgagaataaaatcacctttttaaaaacagcatgcctagcttcatagttaggtttttaaaattttatccctgtgatttgttaattgttctctaagggctagtttacctatttagataatcatcccagagaaacccttggcatcaggcatgctggaataagcacagtgcactttgtgcaggcttaacacatcctgggtcaatgaagttata

SEQ ID NO: 46713 - DNA, 1062 bp, Homo sapiens
gcacattgtaaaccagtcccaaacacacagatcatggagagaggcgacctcatattaaaaatgggacagcctacaagtccctgtttggtttcctaaggctttaaatttagatatctataataggctttccctaaaaactttgaacatagtaccttaggtgggctcagagtcctctatcacaaaacctgaagtagtttgatttcgagattaaattaaaatgtgttaaaggcagcgttgcagaatttttaccatgaccttgtgtacttgagcctcatttttattttctcaactgccaggtatcaaaaaagttctaacatatggacaaacgttacaaattcattattagtcaaaagaagtttaagaaaacctaaactgtatatatgctaattattagccttcaggtttcttttttttttaatggagttgtcttcacctttgaagtaaaagcaatacctagtattcgtctttattttcaaaaaacatatgcttcctttcatttttcttgaatcatacaacacttttggtttatctttaactttcttatttgtgacagcaatgaatatggtaagttctttagttatgcctggctctgagaaaaatagatgtgtagctgggttgattaatagcagttgacagccacacagtggcggagaggatattccctgccctggtctttccctcacccaaatactgacgtgtgtgttgccttcttgaaacatggccagttgccttcttgaaatccctactagaagggcgtgcacgtacaccttgcccatgggtctgttttaggccctcacatgtctaaaacagaactgttgatgcccacccacctttctgttctcggtgcgtagcttcagcattccctcacacctcatgtccagtcactcatccctgttgcctctttgtccacagtagcccctcaatctcaccacttctcaccgcttctcctgtccaccagcaaacctcaggtcaggccatgcctccctctgcagtaaacagtgagacacagggcatgtggaccagaagctgtccagacagcagtgctttcttctaaggcagaac

SEQ ID NO: 46714 - DNA, 1635 bp, Homo sapiens
cacatcattttttcctgttattttagttatatcttttcaaaattgaaactccaaatattagacattattattattttatacagttattatttttggctttccctacatgtatatgattttatttcttaaacatcctatattgggccaggtgcagtggctcataacctataatcccagcacactgggaggccagggtaggaagatggcttgaccagcacggatagcatagcgagacctcatctctacaaataattataaaaattagccaggcgcggtggcacgcagctgtggtctcacctagtcgggaggctgaggctggaggattgcttgagcccagcttgttgtggctgcagtgagctatgatcatgccactgcactccagcctgggcaacagaggaagaccttgcttaaaataaccatttttgtatctcagaccacccttctggtatgcttttccttttattccaaatatattgttctgctcattgtttttttctcaacactgtaaagatactctgttatgacaagaaatgtctgttgacatttctttatggttgctctttcttttaaggtccttttcctacttttcatcttttctagttttattcatgtcttgtgcttcgatttctttttataaatccagttggaataagacatacttctcaattctgtagattcatgtttttcatctggaaaatatatgccactatctctttaataatcaacagatatatttctgatctttgctgtctcttacatttttcgtgttttctatctctctgtctctctggattctctcttttttgggggagatatttctttggatttgtcttataattctttaattctcttaagtagtatctttatgccatacgttgttcattgtttttttcattctaccacttatattttttcatttctagacattccatttcatgtgatgtaatcttcttcatgcttggtaacctctggtatgcccatctgtggtgtttgtgccgtttatttcttcaagtttttatgcatagctgttttctgttctgtatttgacaataaccttgaggtactggggtgtctcaatctgctgttactctgactctcactcaggccaccaaagtggcttggattagaggctggtggccctagactgggcaagctgagttccagggggctttgtttacactgctgcggcttctggcaagagccaggaaatgatgccacttccgccttcgtcaggtccaacctcagtgcccaagcgccgggttcatcatccccaccttgcaggtaccgtcggtccagaaacccaaaaacagtttcccttctgcctgtcgtgctttgtgttagtgtgtgtgtgctgggggcgtcctagaaaccggcatgtttatcaccctgttgcctaaacattcttcattgtagctcaatctgtttccaacattagtttcccttttacttttacttataagttttttttttgtttttttttttgagacggagtctcactctgtgcccaggctggagtgcagtggcgcgatctcggctcactgcaagctccgcctcctgggttcacaccattctcctgcctcagcctccttagtagctgggactacaggtgcccgccaccatgcccagctaattttt

SEQ ID NO: 46715 - DNA, 1023 bp, Homo sapiens
acttcaacataagtatcgttaacctagaattcagtattcaattatggtttttgttttgatttatacacagttaaatatataaatattaagtatacatttattgagttttcacagatacatacaccagaataatctgaatgcctctggaatgtagaatatgaccatcaccccaggaagtttcccactgacccttcccagtcaatccttgcccccagtcattgccccaagcaaccattgctcctgtgtttttcccaccgtagtttagttttgcatgttttagaatttcttataaacagattatgtagtgcgtatttttatgtgaagtttcttttctcatgtttttgagatttcagtagttttcttgttgagtagtattctgttatataaatatatcgtagtgtatttatccatttttctgttgatgaacatctggactgttttgttttgttttgttttgttttgttttgttttttactattattgagatgactgggaacattctttggcaagcatttttgtgaacatgggctgggactttcatgttaaatgaaatttgtatctaccctttgatcctttacagttgtgtgattttatatttcctccagtaatgtatgagagttctggttgctctgcattctatccaacatttgatgttgtcattgttttgttttagccttttgactaggtgggtatgtggttgaatcgtggtggtttttatgttcacttctctgggtaccaactaataatcattgtttatgttgtttattcttccatgtgcatattgaatgttagtaggtctccttttttgaaaatctgcttaaacctttttgtacaatatgtattgtaaaatcgtacgctttttcttcccaattttttttaaattgtggtagaacacacacttaccatcataaaatttaccatcttaaccatttttaagtgtgcagttcagcagtgctacatacattcataatattgcacaaccatccccaccatccttctctgtaactcttttcattttataaa

SEQ ID NO: 46716 - DNA, 1068 bp, Homo sapiens
tggagacagtaggtctacaatcatttcttgagctttaatttaaatacaattattatgcctgaatagcaatgaatttgtcataggtagagattgttgcagagccaactatacccatataaaattgatctgctttgctttttaccccgtaaggcattagatagacaataaatacatgtaaggtaaaatgccaaaaatgctaataaacatcagaaagacatttgtacatataattttgtcattaaatgtacttggtaattttttttgctttaataaaaatatttattaactaactattctggaccgggaatgcagaaataaatcgcataatccacacctttaaattcttctgtctagtggaggattcctgtcatcagttgctttgtgtttgagcctttgctgttagtaagcacaaatgacgtgactgtgcatagaagagtctgctgacccagtatagatttggtattgagatggctccactgaaaagcatcatttgaggagtcttcaactttgtagaaaaggaagagttgtgttttctagacaagaacacggaggggagagagaaaatgtggtgcagtcttagctaaaatagttcataacattttggtgagagagggaccacaaacattatgtaaacaggggtttaggttttctcctgcagatattgggagccatttaaaaacgttagttagcaaatgccgtaaccagaatttttttttttgagaccactctgattagatggcagtatcagggatagattgaatttttaaaaggttgcaagcatgtttagaggctcttcaatcattctggcaagaaattaaataaaagtgaaagtatattataataagcaaatttagtggatggatttgataggacccagagattgaactaaaacagaatatgaaaataaggaagaaaaaggcttattatgtaagtctaggcacttactgccatgaaagagcaatggtggattagattcaaaagaaggaggtaagaaggtaagttgttctatatttttctatgtgagataatgatagatgttaccatttaaaagattcaagctgagagagt

SEQ ID NO: 46717 - DNA, 1095 bp, Homo sapiens
aagaccagcctggccaacatggtgaaaccccgtcgctaccaaaagtacaaaaattagccaggcatggtggtgcacacgtgtaatcccagctacttgaggggctgaggctggagaatcgcttgaacctgggaggtggaggttgcagtgagctgagatagtgtcactgagtagctgggactacatccttacgccacaacacctggctaattttttgtattttagtagagacagggtttcaccatgttggccaggatggtcttgatctcctgacctcatgatctgcccaccttggcctcccaaagtgctgggattataggtgtgagccactgtgcctggcctagtatggtttatttttttaaagaaaatcttggttaaatagttgttttgagacaaggtcttgccttgttaaacaggctggagtgcagtggtatgatcatagctcgctgtagccttaaactcctgggttcaagtagtcctcctttcttagcctcccagttacctaggactagaggtgtttgccatcacactcaactaatttttaaaataatttgtttgtacagacaaggtctcattgtgtactgggatcataggcgcatgccatcacggttggctgattttattttattttagtagagacaaggtcttgatatgttacccaggctgatctcaagctcctgggctgaagcagtcctcctgcctttgtctcctaaagtactgagattacaggcatgagccaccatgccccacttctgattcaaaggtcttatttcaggttttattttgttattgcttttaatggttgtcatagctaaaagtattcttgacaaagatatgcataattaaatagaaggggtaccagtatctttgtgtgcttaatgatgatactgatttttcattgccagtcaccaattatgtaaacatttgttgaaatttggtcaataaatttccatattccatgatcattcctttcagtataattgattttgaaatatattttcatattttaacatcagatttttttatttagtggagaaattttgaaatgttagaaaattttgttttcagattttttatgagcagtgcatccactccttt

SEQ ID NO: 46718 - DNA, 1032 bp, Homo sapiens
ggtcagtaactttgaaggatctagattgattagggtagacattttaaaagacaaacatgttaaggtgaataattttttttttttcttttttgagacagagtctcgccctgtcacccaggctgcagtacggtggcatgaacatggctcactgcagcctcttgggctcaagcgattctcccacttcagcttcttgagtagctgggactgtaggcacagaccgccacgcccagctaatttttgtattgtttacagagctggggtttcagcatgttgcccagacagatctcaaactcctgggctcaaacagtctgcccaccttggcctcccaaagtgttgggattacaggtgtgagccaccatgcccagcctgaataaatcttatgttgaataaaaccctacgccagttacagagttcatcaaagaaatatagctgtattttcaaatttgtcaggtagctggtaccaagctaacaaaatactccttgagaatatagtttcattggttcacatcaatggctagagaagatttgacttccaactatttagtcaattaagcaagtgagcattccaaaacaaaggatatgtaaaagttagataaaaatacctgcagggtttttgtgttgttttgttttttgagatggtcatcttgctgtgttgcttgggctggtcttgaactcccctactcaggtgatcctcctgtgtcaaggtacttttatttaacacaagtctattatcttggtttatatggacatgtcagatgcagactttgttataatgaaatccttagtgctcaataaaatggtcattgaatctaaatctcttagtagattgttgttgttcttttaagccaatttatttactttgtttcaagtaaaattgaataggcactgctttactgactgggtcttgaatcctcaaaaggaagaaaaatttaggtggggttatatagaatttctcacagattgaccctactagatgaaagggtgatcgggatactactgctcataataatactaatgatgatgatgatgatg

SEQ ID NO: 46719 - DNA, 1102 bp, Homo sapiens
ccccactttactgatatctctgtacctagcttattttttaaaaagacattacaaggactagaacaaataatttcatgcccatacaccaggcaagtactgggcaaatactgtatgatgctgcttaagattacaccaccattgagtacttggacagtattcttatcccattcaaaaccccttaaaatttttctgactggtacattgaacttttctaaataaatagcatatcctcaggtttcagtactagtcatgagtcagtagggaatggttggtaaatctgaatctgtaatagtaaatggaaaaaaatcagttcatgtagtttgttaaaatataggtgtgttgggttggattaatactaattactgttaccaagctggtagtgggaagactggtaatgggaagtaacgttgtgttcaatttaaaatcatccttctgataggaatgggaaaatgtacagtgatttgggattctgcaagaacaaactatgctataaacaactggtatctgtaggggaagggaattcttcagggagttttccctgagtttggccataggtaggtgcctggaggacttttcagagcagtccaacggtcttcagtgtttattgttaggtgtcatcactggacactttgtgtgtgttagaagtgtaagctgttctctctgacagaggagcaggtgaatgtatgtttaaaaacatttaaaaacaattgattattaataacaatcaattgaacattgattgttacggattcaaatagttttgattctagaaaggactatggaggtcttagaaaattaaactcttcctttacaggatggaaagtatcatctaggaagaaagctagaaaggaaagctttaagaaaaagcataaaagccatgttaaagaggagaacctaagctaacagagcacgaggaagaaaaaattttgaattcaaaatcctgagagatagtgattgaggtagtgatttcccataggtagaatgttggctcctaaagatgcctacatcctaatccccagaacctgtgcagatgtccccttacgtggccagagggacttgtaggcgtgatgaaggctacagaccttaaggtggggagatcatg

SEQ ID NO: 46720 - DNA, 1074 bp, Homo sapiens
tgccccccaaacagctcagggtcccatgatcacaaacatcacttatcttggccatagctttggccaagtgtcagtaccgtgcttcaggcagctctagagataagtgtggggtcaatctagaacagccaagagaaacccaggctgtacaatgttgaataagaccagtcatctagaaacatggcagtgataattcagaaaaataatgacataaaattccaaattctaccagagaaattccctacttaggagaaagaatgacgtttacaccagacttttcatcagcaatgctggatgcaagaagacattggaacagtatcttcaaagggctcagggaaaataacatgtactttagaagtctatatcagataaattattaatcaagataatgtgaaatgaaggtatctgcagagaagtagtgacatagaaagctaatagcatgggctctctttgaaaaaacaattagatgatataatgcagcgtggaaaaaagttgagcccataagaaaatactgtagcaggatgcaagagacagtggtccattgtcatacttgctgccttgtatgctgtcttgtacctctcttaatgtccccgtagtctcttgaatctaccaccatgatttaatccaaccttctgcctattctccacctgtcgccatcctgtgattggttacattctagatttgcaaccttagtgctacccagctgtcatgctctatccccccatcttgttctctcctagacaaccatttcatacctcgtccactttcttcaacctgcagtacttggaaaagtccacacatttctatatcttccctttccccaacatttgtacctcacttctctgtctttacacttcttgctacaaaataaccatccagtgctccagtcaaagggttacctcatcttttagttactcagatccatttgcaatcgtcttttattcctcttttgctctcaagccatatcgaatacattagctaatcctgtccacattatcttcaaaaatatatccagaacctacccatttcatattgcctccactgctacccctttctttgagctcttcttcagtagct

SEQ ID NO: 46721 - DNA, 1050 bp, Homo sapiens
ggctgagacaggagaaacacttgaacccaggaggcagaggttgcagtgagctgagatcgtgccactgcactctagcctgggcaacaaagtgagactgtctcaaaagaaaaaaaagaaaaaaaagatttaaggctaaagtcttgtatataaattttacataattttttgttacctctaaattttaatattagcaaactattcaaatggattaattattaaaaatatgatagcctctttttttttacaaactctttatgaagctggttagcttttttgcgttttctgttttttttctacttctgtgttttacttttaactttataaaacactgtcatttggtagaaaggcctgcaatgagcatcctgccataaggtttatcagataattcatactggaaaaaaaccttgtagatgtaactttatgtaaggcttttagtgtatgttctagtctttgtagatttcagatacagtgaatgaggaaactctccaataaaaccattgtatcagccctaatgaactctagggcattcatacaggagggaaacctttcaaagattatgaatttgacaagacatttagcaaaaatgttcaagacttacatcagaagactcacctaggaaagattttaacagatgtgccatggttttagtatcaaactttctgcatgtaaggggattactaccatagagtcagtgtcactgcaggcatgttagcctttagccaatgttaaaaacttcctagtcatacattcatattgtgaagaaaaatttacatcagatacaaatgtataagttatcagaactcatttagcaaacttgtgaagatcaatctgatcaaatctatgtggccacaaacaacgtgttttatttcacagtaattggcaaattatcagtcagtgattttcagattgaggcagaaaaatcacagttggcattgaattcaccatagccctttcctgggatagcatgaggttctcatgatactgagtcactgtaatggaagattggatattattcataaccaacttccattgaatgctttaatgctataa

SEQ ID NO: 46722 - DNA, 1057 bp, Homo sapiens
aatatttattctgtaaatcaggtcctactctgggtatggggagagacagctattattttagtggattaggtctctattctcctcagactccttccgcatataacatatcaagagagagtataggacatttgatataaacaacatatcacattgtaattggtagatttcaagtattatacacaaaaaattattttgttcttttaacagaatatgacagatacctagcatctagcaaaataatggcagctgcttaccttgaccccaacttgaatcacacaccaaattcgagtactaagactcacctgggtactggtatggaacgttctcctggtgcaatggagcgagtattaaaggtctttcattattttgaaagcaatagtgagccaaccacctgggccagtattatcaggcatggagatgctactgatgtcagggtaagtacgtttttccatgagacatctttaatgtttatttaggttaaaatgtaatggcatgtatgaaaaaagatagtgtaataatttttatttaacttatcggggacttttcatattacagaaatgctatttttaattataagatttattagttaatatgtgactgaccagcgttctaattgttgtaaagtttcttagaaaaataatgactgaatcatattttagtcataaaataccattgacttatttttcccttctaggttttttttttttttaactcttggatgagtactaggcaacaatgcaactaaaatagcctctaacagtcatgaaataaactacttttctagaaagtgtaatttggaaggtatttgcatgacttcagataggataatttcctttaaaactcttgaacatatgctgtgtgtcaggcactgtgctaggttctgaagatgtaaaaggtccctgtgaagtccttgatcttacagcttagagcctgtagagggagagacatcatgaatgtgattatagtacagtgtagaagtgcttcacgggaggttgttgtggaagcttggaggaataataccttttaaacgtagaagttagtactggaaaggatttcc

SEQ ID NO: 46723 - DNA, 1028 bp, Homo sapiens
aaaaaaactcttgggtgctaggcttaatacctggatggtgaaataatctgtacaacaaaccctcgtgatacaagtttacctttataacaaaccttcatgtgtacccctgaacctaaaataaaagattaaaaaaaaaaaacccaaaacttggttctttaagggttagtgatgctgatttttgtaaagtgttcacaaatctttgatttcagattcatctataattgtttaaactgcaaggaatttattgtaaattcaatggttttctgtattttttttaacagttttcagttagagaaaaatctaactttaaaacagttatccctgaatattttaattttgcatttgaacattatttgcatacatttttataatgtcattgattcgtagctcacataattttagagttggatttaggtgtatattaacttctttacctagaaaagtaaactaaaatacatttgtatttttattttatattatacctttcttaaaaactgtataaaatgagtcattttaagtgttttatagaagtttgacgttgaacccaatgattagtaaattttttctttgactaaaacagtaatgaaatctttggttcatttggtgatacctttggttgattttccacgttcttattctcatagattttggttatttctttgttattgattacagtgttcaactgaatttgttggcttgtggataggaagtctcagcagtttataagttgaattaatatattttccttttttaaatattggggcagtgttgaatctatggattgatttgggagaattgacttatgaacaatattgaacaatacagtaatgaacattgtatatccagttatttaagtcttgtttaatttttctaagcaatgtgtgatagatcttaatgtggtggtctgggtgttttttgatgatattgtaaataataatttttggcttttaagtttaattttctggctggactcagtggctcacacctgtaatcccagcactttgggaggctgagctgggcagattgcg

SEQ ID NO: 46724 - DNA, 1035 bp, Homo sapiens
ctagcttgctcatgtttttctggagcccctttcttcccagtgttccctggggtcagagttcatgctggtgaatgatatgttttcagtggagcatagaagaggtcacttgaactctggctactattaggagcctgaaagtaaacctagagacaaagccatcatcaagagtagcatgttagaaatgaaacaactgtcctggggcatcactggacacaaataagcctcttgttctcctcagcctttgttaagctattgttttcagaagttagtgacttcataaacaaagcctcggtcattttcactgttaagtaaaatacttgatttttgattggtttatacaaatgtactactaacaaaattacccacatttaggaaagctagaactgtagagtctcagtgtgtcttatgtacattcggagaacaaaggcaccaggagcctagttactaattatcttactgctaaagtggaatgtgttcagacagctaaatttttgagatgaccttgactgtctcacagtttgaatggaaaaactaagtagctctgcattttaaaaagttgctagtacagattgtaagggtgttttctgtctgtcttctttagtatgagtttattactcacttatgttttgaaacgaagaaaggaaatcatgcctcttggatacctcaatattccctaagctaatgttaaagaatgtggctacctcaaattcttgattttatgttttcgagagagtttttaaaatttatacacttactatgacagtaccaaccaggaaaaatattttacagcaaaaatatttgggtacctatagacatagagacatagatagatcaggaatttttttccagaaaggatttttatttcatcaaagtaattattttaactctaaggtcataaagaattaggttagtaaaatgacaaaggcatgactttgaaaacaaaaaaggtttgagaagccatctacagacatgatctgggtcagacttgatttgcagcttactcaattttagaatcggttgtcagttttgtaaaca

SEQ ID NO: 46725 - DNA, 1035 bp, Homo sapiens
tatttattcattccccttctatcaaacatgtaggctgttaacagtgtttcagtattacaaataaacatattataagcctcaaactgccttaaaactgagaggagatttattggaggtttagtagaccagtctaccagaagttagacttctgggtactcagatttgtttgcttgtcttctgatggtctgtcaactccttatgggatgggactctgtccaattattttgggatccctactgcttaatttattgcctatgcacagaagaggcagacagtaatgatgcacttacagtgacatggagcctttgttatgggcgctctcaaagccctttatgcttgtaatgtttaattatcataactgaaaaatacataccattttaaactttatttaaccgacgagaaactaagttatggagagaaagttaaaaaaaaaaagtgccagggtcacatatctaataccatgtggcagagtttaagttttaggatacttgaaataaactgaatggacctttaaatttagggtgatggaaaagatgatttgggctttggagttgcatgcggctttgacattttacttttacagtctaattgtatcacaagtccttacttgtgtatgtgagcctcagttttctttttcttgaaaatgatgatattagtaattacctccaagtttattagggggacacattttaaaacacacacacataaagccaccttgtacagggctggaacaatataagcccttagtcagtgattggttattgtctctttttcctgtctctttcgctttagacttgttcttaaactctcaaagcttttctcttcatttataaaagtaaacataattatatttgcagatttgttgtaaaatataaatgagatttactctttaaaaatggttttaacattttttaagttaaaaaattgtggccgggcgcggtggctcacgcctgtaatcccagcactttgggaggccgaggcgggcggatcacgaggtcaggagatcgagaccatcccggctaaaatggtgaaacc

SEQ ID NO: 46726 - DNA, 1084 bp, Homo sapiens
tctcttacgtggtctttcctctcccccatcttcctcgtgtagttctagaacagtttttgtttagatccgtattttcgtttttaattattttgacttttaaacataactcagtattgagccaattgaagtagtatggttgcatttcttgttcagctttgtttttcttgttttcttggactgaaaattgcagttgtccctcttgtttgcttaatattcttaggtctggctaaggtttcctactctgacagctctgtaagtagggcctctcaattagtttccatgcagtcaagtgtattcattttgtcttcaccccctagacacacccctcctggagctttccttctccttttccctgcttcagtctagagaggttgctctctagacctgctgtaaatggtaccagggtggagaaacctgtggtaccagcaaaaataaggcgagaacaggtaagacaggtgagtagaaaatactgattgaaaaaactgatgggaaggacagaggaggaatggagatgatgtcttcttggggaattgtgttaaggagaaactagagttgaggaagagcattctaggtagtgaaaatggtgccagaaaaagcatggagatggaagtgatcttttattttttggtgacttgaaaagcctgtgttgtgttaccttcttagattatatgtatattaacttattgactttgccctgaagagcttttaaaaaagtttaaatgggaattgtgacaatcaggccctgaggagctttaaaaaagtttaaatgggaattgtgacaatcagaatgttaaacattgatatattttttgttttgtttttttttgagaaataaaggtctcattttgtcacccaggctgtagtacagtgagtggcatgttcatagcttactgtaaccttaaactcctgggttcaaatgatcctcctgcctcaacctcccaagtagctgagaccacaggtgcacaccactgtgcctggctaatttttaaaattttttgtggaggaaggctctcactatgctgcccaggctaatctcaaactcctgggctcaagtgatcctcctgccttggcatcccagagtgct

SEQ ID NO: 46727 - DNA, 1051 bp, Homo sapiens
agtaaactagagaaaaaatattaagaagatcataagaaatattaagaaatatagaaatattaagaaatattaagaaaatatacttattaaatggaagtggatcttcataaacatcttcattctcattgtcttcatgttgagtaggctgaggaggaggaggaggaagaagaggggttggtcttgctgtctcgggtggcaaaagtggaaggggaggcaggagaggcaggcacactcagtgtaactattattgaaaaaaaatccccctatacgtggacctgtaccattcaaatccatgttgttcaagggtcaactgtactttaaatcatctctagattgcttatattgccgaatacaatgtaaatcctttgcaaatagttgttatactgtattatttgggggataatgacaagaaaagcatcagtacatgcttggtatagatgcagtcattcatttttttcctcaaatattttagatccatggttggttgaatctggatgtggaacccgctgacgtggatggctgactgtattgtatgttaaactttatcatttgtgacttctctgttttaaatgacctgttgattttctgatttgggatataaaggtttagcttatttatgttattccccatatctcttcctgcattacttattgttaaatagttgatatgtgtatttttcttttagaagtcttctgttgtaattttaccaatatctttcctttgcttgggttattgattcatgtcaatatcttgattccttttaagataaagatagtattgccctaaatattgacccttccccccagttccagcatgtctccctgttctgcctcatattttgtttttgttatttcttttatgttgggatttttacatttgtattttatctgcaactacaagtgttctggggactgctcatgggttgaactctaaaactagtttattatttttaattttaagttttcttgagctttcccagcttagctttctttcaaggccagtttttctctttgttttctccggtatttgtttctttttcatgaaggtggta

SEQ ID NO: 46728 - DNA, 1028 bp, Homo sapiens
tgtacttaacacaaagaatagggtccccaggagagcacttaaagggcaagcagaggaagcctaggtaggttgggttggggggggggacctacaagggccaggaagtttgtaggattgccatgagtgaggagtgtcactaatgctgggaaaggagggtggacattctgtggtttttttttttgagggagtctcgctctgtcacccaggctggggtgcagtggcgtgatctcagctcactgcaagctccgcctccccgattcacgccattctctgcctcagcctcccgagtagctgggattagccaccacgcccggctaattttttgtatttttagtaggtttcactgtgttagccaggatggtctcgatctcctcacctcatgatctacacgcctcggcctcccacagtgctgggattacaggtgtgatgactgtagagtatgctcgagctgtgtgtcctatacaggaggcccctcaggcccctcacagagtatgtgtgtttgtagtaggcatagtatactgatagagcttttggcattgctggatgcttgtacacagttttctttagctctttactatgggactgctgtcttcattgccacacaaaacagcaagaatttgttgaaatgagtaaaaataaccacataatttttttccctccctccctcccttcctccctcccttcctccctcccttcttcccttcctcccttcctttcttccttcctttttttttttttttaaattttgagacagagtcttgctctgttgcccaggcagtggtgtgatctcagctcactacaacctccacctcccggattcaagcgattcccctgtctcagcctcctgagtagctcctggctaatttttgtattttttttagtagagacggggttttgccatgttggccaggctggtcttgaactcctggcctcatgtgatccacctgtctctgcctgggattacaggcatgagccaccacaccaggcccagatatttttgagtttaaagatactaactcaataaattg

SEQ ID NO: 46729 - DNA, 1075 bp, Homo sapiens
gtgacagggtgcaatgtgcttatttttccttatctaaacctgaagctgttcacttcgcaaactgcttctgttactcaggtaatggtcaccagtttcagctgggccatgatgctcaaatgattttgcgtccctgatcagttacctcttccagcccccataggagttgctgctcgaattatttcttgaatttggcttatagatagatcctttttttggtgtctgttcccatagtttcttttggtgtttttctcaggtagacaacatggcccttaccatatatcatgatagccattagttttctcaagtatgatagaagagttgtcttgtgttgaatgtattgactatgcctattgattagtttaagtagaataatgtctctttgacattttaagcctttcacacaatataattttgtggggatattttttacaatgcagaatagaacagcggtgaagagcacaagctgtagacagatttttgctttgcattcatatctgatccttgctccctgtatgatgttgaccaagctccttaaactctctaatctgttttttctcttctgtttagtagagattattgtgaattgtaactcttttgtaaatgtgatatatagttcttagtgcttggctagtcatataaataattaaaaacgattttttttttgggcaggatcaactcgatgttcataagtacagttcctaacagtgtagttatttctactgtgggaatttaagggctaatcttcatcattccctgatttatattgatctaaaaactggaaaacagtttatattcgtcatttgctatgcatacaaaatgggcaagttattactgttaatattggtttttaaaattcaataattttacagcctcttttagggtattggtttagtcagtagcttagtaccagttagatggcaaaccgtgtactaagcatcagtgcagagatagtgaatgagacacagtattcccacctttgagcagtgccagtctagtattagaatatttttggctaaaaaattattttgaagcataaagaagcttttgtttgctctggtgattttcataacatatt

SEQ ID NO: 46730 - DNA, 1050 bp, Homo sapiens
ttactctccagccccatccaaaggtcaagcctggtgtttgctgtgggtcagggtccccaggtaaacaaagacagctttatcggacgagcttccaagagcttaaagattacctcccaggatctgggcaaagggccaaacttttctttgagcaaggcggttaatcctttactgcataagccctagcaaagcaaattattatttctgtcattactagggagttcaagaaattattattgctcctagatataagatatgttgtaaccacatacagtaacatttaccacgaaactgaaaaattagaatttctacacacaggtgaggatgtctccagaagtgtgtcatacttgacatctgttctaacatttctatcagggatttgaataaagaacaggagtcacactgggagacagttcatttttagaattttagatttttaaaatattttgacaggtggtaatgaagtggtaaaatccatagggtgaaatttgtcagcaataaatgtaaaatggcagacttagtttaaaaggaaaagcaactgagaaagctaaagctggacaaaacgtgtcttaactctaccagtgtgcggaagacctgggaatctagttgactaaaacaaggatcggtgaacttttttgtaaaggggcagatagtgaatattttaggttttgcagatgaataggcaaaacaagaatattatgtaggtatttaaataatgagagaaaacaaatttccacaaattttcatcgactgaattcaaaatataaaaacagtaattgaggctgggcacagtggctcgtgcctgtaatcccagcactttgggaggcggagggaggcagatcacttgaggtcaggagttaaagaccagcctggccaacatggtgaaaccccgtttctgctaaaaatacagaaacttgccaggcgtggtggcgtgcgcctgtagttgcagctactcgggaggccgaggcaggtgaatcacttgaacctgggaggtggaggttgcagtgagccgagatcatgccactgtactccagcctgggtgacagaatgaga

SEQ ID NO: 46731 - DNA, 1038 bp, Homo sapiens
atagactgtatgttcttttaattatgttgtacatataaatgaaggacttaagggcacaactgaggaaatggagagtagggattgatgtgaagcctgtttctgagttcatctacaggcgtgactaagtaagtgaaatggcaaggctgagagagaaggaatccagcgtaattccaggatggcttccagattttttctttggtgatgagttcatgaagatctttttgctcttaattttttttttcctggaatatcttagtgattgctttgatgagggaacattgtctcttaggtccatgaacccctgaaattctaagcagaattgtgtgtgtatgtgagctgtttttccctggggagagaattctagagctttcatcacattatcagaaaggagtccaaccaaaaggaggaatcactttttgttagattgtacacatctggtgtactctaaaggtttgtgttggcaagggaaacatcatcccaatcacaggatttttactttaaatgtaatgcatctcaaactgccaagtaaaatgcaaacacatgcaactgttttctaagttgaactgtatcaaccagcaattggaatgtttttccctagtttctcctcctttccgaaagacagaataagacacatttttggtacataaaaagcgagctggagactgacgggcatggaatgcttcaacatgctatgaacattagagaaagctaaagtttgtagagtattaacgtatcttagtattcatgtggctatgagagatggtgtcacttttaggtaggatacaccagtaccataaatgagtgtagtttcctcagttggattagaaatgtgtaaatagtgagttgtaagacaatccctaaatcgtgctgtcatgatgagcccttagttgagcaaagcaggagaagcagggtggccgccgagcagttgttgagatatgagcatcaggcagattcgtattgtgttctggagtctgcactggattggttcatacttgatgtcagcattattacatgtaatttagggattacagactacag

SEQ ID NO: 46732 - DNA, 1035 bp, Homo sapiens
tgtcaccatgtgtggctaatttttgcatttttagtagagacagggttttgctctgttggccaggctggtctcaaactcctgacctcagaagatccgcctgccttggcctcccaaagtgctgggattgcaggtgtgagccaccacacccggcctagattttaaaataagcatctgtttgtttctttttttagttgccactagtaaggatgatggaaaactatattttgtactaaggattttgaaagatagaattctttcaagtgagaattctgtgacttttctgttaaatgcgtatttaataactaaaaatacaaagcttcaatgtgaaaaccttgtagaagttttcaaacatatacagaaacaatgttgtaatgaattccctgtttattcattaccactttcagccatggttattatttaataagtattgttaactctttaaaggtactggttcatacttaaaagttgtgaagtaacttgcttctgaaaacgtacgctaacattggacaactcctgctaaaatgtgacataattcatgatgcatttctttaaaaaagatagggaaggaattgaatatagctctgctgcttttctaaggttcttctgtgagtgggtgatgcagctgactgtcctgtgtctttctttctttctttttttttggagattgagtcttgctcagttgcccaggctggagtacagtggtgctatctcggctcactgcaacctccgcctcccgggttcaagcgattctcctgcctcagtctcctgagtagctgggattacaggcacccgccaccatgtctggctaatttctgtatttttagtagagatggggtttcaccatgttggtcaggctggtctcgaactcctgaccttgtgatctgcccgcctcagcctcccaaagtgttgggattacaggcgggagcctccgcacccagcccccgtatctatcttaatgatgcagtgtgtatctatcttaatgatccaatgtgtatcttaatgatccagtgagctaagcaaggcggtggggactct

SEQ ID NO: 46733 - DNA, 1056 bp, Homo sapiens
ttttcttttagtctttttcagaaggagggttggaccaaataacattgcttgaaattaagaagccaaaacgcgttcttttttatttcactccagagtctagacctgaacctgatgtttgatatggtaactgctagccacatgtggccaattaaattgaaattaattacagttaagcgaagttgaaaggcccattcctcagttacactagtcccatttcaagtgctcattagccacatgtggctagtggctactacattgggcagcgctggtatagaacattttcatcattgcagaaagttctagtggatagatatggcttgactatcaaaacctcatcagggacttgcactggtacgtggatctgcatttgaaaaccactaatatgggtatccttgctgtttaaagtttgaattttttggaatctatatagctagacagatgattgagttcctttaatagacttactgtgaaatctatccctaaggtacagtgtagattcttagactgatttaggtggtgaaatgtgaatctgtggcacactgagtagataactattaagtattgatattttaacttacaaatatgtcagttttaactgagaaattttgtgaaagcatttattatatgttgatctgtgtcttagacccagtgtctcccattgcacttgccctgccatccctgcccttaggcagtcatagtgctgtgcaaagttgcagggcactgtggggttctggcgggggtgtcacagcacccactcttgagggaacaatgggaattagccaggtggggagaggaattagccaagtggagaggggaaggatgggggaaaaggttctagggagaagaaaaacatgggcaaaagcctggatgttgatgagaaccgtgtggagattggtttgaagcatcttaaatttgatttctagtatcaagagaggtagctgaaaccatagatttttaaaaatgtcatgaggccaggcacagtgactcaatgcctgtaattcgagcactttgggaggcctgggcgggaggatcacttgagtctaggagtttgagacc

SEQ ID NO: 46734 - DNA, 1028 bp, Homo sapiens
gctggggctacgggcgcccaccaccatgccctgctatttttttgtattttcagtagagatggagttttactgtgttagccaggatggtctccatctcctgaccttgtgatccgcctgccttggcctcccaaagtgctgggattacaggcatgagccaccatgcccagccatgtgggtgtcttgtagactctgtgtttttagattctttgattccacaagcactaagctgtctaagttattatagctttataataagtcttatctcattgtggaacccttcctacttgtctcttcttcaagagtaccttggctgttcttgaccttttgcagatcaatatatgttttagaattacttgtcaacttctaaaataattcttccagatgttgtttgggattacattgaaggtctacatctattcgtggagaactggattattatagatctctgaatatttttgtacaaggctttgtatgggtgtagactttcatatctcttgggaatggttggactaggactggaatggctgaatcatatggtaggtgtatgtttaactttttttttttttttttttgagacagggtctcactctgttgtccaggctggagtgcagtggtgtgatcactgctcactgcagcctcaacctcccaggctcaagtgatcctctgacctcagtcgctggagtagctggaactacaggcactcaccatcacacatggctaattaaaaaaacatttttgtagagacgaggtctagtcatgtttcgcaggctggtgtcaaactcctgtgctcaagcaatcctccagtcttggcattccaaagtgctggggtcataggagtgagccacgtcacctggcctgttgaaattcttaaagtgccaaactatcttctagatttgtaccattttgcattcccaccagcagtggatgagagttctggttgctctgcatcattagggcaacactcgttattgtcagtcttgtacattttagccattttaattcagtgtgtaatggaatttcattgtggt

SEQ ID NO: 46735 - DNA, 1119 bp, Homo sapiens
aagtgtttcttgttccgtgagcgctcactcagcctcgctgcagtgcggatccctcggttatgtgcacggatctgactccagtgtgaaatcgtagcattttctttgattgtgtgtggggcagccccgctggcatcagcactgatttcctgtcaccctgccgtgggagctgatgctgattattaccaaaatcacaggagatactgtgtccatccctcgatcttgtcacttaatacattaatgaaaaagcactcatcttacttttccagtgcttccatgattgtatttcagcgtgcttttccgtctgcaatcctgtgtcttttttcatctttaaaaaccttgttttgagaaggcttcatgagaaggccagaggacctggggctcagacaaggttagaggactcttctggagggtcgggggctcggacgtaggagaccgggcgcagctcgcactcttgttctctcctctgtgtgtgattctgcatttattctgcttgtgctccttgggtgcctatcatatcctagggcacggagggtggacagaacccacatctgtgggccagggggcttagctctgtggcagggggggcgcttcgagaaagaaagtgacccgaccagcgagggaaagaaatgggctggaccagtgtgggaaggccttcatggagagcagggcaagggctcttgggcatcacatccagaggctgagggaggggagacctggctgtgttcgtggaactgaagaaccactttcgcgactagaccttagccagggggaagttgggtagcagttaattttactaaacatttatttcgtcccttcagtatgtgaggacttggcaccgagctaatcatgaaagcactgtcataacaaagctgaggcgcttggaattaccaattgggcaccatccttcagtttctggacaacgagttgtggtcgtggtgacaaatacaaaatttagaacctccggttcctgagaataagttgatgtgataaagagtcattaggaactgcttttccctaattttctctatggcagatgatgtgtattgtggctttgaaaaccctaatacttccacaacaccttggaattttcatactttatagatggtgagtctcaatttc

SEQ ID NO: 46736 - DNA, 1034 bp, Homo sapiens
aagacagtggaattgtgcctcgggttaaattttaatttgacagaaaggtgtgttagaagcagagaagactgacatggccagactttagatttgctagaggtttttgcctggcaggaatctggtcaccctgctccgcccttcttcctgcacagggcatcgctgtgcctgttccggagcgaggcagctggtctcaggccatcaggttgccattaggatcagggccatggggtgggttgggaaggtgggcctctgcccgagaaccagatgaggctggtccggggcgttgacacttggcatccctgagaatttgctcaaatctggagatgctcaaaaagtagaaagatttactatttttagcctttagacctaatgaaatttggtaagaaaatcagtttagtaaccaaaaaaccaccacttcccatcccactcagaaacagcacgctgaggactgagagcagtagaactttgcgttgtgtgatggttttatgacataagaggagatttgacggacctggggtctctggtgtctcccagctttgttggaggaaagcaggctactcgcccaactctgtggaatcggtaatgtgggtccggctgaagttttaacctgtcttctgtcctcagggctggccattaggagtccactaagaatgcgtcacttccaattcggccatgcagctatttggggaggcgatgatgtcgtcagatcatggggccagtgccttcattccagggatgggtgaggagaagagcagttccacggtcgtgttctaggaatcctgcggtttaaacagtgaagaacgggaccaggaagacaggccagcccctaattacccccacagaaccggattaaatcaccctggaaaggggatcctccattggtcccttctccaaagcagcaaatccttatattttcgtggtattttgggtattaatactgaaatcaatgtttcagtctcttaaaagactttgagaaacgttttggctgctgaagaagaacaggtacagcagagtccagctggttctagaaattc

SEQ ID NO: 46737 - DNA, 1032 bp, Homo sapiens
ccagcgatacaccactcgcgaagtggccccctctcccctctgtctggaccggtcctcccaaccgaacacactcccttcttccccttcttccccttcccttcttcccctcctttccctctgcccagtgcacacacgaccctggcagcactgctagccagtgtcccccgcctcggacccccagcctgcaccgccagactgtggctctgccccggtctcatcggcactgcgctcccttgtgtccctttgaagataccttgatttcctgagaccgaccttgtccctggaggaaagaggccagggcatcagttcatccgggcccagattccctgctctgtagaagtccccgcaccttctgcgtctcagcacccgctgcccctttcccctttgcgcttaacccgttcctcccccaggtatcctgctctggattggagcacttccagcagcggcttttccagcggaggcggatccacacggggcccagcctcctggttagctattcagaatgattctagaaggcgggggctagggagggctgggaagggccgcttgacctcctaaggagcctgaggtgtttgtgtctctccagtgcgggtcactgatggagtgtggcttcaggttcacagacctagccactgacccccatctgatacctcagctgactccagcaaaacagggcttgtcgtttttattactgttttgggggctgtcttttccagtctatgacccggagcgaggagggtttaccagatgagtgattgaactaattgttgtggggtcagatgattcttgtgggctggtagattctgaatcgaagcccatttctgctggggaaaagccactgcatctgcccagcattactgagagcgccctgcgcttccattccccagacggtctcatccttcctgtgtcattggcagacaggtagaatgtggtaggaatcttatccttctgttattttgtgctggctttaggaaaaaataagaaaacaaaaagctggagtattggtgtacaggttagggagtgtaacacatg

SEQ ID NO: 46738 - DNA, 1072 bp, Homo sapiens
gggcccagactcagcaggtgtggggagcgagccttgtctttgatgtgtccatctgccacctgcctttcccgcagacctccctcgggagtggttgtccaggtgggcaggagctgccctatgcttccccgactgcctcatggctgctggcacaaagcctagctctcagctttgctggcatggcagcttggggtttagtcacgtcctctccatgaggccctcagaggtgaccctgtctccctggggtgaaccttgccagtgcttgagtctggtttcttagcgccctgtgggagccaaacagcatttgctctatccactctgagctgcccctcctggccatggtgccctggcccacaccccctgcctgcccgccctggcttcccctgcctcatccacggtataggtccacgggcctgtgattctccctggcctgcagagacccatctctgtggtcgcctgggccagtgtaacaagagccgtcacacatcacgtagctgcccagcttagtcaacgtcaacttcgctttgagccgcatccgattcttcgctccttcggcatgggctggcccagggccagctggggaagtgatcatcagccttgtcagtcacacactaaggttttggggtactccgtttctccttgaggacccctagtggtgctctgtggattttgaagcaccatcatggatgtgcagaggcccagagtggggcttcagacctctgtccctactacctctttcctcacgtctgtccatcaccagatgagtgggcaagaagggtcctcccagggtgggaggtgggctggccacttgtgccctgcccaggtcacggtagcagaatctggcagcagctcacgtgcagggtagcagggccaaggcatctcaccgcagggccagtgtatggtggctcccagatggcagagggagggccggccctgggctattcttcccttccctggggccactgcatatggactcgggcacacaccatgccctgtctgcagccgtgggacggggttagcattgcatgtgaggcacccagcgctagctcaagccaagtcaggctgcacactgtct

SEQ ID NO: 46739 - DNA, 1221 bp, Homo sapiens
gtggggagatgacagaagatcctcttccgtgctggcggcttggagactggtctgtttgagtgtagcatggtggctgtgggcttctggggggtcaggaacccttctagatgtctatgagttaggatggggccaggacccgagcgtccagggatttggaagttgggctttgagctcctgcctggacctaagtgtggctcacatgtttcatctcactggtcttcacacccaccctctgagatttcccttcttggtcccatgttacagagaaagaaacagattcaagggccaggacttgctgggacacagcaggctagagagagatccagctagaggttgagctgggactttgccaggtcttctgctcctggactgggactgtgctgtggtgtgaatgtcccctccaaaactcattgaaatccagtcaccattgtgacggtatgaagagtgggacccgtgagaggtgattgggtcgtggtcactgccgtatctgggggtgatctcctgatgagaggaagcgctggcccccacttgatctcggcctagtgtgcttgtatgctcttccaccggaggcccctctgtcttggacttcccagcccccagaaccacgagctgaggaaatctctttccttacagactcccctgtgagtgacattctgttacagcagcagaaagtgggctcagactgtgttctctgccttacgctgaatgcttttagggattatacagagaagtctaaagaggccgataatgtccagggcagggaggtgacctactgctgtcaacgtgggtctgttgaggccaggtaagggagtcagctaattcacggtgggaagacagctccagcagcaacccctgaggccacagctccgctggggtcctggttctgtctcttcccgcctgggagtaggatgccagacaaggtgctcacttttcctgggactgccccttcctgtgccgctgtctgattcctgcctgtggagaggctgtgttaggggtgtggtgaaagctgcgcacccggcagaggagctgcagcgtggccatccatgggggctcctggtgggcagctgccctgctgacagcaagccctcctgctgcaggccatcggggcgcctcatccatcattcagtttctcctcttgaactttgcagtttcattttgccctggaaactggtttcccccaaagggtaggctttggagagcagaaatttgtgttgtggtttc

SEQ ID NO: 46740 - DNA, 1044 bp, Homo sapiens
ctcgctgtggtttctcgtactttcacatctctgtagatacaggggcaaaagtcattgctgacagagccctatctatgtcctggaagtgtgtgtttcttgctttgaatgcatgtgtgaagattataaaagccaaatagtttttaaagatctcggtgctgaacgacagtcccagttcccatttgtgtcccattgtctttgtggtgtcacccgcactgtttgcttcattgtctggggaacttctgcacatccatgtactttgtgccatttctgggctcacgtgtcactcctaatagagcctcttaaccaagactgctggattgcagctgcttgaggcaacacaggaggttagaacatgtcccgagggctctgaaacagtaggacatcctgggtgggtggagctggggagggcatgggcaggccagctggccgagctcctggctggctctcctgagtcctctggacatggcttgtccctgtgagactgtagctcttcaggacctgagctcttcccgttcttgacctgctcttgtgctgactgtgctgggctgatgggtaggcgcttgtccccagtgagtggctgtgtcctcagggtgcccctcttccagaccaactgcagcaaggcctggagcctgactctaggtgcagcccttgtggctggaatcccttgtgccacccaggggactcgggccctgctcctcctgcagcccctcctcacctgggctcgctgctggagtgaggtttttagggagcccagagcgtactcatctctgagctgctgggcccagctgcctggtgcatacctcttgcctcggtcctgtcccccagaacgctttatggagactgccgtgtcctccgagcactttgttttcacttcctgacccgtctcagaagctcaagtggttgaatgttttagcctcagaatctttttccccaagccctctcaggtggagccccgctgtaccagacaccacagcacagctctgtgaggctgtgtctcttcactctgtttctggggctgctgaggcccctgggaagccctggagc

SEQ ID NO: 46741 - DNA, 1680 bp, Homo sapiens
gcggcgtggtgccctcggggctgtggtcaaggttgaagccctccaggagggccctggtggctgtggggccacagctcagtctcccttgccctgctcatccacagcaggtgacaactgatggcttctctgccctgccctggccactggccctgtttctccccacaccctggagtggcatggtcctgtgccccgaccccacctgaggcaggagggcatgtgcagacactcaagagcccttccaggagtgggtcgcccacgggtgtggctcgggtgcccaggacggtctgtgcccgaggttcctgtcaatacaggttttattttatcacttgccgtgtcatccgaaagtgaggaaatgttttggaagggtccaccctagcctagaacaagccagagccgcaccctggctggaatgggggccaggctgagccgatctggtctcgtgttcgctggctgatcattgcagtatcagagggtggagatgtcagtctgtccacgtggagagaagttgccctccaggccgacaggaggccatgcccaccgcccctggacaggcttcgtctcagaaggctctatctgctgggctggcggccatccccgtgttgggtggaccccgagcacggttgcctgaggtccgatggcccgagagctgggactcagttcttggcctgctagcggctgaacaggccgcacatctcacttcagttgtggcctcattcagcagaatgactctggaaccatcctctgttacccgcagatcctgtcccatgggctctggccccaagatgttggggggccccacggagagttgacttggtagagttcctttctgggaagaaagtaggagtggctgaccaggccctgctcatcacccggatagaggacacggaccctgtgtggtattttggcattttggctcagagtccaatgtaccatgttgcccagaatttcatacttacggcctttacatgaatacgtcttgatcagacattcagagattagtcttaggtttccacgtaagtcactgaaaacagtaaaacaggctgcttagatttctagcagtatgtgtgctcttatccccagctgttagcacgttagtaatacttttggggaggagttgtctgtcctggtcagttttcacagaggcggttgtaagaggatgtggttattttctccatgtctgtagttgctttgcggcatctccatttcacgggcaacactcactgcctgcagctgagattccagaacgccctgtgtccacagtgattagcctcgtctttcagcgagcataaaataggtgcattgtccttttcttttcttgaggcagggtctcactctgttgaccaggctggagtgaagtggtgtgatcccagctcactgcagcctcgacctccctggcttgagtgatcctcccgccccagcctcctgagtagctgggactagaggcacgcaccaccgcgcctacctttttattttttttgtagagacagggtctcactgtgttgcccaggctggtcttgaactcttggcctcaagcgatcctccttcctcatccttctaaagtgctgggattacaggtgtgagccacagcactcggcctaaataggtttttcttgctatgttattttcagtgctttgcccttgaattcttttcctctcttaaattcatatcatttggccgag

SEQ ID NO: 46742 - DNA, 1050 bp, Homo sapiens
agaatttacgtatagtgggaggcataaatctaacagtctgtgagttctaacaaatgaatcaccaggcgcagtggcttgcacctgtaatcacagcacgttgggaggctgagacaggaggatagctgagcctgcgagttcaagaccagctcgggcaacatagtgagacgtctgtctctacagttaaaaaaaaaaaaaaaagaaagaaaagaaaaattagccaggcatggtggcatgcacctgtaccccagctactcaggaggctgagtcaggaggatcgcttgagcccaggaggtcgaggttacaatgagccctgactgacactgcactccagcctgggtgaaaaagtgagactctgtctcaaaaacaacaacagaaaccccaaaacgcatgcacctgcgcaacgcatacctcgtcgagataaagaacgttgccattgcccttctctgtcctcttcccggtagaggcctccatccccagaggcagccccagctctgagtctctcactgtggattagctgcctgttctggagcatcctgtggctctgagtctgtcactgtggattagctgcctgctctggagcatcctgtgcctctaagtctcactgtggattagctgcctgctctggagcttctgtcaatggagtcagatgttctcgcattgcttccagcttggctcactcacttggcatctgattcaggctcgtgtcattgctggcttcacagtgcatttcccatccttgccagggagccttcctttcttgttccgcactttattaattttacttgagtcacttgcagtttggggtgactgtgagtagagcctgctgagtccttgtgcagctctttctgtgcacctgtgtttccatgactgtcgcgcgtgggatcgctgggacgtaagacatctgctgacttgatgtgacatcaccaaactgctttccagcgtgccgcgaccctttctgttcccctcagacgtggtgttaccgcctttctaatctgcattctcacgtgtgtggcctctcactgtggttttcatttgcgtttccctggtgtc

SEQ ID NO: 46743 - DNA, 1026 bp, Homo sapiens
catgagcccccaggacccctctgcagttcctctcagctttcggttggagagccccaggccctgagctattggccctagctctgccctgggcactggggagggctcagggtgattaggcctgttccctcctctgggaagctctagaaactccccttccctgcagcccgagggaaggagggtaggcaagtgagtgcccggcctgagtctaggcctctgccctgtcccagggggtgatttggcacacgcgccctctctctccccctcctaatttaagtagaaacttactgtcggcctggtggtcatgttgggcccatgtggaaggctggaggacagcgtcagggcccgttgatggctgggtttgtaataggggctggggcctctcctccctgtcagcggctttctctggacctgaacatggaggaggcggtggggagccagctgggtgctggaggaggtaggtggtcgggagatggctgggtgctggaggaggtggtcgggggatggctgggtgctggaggggatggtggtggagccggctgggtgctgggggaggtggtggtggagacagttgggtgctggaggaggtggtggtggagacagttgggtgctggaggaggtggtggtggagccggctgggtgctgggggaggtggtggtggagccggctgggtgctgggggaggtgttggggagatggctgggtgctggaggaggtggtcgggggatggctgggtgctgggggaggtggtcgggagatggctgggtgctgaccagtggcctcaggtttgtggccggccagtgctcgtcgttgtcagatggaaggcagaggctgctgggcagtagcttctggggcttctgtgtgctgccagccagggtctctgaggatgggcacaccattgaggcacacgccagacatcatgtgtggagactggggtggggcagagggtgggaggagaaaaggagcagtgcctgtatgccaagggcagaacgggactcctgcctcaacgggtggcatccacggtgccacc

SEQ ID NO: 46744 - DNA, 1034 bp, Homo sapiens
agggctcagcacagggcagaatctctgccttgcccagggtccctctttggctgggaagctccccaagtcccctgtggctgtcacatgccagggctgagaagataaggctacttataggggcgggaagcattgaagctggtttctggccctagcgctcccctgcgatgagatgtgggagccagtgtgtccctgcctgtccatcctgtgcacccccagctttccttgtcacctgaaaccacctctgagggaaggtggtggcgtctcagatgcatgggcatgtggctggtcaggtggcctccatcccagggtgccccgtctgtgtgacctccctctgggtgctgtgggcttgctccagggtgcaggtgcaaccccagcagcggtctctggggccaggcaggtgggtggacgattggacttggaggggaatacagagggcatggaagtggcgaggctggcctgttggcgagggtgtcctggtggtggggcgggctgagtcagggaaggactctgaaggtcccaagcagctgctgaggcccccaaggaagtggttccaaccttggacccctaggggtctggatttgctggttaacaagataacctgagggcaggaccccataggggaatgctacctcctgcccttccacctgccctggtgttcacggtggcctggtccctccttgccgagagagtgtcctgggtcagggacgcagaggacgctcacagactccagccctttgttaccgagaggacacttggcaaggtccagcgatggtccggagtccacacacagactggcggcagggcaggagggggacagttctgttgtgcttggttggacagtaagagggtcttggccagtccagggtggggggcggcaaactccataaagaaccagagggtctgggccccggccacagagtcatctgcccagctcctctgctgctggccagtgggagtggcacgaggtggggctttgtgccagtaaaaccacaggctggatttgcctgcgggccatggtccctgtctagggcagc

SEQ ID NO: 46745 - DNA, 1538 bp, Homo sapiens
ggtgaaggaagacggatcccagccagggctctcgggttgatcagcagtaggaggtggcccctcctgcccagtcccacccaggacatgggctggtggctgggctttcagctgtgcccagctgcccttcgcagagcttgcagggtttatgaggtggctctggtgagattaggggcaggacacctagtgtctccagccgaggagtgaactgggtggaggtcctgtccttgtgtgcacattgtgggagagtcagtctgggaggcctttgtagcttgtgctggggcccttgggtgccagccctgtcttgacggtggctcctgctgagagagaggccctgtattaatgtgagccctgggctgcctcccccttgagggtccttgtcatcttccgggcctccttcagcagaccggacacaggggcagtgcaggtgaggggcttgggggagctccttggcagctccaggggatgcttgtgggcgctggcttatcttgtctcaggctaccttgctcaggtgacgacagggtgggtggatttgggaaaggttggctcagatagtggtccctgcttgtcccccagggcctgcctaggctccaactgacagtaatcccaagagctcccctttcaggggatgacggagtgacgtcacctgtgtggactcagctgccacctgggattgtggtggcggcgggtctgtctggcgctcagcttccatctccaccagtgtcacctccacaccacctcgccaagcagcttctggaaaggcccccggccgccccgggctgacctgctgctgtgtctgacccggttagtctttctggctgcctctaaccttgctgcttttccttcatgctgtcctaggaggccaaagcaaagtaagtactcgcctgtcctcatgccccattccccttcatttgaccggggaacccccagccctcgctgcacctgagggaacccagcaccacctgcgcatggcccagtctgcccagagggcctcagtttcccatctggaaagtggaggaattgggttttctggatggggcagcagcaggtgggcaccctgtgtggccgtgagcagggtcctgtcctgggctggcgggtcagcagctgacatgcggctccctgcagggaacaggtggcagtgccaggtctcggtaggagccttgaagtggcttcccctccctgagcggcggcttctgcccggagcccccaagaacatagtctgaggccactttggccaataaagtctggtagggcatcaacactgggggccagctcagtggcactgctgatgggacctgcacggctccatgggagcagagagactggtgggggtaccaccgcacgatgtcacaatgccctgtctcctgggctcttgctcccaccccacccccaacccacaacccctgcctctgcccatcagcctggccttggtaagtgctgccccagcctggggaaggaatgagcaggggagcctagggagcgtcttcatgggccctgtggcctcccatgggccccggttcctcgttggtgccattagaact

SEQ ID NO: 46746 - DNA, 1050 bp, Homo sapiens
ggcagtgccagtccacagactcaggccagccaggtgggccggagaggggtgctgctgggaggggtgggcgtgcacaggctgagccggtggctgaccccgtcccctgcccacctccctgacttctccctgtggagggtggacaatctgggagcctgtctgtgtgtgcgactgtgatggggtggcgtggagggcagggcctgggagccagctcctcccagaaagcttccgtttgcccagatgtgtggagacctccaggccgtgcagcaccttggtggccacagctctccaggatgtcctcaccttcctcagggccctgccctcctgacctggagtgttctgggtaggagtctgccggggctgctcccaggacagggacaggggaggctgtgagggccatgccgctgcagtgggtcttgctggctgccacctgtgtcacaggccctgttagctgggtggagccttccagagccaggaccccagggcactctcaaactctgggcagctgccagaggctcaggtgcttggcagacactgtctacccctcagggaagagccttggtggtgagcctggcctgcttccaggagcagagtagggacactttggccacttccccctggggcctggctctggcgtttccaagactgcttctctggcagccagctgtctccctgtgttctctttagaaagctcctcctgagcttggataaactgcaggagcgaaggggctgaccgtttgtcgggacgcagttgaaagagtcgctgtgtcctgctccgggctctcctgctggagaggagaggcttgcacgtgcctgtcgtctgcgcaagctttgaagctcagacttggtctctgttaggagagatggtgcgctgcgtccggcaggtcctcccatgcttgggaatgcgggaagcggggaaatgaggaggtgggctcggacgtgtggggggctgtgctggctgtcctgggaggctctctgcccgctgttagtggccagctccccaggtgacgggcctggcctccaggtctccagcatggcttactgtggtgtctc

SEQ ID NO: 46747 - DNA, 1050 bp, Homo sapiens
gggcgcacgcgcgctgacctagcccggcccggccccgccccgcgcctgcgcgctggccgcctcgtgcgtcactcggcgcttgccggctgccggacccgcccccaccggcgacaccactggccgcgaagcgcagggggggcgcgcgcgctgccgcccgttcccagcacttgtgcagactcctccggggaagagcggcctccgcggtcatctccaacggaattctgcctttgaagtgtcggggcacggcgcgtcgagggtcctggcggccaggcggggcgtgtgcaagggtcgcgtcccccccccgggcccccggcccgtggctcttggtagagcccagtgcttcatttcccgtgcgcggcccgggcggccctccctttcatcagtcttcccgcgtccgccgattcctcctccttggtcgccgcgtccttggctggcgtgtgagtaccgcggcccccgccggaaggagtcgggcgcgacagagacgcccgaggggccgggagggcgggcggcccgggctgcgccagaagctcgcgccgttagggactgaggcacaagtgcgccagcgcgggcttaggggccgtgggccaagtgcggcacttggggcgagcgcagagaggcggggcgacggaggccacgtggccggcttggagggcgtccgcgggacgggggcgccgggagcactgtctcacggcgcatcccggtcgtggaagcccctcggccaggctgctggggcctaaggcctgtgtttgctgccgtctccgtgggagaccagacatctgccccagctgtttctctggcctgcagaccttcgtacaccacgtctttgtcaagcaccagttactgcacgcatcagctgagcacggaggggataggcacggacgcaacacttttggaacttagacgctagtgagcacggaaaggaataagcctgtactgtgactgggtcaaaatttctgtctcttgatttggatagggtggtcgggcagtctctgaagggggcggggatgctgttgctaagaagtagtactttcagaggctttaagtggaagg

SEQ ID NO: 46748 - DNA, 1035 bp, Homo sapiens
ctgccacgtggggggcatcccaggtggccagcctgtgagtcgggagctccgtcgaagcctgaccccacttcccgccgcaggagaagcggctgagtgccgagtctggcctgagtgaagactctcgcccatctgccagcacagtctctgaggctgagcccgagggcccgtcggctgaggcacagggtgggagccagcaggaagccacgactgctggcggggaggaagacgccgaagaggactaccaggaggtgtggattggcaggaaggaggcaggaggctgggcctgctgggtgggggctgcctcccctgcggggcctcagctgggatcggttttggtgcaggcagtgcctgggccctgctgatgcttcggggagctgccctgtacagagtggctacgggtggtgcagggccgtgctgctgggggtgccctggagagctgcctccctaggtggggttaaggtctcccctgacggctgggctcacagagcccacccccaccctggactctcttctgacccccgtgggctccctggtgtgaggccttggcgcaccccttcgtttccacctggggcgctgcgtgtctccaggatgagcccctggccttcagcttttctcagggctgagacacgcgcccctcactgggcagttagtgctgagtctttgtgtggcggggaggctttcggagcccgtctgtggccacactgtttagtagggtcttcctgtggaagcacagccacagagctggggccaccctcacccttttgtccgcacagcccacggtgcatttcgcagaggacgcactgctgcccggggatgacagggagatcgaggaggggcagcctgaggccccctggaccctgccaggcgggaggcagcggctcatccgcaaggacacacctcactacaaaaagcacttcaagatctccaagctgccccagcccgaggccgttgtggctctgctgcagggcatgcagcctgatggggagggccctgtggctcccgggggctggcacaatggcccccacgcaccctggg

SEQ ID NO: 46749 - DNA, 1046 bp, Homo sapiens
ccccggccccgagcccgccgagcgccgccgccggagcccgcgccgcccacccgcaccatgctcaagtgcatcccgctgtggcgctgcaaccggcacgtggagtcggtggacaagcggcactgttcgctgcaggccgtgccggaggagatctaccgctacagccgcagcctggaggagctgctgctcgacgccaaccagctgcgcgagctgcccaaggtgagcggccgcccgcacctgccgcccaaaggcgcgcccccagcccgtgattcctccggcggcagaatctgcccgggcgagtcaccgcagcctccagccggccctgctggtttgcactggccaggtccccaccccagccagccccacccttctcttccagccgccctggctggcgcaggtggcagcggtcatcaggtgcttgcctggggatagcgattgtcaccgagcctggaggcggagcctcagagtgaaacccgtggggattcagggaggtggatggggttagggtggaacttggattcaggtggctgatgagtactagcttcttgggccgctctggaggtgggtccagacctcctctccttttttgctgggtgcaggggtgagtgggggagccctcttgatgtactctttgctctcggatctgttcgctgtccccctttctttacccttgcttctcgtggtcaggtgctctcctaaggctgctacaagaaaggaggctggagaaagcagattaaaaagtatttcttttctggagatggggtgctgggtgatcagtacctaggggttgggtgtcccaaagaatgtgaccctgttctggccgtggcagtgacagctcggtcctctgtggccacctgcaggcctcgcgcgtagcactgtgcctgtggtactgtgttattgtggggagcgtttactgagttcttgctgcagaaccaggccaggcttgttgtcaggatgcagtagcagaggccagtgtgggcccctggagggtggcagaagtggttcaggggctgggtgggccctgaggtaagacacagggtaggggattg

SEQ ID NO: 46750 - DNA, 1052 bp, Homo sapiens
ccctttacccaccctgagaccagaacttgcagcccctctgcagatctcctctggccactgcagcccctccaatgggctttttctctcatgcattccctggcctggaggcgtcagggaccccacatcctccctgctcctcagactcacagcccctccatgttacctcccgcacctcctccctggggcagctgctccctgggcctctgaggatgtcagctcctggctccctgcctctctcccactccactcctggctcagtcttagagatttctatgccctcatggattctacccctgccttcctggcctcttgattcttggcttgcctctcctccaattccaaacttagtgaaatggccttaagcattttaaactgtatgtatacattagcgcattcatgcctttctaaacgcatttcaaatgtcaaccaggaaggcacaccactgtattagttttatactgccgctgtaaaatttaccacaaacttagtgacttaacacaaatttattgcaattctgtaggctggaagtctgactatgggtctcactggactagaatcaaggctggcaggctgccttccttcctggaggttctaggggagactctgtctcctgctccttcaggctgctggcagaatccacatcctttcggtggcagggccaaggtccccactttcttgctgactgtaaactaaggccacttccagcttgtagaggctgcctacattccttggctcttggccccctcctccatcttcagagctagcaggttcagtctgtgtcacgaaccatttctctggttccctgcagacaggaaaggttgtccctaaggactcatgagattaggttgggcccagccagataatacatgataatctccctcctcaaggtttttaatattaaacacatctgcaggacacattttgccatgtaaactaacattcactggttccagggattaaggaatgaacctcttttgttggggaagggtggcattctgctgaccacagcactccaaccaaaagccaaaaaccaaagcaagacttactaacgc

SEQ ID NO: 46751 - DNA, 1021 bp, Homo sapiens
cggctgaccgtggacgaggcagtgcgtgctggcctggtgggccccgagtttcatgagaagctgctatcagccgagaaggctgtgacagggtacagggacccctacacagggcagagcgtctccctgttccaggccctgaagaagggcctcattccccgggagcagggcctgcgcctgttggacgcccagctgtccacgggcggcatcgtggaccccagcaagagccaccgcgtgcccctggatgtcgcctgcgcccgaggctgcctggatgaggagaccagcagggccctgtcggcaccaagggccgacgccaaggcctacagtgaccccagcacaggggagccggccacctacggcgagctccagcagcggtgccggcccgaccagctgaccgggctgagcctgctgccgctctcagaaaaggctgctcgggcccggcaggaggagctctactcagagctgcaggcccgtgagacctttgaaaagaccccggttgaggtccccgtgggtggcttcaagggcaggacggtgacggtgtgggagctcatcagctctgagtacttcactgcggagcagcggcaggagctgttgcgtcagttccgcacgggcaaggtcaccgtggagaaggtcatcaagattctcattaccatcgtggaggaggtggagaccctgcggcaggagaggctgtccttcagcggcctccgtgcccctgtgccagccagcgagctcctggcttccggggtcctcagcagagcccagtttgagcagctcaaggacggcaagacgacggtcaaggacctttcggagctgggctccgtgcggacgctgctgcagggcagtggctgcctcgccggcatctacctggaggacaccaaggagaaggtgtccatctacgaggccatgcgccggggcctgctgagagccacaacggctgcgctcctgctggaggcgcaggcggccactggcttcctggtggaccccgtgcggaaccagcgcctgtatgtccacgaggccgtgaagg

SEQ ID NO: 46752 - DNA, 1061 bp, Homo sapiens
ccgagcggctgaagcagtcggcagaggagcaggcacaggcccgggctcaggcacaggcggctgcagagaagctgcgcaaggaggccgagcaagaggcggcgcggcgggcacaggcggagcaggcggccctgcggcagaagcaggcagctgacgcggagatggagaagcataagaaattcgccgagcagacgctgcggcagaaggcgcaggtggagcaggagctgacaacactgcggctgcagctggaggagaccgaccaccagaagaacctgctggacgaggagctgcagcggctgaaggcggaggccacggaggccgcacgccagcgcagccaggtggaggaggagctcttctcggtgcgcgtgcagatggaggagctgagcaagctcaaggcacgcatcgaggctgagaaccgcgcactcatcttgcgtgacaaggacaatacgcagcgcttcctgcaggaggaggctgagaagatgaagcaggtggcggaggaggccgcgcggctgagtgtggcggcccaagaggctgcgcgactgcggcagctggcagaggaggacctggcacagcagcgggccttggcagagaagatgctcaaggagaagatgcaggcggtgcaggaggccacgcgactcaaggctgaggcggaactgctgcagcagcagaaggagcttgcgcaggagcaggcgcggcggctgcaggaggacaaggagcagatggcgcagcagctggcggaggagacgcagggcttccagcggacgctggaggccgagcggcagcggcagctggagatgagcgctgaggctgagcgcctcaagctgcgtgtggccgagatgagccgagcccaggcccgcgctgaggaggacgcccagcgcttccggaagcaggcggaggagatcggtgagaagctgcaccgcacggagctcgccacccaggagaaggtgaccctggtgcagacactggagatccagcgacagcagagtgaccatgatgccgagcgcctgcgggaggccatcgctgagctggagcgtgagaaggagaagctccaacaggaggccaaa

SEQ ID NO: 46753 - DNA, 1013 bp, Homo sapiens
tttcctatggtggtcgggtgggctgggcaggcccagaagctggccagaggcagctccgccccggaccccagggagccggaggccccagccagcgcaggccctttgccctttgccctttacagcatgagactgcttcccttgagccccacccagctgcaaacagcaccccccacccctggggtcgcccaggtcctgcctcaggtgtggcttcccctctgtgagtcacaggcttgggccccctccccatccctgactcactggcgaggcccctcctggggcttcccgatgctccattcccccatgaggcccggcctccgtgagtcagccctcagctacgcgcctccgacgtgaggtgtctgcctggggcagggtgggctccgcaggtgggcactgctccaggatgtgccaggtgggcagcttgggaggggccaggcctggggtgggaccccactggccccagggccagggcaggcaccatggggcagggtgtgctccccgcttcatgcaggtctgtgaagaggtgtgattggggggctgcaagagctgacaggcagcaggtcccctcccctcgccaggtatcagcggcttcttgagtccgccctggcagggtgggtgggcagaggctgaagcagggcctggcccaggcctggagggagctccaaagagaggcgtggcctcagagcccctcccgtcgggggagcccttcagtctgttggggggtccttctgggtggctgtggggacggcctgtgttcctctgcggtcctggcaccatttggtgtgcagtgaagtgccagctccccgtgtccccaggtccccctagggggctgcagtggtcggggtgggtgaggaaaccccggtttcctgtttctggcgggccgagggcgtgtctgtgggggagggggctgcttgctccttcccgccgggacactcccctccctggcggcggcctgggcagggtggggcctcgggggcgggccggcctcgccggggagtacagcaggcagggagtgg

SEQ ID NO: 46754 - DNA, 1027 bp, Homo sapiens
caggggcatcccagacagggtggccgacattggtgaaggcggggagagcgggggctttgccaatctgatgggtggaaagagttgttttaattatcaccaagcattttttccttctgtgaatgggctattccagtcctcgtatgtgtacttaatttttcttgtgtgtagtgttttaagggttctttataccgactcagtcgtctccaatgttgcaatgggaaagttctcagctgcacgcaggaagcaaggtggggggcgggcaggggagcgtctcggaggcaggtcgccggcccggcggggaacagacaggtcgcggccgcccctgggcgggggccacccgaggacccccgggcgaccgcggtgtcggcggccgcgacccgggcgagaacgggaaagggcgtgcgtgcgggactcggagcccgcggaaccggcccgccgggaggggcccagacgcggctccctctgcccggccgcggcggccccggccccgccccgcccgtggggcatcctgggtgcgggggcggggcgggggcggggcgggggcggcctctttaagcggcgcgcgcggccgcggggacagagtggccgccgggtgctggaggctccgctgcaccccgcgccccgcgcccgccggcatggccggcccgctgcccgacgagcaggacttcatccaggcctacgaggaggtgcgcgagaagtacaaaggtacggccccccgtcccgctgcctgtcgggccgctcctgacagcccagccgccgagcaccttgtcgtccacggtggcggtcccgatcgccggcccgagcgcggccactccgccggcctcgtccgcctggatcgcccccaacggctgccagtgcctagggaaggggaggactcgctccgctgagcccccgaggccatgcccttaatagggcatcgcgcggctcgggtgggtggggtgggccgcgggcgggtgggggcgctcagggcttgtcggggtcggctgtctgagccaggatccggtgtctgtggccagcagacacatgg

SEQ ID NO: 46755 - DNA, 1104 bp, Homo sapiens
tgcctctccctatcagttggccagtggagctcgagaacaaactgttgctgccagataaagcagcaaagcctgctccactgcccagcgcaggcccccttcccttcctccaccaggctgagtggagaaccctaaagctacgggacaggctcccgttccccgtgcctacacagggtgctggctctggcagaaagacagtgtgcccgccccgcatcacctgtccgagtgcgaacaccttgggaagggggttcctggtggtcctgtgacaaccagagacccccagggccaaggtgaggcgcccacccctggtccctcaataaagaactgcaagcacatgctggtcctggggagtcgggcaggcacggagctagctgcaagcatccgtcttcccccaggaggccactgcagcccggcccttctgtgccctgggcccctcctcattgcagcaccacccaccgcaccaccctgggacagaggaaacacatggaggccatagcatagagcctgtctgtttatagatctctgcctgtcttgtccgtccatccactgtgtgtatatatctgtgtatctctgtggagcggggaacgggacagttgtgtaaaaatccaaaatacaattctgactatgaacaacctgcagggtcagtccaggtgtggctgtgaagccccaaccaaaccacaggacacggggttgggggaaggcagactggcaggccagggtgaccctcctgaccagaggtgctgcccagacccgagcccgtttgtcctactggggctatggcggccgacccaccagtgcccaagaccgcgaggctgccctgcctccccaagaccagccctgcactgggggtgggggtgggcggctggcccagctcctccggggcctctaggagacagtggggtccttggctttgggaggctccgagcctgtcagcagggagatggtggggtcctcggcgaagccgtccccttcggagaagtaggagccctctcccagctcaaacagcaccggcaggtcgttgctcccggtgtccacggagccggggtccagcaggaacagcggctgcgctgtgtagtgcaccagctgcttccctgcgggggtgggggt

SEQ ID NO: 46756 - DNA, 1070 bp, Homo sapiens
gatcctgcagacggggcaggagatcatggagctggacaccagtggcttcgccactcagggccccacggtctttgctgggaacatcggggacaaccgctacattgtccaagtgtcaccactgggcatccgcctgctggaaggaggtaggtgggggggtggttgggccctgggcatccgcctgctggaaggaggtaggtgggtggggacggtgggggggaggtggttgggccctgggcatccgcctgctggaaggaggtaggtgggggggtggttgggccctgggcatccgcctgctggaaggaggtaggtgggtggggacggtggtggggaggtggttgggccctgggcatccgcctgctggaaggaggtaggtgggtggggacggtgggggggaggtggttgggccctgggcatccgcctgctggaaggaggtaggtgggtggggacggtggtggggaggcgcatgctgactgccccatgcctacagtgaatcagctgcacttcatccccgtggacctgggcgcccccatcgtgcagtgcgccgtggccgacccctatgtggtcatcatgagtgccgagggccacgtcaccatgttcctgctgaagagtgactcctacggtggccgccaccaccgcctggcgctgcacaagcccccgctgcaccatgtaggccccctcattcccggcgccctcctgtccctgccccttgcccgccgctgagcccacccctctccccacagcagtccaaggtgattacgctgtgcctgtaccgagacctcagcggcatgttcaccactgagagccgcctgggtggggcccgtgacgagctcgggggccgcagtggcccggaggccgagggcctgggctcagagactaggtgcgtgggggctgggggcgcaggtaggggcttgagtccctggggctggcaggccgcccatgaccttctgctggcccccagccccacagtggatgacgaggaggagatgctgtatggggattcgggctccctcttcagccccagcaaggaggaggcccgaagaagcagccagccccctgctgaccgggaccct

SEQ ID NO: 46757 - DNA, 1022 bp, Homo sapiens
agtggtgtgggcccttggtctgtgcctcccacaggacagctgcttcaatagcatctgtgccccctcctgcctgtagtccacccaccactgacccctggacttggctggcggattttcacaccttctcctgggggcaggtctcagcttgtccccaacccagtcagagccagtctcactccctgcctcaggcaactgtgtatgttttaatttttatttatttatgtattcatgagatagagtctcactctgtctcccaggctggagtgtagtggcaccatttcggctcactgcaacctccgcctcccgggttcgagccattctcctgcctcagcctcctgagaagctgagattacaggcgctcgccaccatgcatggctaatttttgtatttttagtagagatggggtttcaccatgttggccaggctggtcatgaactcctaacctcaggtgacctgcctgcctcggccttccaaagtgctgggattacaggcatgagccaccgcctgtaattttaatttttaaccaaactgagaacttgaggattgaatgcaggtaacgggtggtgttcatgtggatgtggattccatgaaagagggctttgtcctcactgtcggttctccacatgtaggtcctttgactcagcaggccttaggcctagtccacaggtgctgagtgaacagccccagcgtctgacagctccttagcttggggtgcacaggcagctgaagcagtaggatggcagctcagacttcccagggccccacgtgtgcagggctggcctcccagcaccaccaggcagggccggcctcccagcgccaccaggcagggccctgtgagtgtcccctccctgacacacaccttgtagagaggctgggcctgggcaggctgctctgctgcaccacatcccattctcaagagggtcccaggtcccaaaggaagcctgtagcccagtggctttctggaggtttgcatggctggcaagcctgggccggctgctggagaggcatcaggacaggagcaa

SEQ ID NO: 46758 - DNA, 1047 bp, Homo sapiens
tctcgagccagccagtgtcaggaatgcagcaggttccaccctctgttcctgctagaacgcttttcctgaccccagcagaacacatggctcagggtgggcaccagccaagctgggggctgacttagacagtccctgactctggtgagaagaggggagtggccatgctgagctttgtgtgttctccctggcactggggctgtgggggacaactccatgggcctctggaattggctgggtcctcagtaactcgagagcttgtcatccagataccagatgccaccagtgctggcagggaagcctcgggtggtgccccaggtctgagcctttgggcctgcagggccagctgacccatgggcctgtgcccgtacgatgatgcctcacaggctgggaaacctgcttgggtgtcagactgaggccctcatgcaaaaggtttccgccaccgccgagtcctgcctcacgtcaggttggggctgcagccagtacagcaagactcagcttttatgttctctgtgtgggtgttagatatgttctgggggactggcctgacaaggtgtgcagccaccttctggagtctcaggtgggtggcaggagggctggtggggcagcagttacacctgtgcaggagcttctggcctgaccaggccgcgcaggtggtcaggtcgttcctgccggctccctgctctgcggcccgagggcagtgtggcctgttggcacctctgcccatggggcacctcctctgggaagagacagcctcagcggtgcccgggacgttgcagccgcagcctcatccctgacttctctccctccattttggcccttcagacgaggcccagtgtgatgctgcgtaagacagacctggccctgacccttcctgctgctgtcagatgaggccctgggccttggtgctggcacctggaggaagggactgcgcattgttcccacccctcatggggcattcttaaggcaaaaacgggctcactcgggtgtaagtgccgggcaggggcctctcacagatgtggtccagccgctccctctaactcggccctg

SEQ ID NO: 46759 - DNA, 1052 bp, Homo sapiens
tggtcctgtccctttccacatgactcgaaaggaggaagagctgatggacaggcaaatgtttggggaggccggccagatgaggctgggagacaggacacctgcagccctgttttccctggcttcgggtgggctggctggcttagcccagatccctacttttaaaactgggctccttgttcctgaaaccagaccccagccttcccatttctttacgacaagtacatgtatatggtcccccagcaaactccctgctccttgctgatctcagaggtcacactgctcccagagcccacttgggaagccacaccagaaacccagttggtggcccaaggcgtcccctgtcccaccccagctttcccagggccccatctatccccaaagacaggacacctttctggggaccggcatgggaagcacagacccatggctcctgaaccgaatttcctattatttttctcatcccccaattctctgacaggttacctgagaaaaaggcccaattctagttaagctggtcccacccctaggccagcaggagcaggtgctggacaaagctgtgccttgacttccctggggctcgtagctcctctgaggccagctctgcccaggcccccacaggataacaaggaggcgtgtctgcccagggcctgctctccccctcctagccatgcttgggtaatgggaccccgggctttgtcacctaagcaaagttctcaagccataccctgtacttccagcttcttgcaccctagaaccaagcagcagccacttgcctgggggtagagtcgggggcagcaagcgacacacatccacgtcctgagcaggaagctcctgacctgctgggcatgggtggagaaggagaaggtgacagggttgggtggctctccctacatggtcacatcctgtgaagacactgaggacaccaggaattctaaatttgaacctgatgccccagagctttaagaaaatgtttttgtcaaaggagaaaaccagaacgttttattagtttcttgaacctatttatagcgtcaaaagttagacgcaggtgcagg

SEQ ID NO: 46760 - DNA, 1097 bp, Homo sapiens
gctccctctggacctggcggggagaagaggccttgccactgcattgggcggggagaagaggccttgccgctgcgttgggcggcccagcccagtgtttgctgtcagtagtgccgtgcatccctgagggtgatccctggcccttggccagtgtggtgatggcagcctggcctccttcagtgacctggttgggggctgctccacaccaggcagcttggccacctcctcatgcccctcccctgtcactgtcatcctgtcgctgagaccttgggacagaggtccagtggtgtctggaagaagaggctgggtcgacgggagtatgagggaggcctgccagtgtgcagcagcagagtactgcctcggggggcttgtggcctggggtgatgcatgcatgtttagctgggaaggtggagcagggtggggaagtggatagccagaccctgtcctgagacgttctcagtcctttttgctgaaacgcgcgtgctctgtgtgttctcatgatacgtggaggtgggactcacgctcgccagagttgcacttgtagactggttgagagcaggcacccagctgaatctgccaagccagttcttgctatgatctagggcttctggaaagcgggaacttaccttccttggggagtcagtgagagggcctgccacggcaagctgggcacaattacagcggtgctaacatctcctggggtggagtgcagagtgtgccagggtcccattgtggccgctcgtgggagatcccatcctcagctaacctggactcccaccaggagtgaagctttcctctggacatgctggaggcctaggtgtgagctgccacagccatgcgggtgcttctgggaagagggaggagagctggtgtccagccccatgccagccccacaggggctgagagcagaacagttgagagccagccaggcccgctgggctcggaaggccttggaagccccactctgcccccagagcatgcctggtgcttcctttcacaagttgccatcagcataatggaccagtgtgatgccatgtgagatggcaagaaataaagtccctgtgaaataaattatatggatgcagttcgctcagggaaaa

SEQ ID NO: 46761 - DNA, 1053 bp, Homo sapiens
tcttctgccagataccctaagtcgtctctctcaagttcaaagttccacagatctctagggcaggggcaaaatgctgccagtctctttgctaaaacataacaagagagtcatctttgctccagttctcaacaagtttgttatctccatctgagaccacctcagcctggaccttattcgtatcactatcggcatttttgtcaaccgttcaacaagtctctaggaggttccagactttcccacattttcctgtcttcttttgaaccctccaaactgttccaacctctgcctgttacccatttccaaagtcgtttccacattttcaggtatcttttcagcaacaccccactcaagtaccaatttactgtattagtccattttcatgctgccagactgggaacaaaaagaagtttaattggacttacagttccacatggttggggaaccctcagaatcatggtgggtggtgaaaggcacttcttacatggtggtggcaagaaaaaataaggaagaagcaaaagtggaagcctctgataaacccatcagatctcgtgagacttattcactatcgcgagaataacacaggaaagaccagcccccgtgattcaattacctcctcctgggtccctcccacaacatgtgggaattctgggagtacaagttgagatttgggtggggacacagccaaaccacataaccatggctgagtcctgcagctccatctcccattaccacacattggatggcctgtctctggggctagcagccaggtgctgaggcaggaagtggcagagtcctggggccactgtttacgtggccttgcccttcacagaatggaagctgaagttgggtagtggccatcacccaaagctggggaaaactgctgccttgtctgttttaaaaggatcctgctggctgccatgtggagggagggaagaggagaccagttaggagctgaccgcagcaacccaggctctactcaggtggcagaggtggaggggataggctgttggaatctggaaatagtttttatttttgtcctcattttttttcttt

SEQ ID NO: 46762 - DNA, 1050 bp, Homo sapiens
atggcagccacattccagcttccagggcaccaggtgagttaaccctccttcctgcccacctcttcatcttcatccccatcccagtcagaagctactctcctctggagccgtgagcccggcaactggtaaggccagccaggggctcatagcaaccgtgaggaaagggttctgagaggtagactcgccctcctgcagggagaggggctctgagctcagctgggtccccgtgtagctgaagttggctggtcctcagcgctctcagctgccccatcagggacctgctgatacacagttcatactgaccacagcagggccctgggtagtggggccccaccaggtcagggcccttttagtgcaggctgctgccccgtgggcatggcctgggcagcggcgatgttttgttgcaggagatgccgctgaccttccaggatgtggccgtgtacttctctcaggcggaggggcggcagctgggcccccagcagcgggcgctctaccgggatgtgatgctggagaactatgggaacgtggcctctctgggtgaggctctctgcacttggcctggttcgcagtgggggcctctgaggagcttgggaggctgctttggctctttggatcccaaagaagagggtcctgccccttgtccccgggtatcagtctgatctctacagaaggaacatttcccatgggaaaagcctgccttgctccccagttctagggacttcactccctgttgccagtggccccactggtgtccctccagtggcaggagagctgatgagtggattctccttcagtacttagtctcagcccacgggccccctgaccaacacacgtgcaggcgtacacacgtgcacacagggcccatctctccacacctggcctggaaggcccagtgggccatgccagctcaccagtgtcctcatcctcaacaggattccctgtccctaagccggagttgatctcccagctggagcaggggaaggaactttgggtcctgaatcttctgggagctgaggaaccagatatcttgaaaagctgccagaaaggtga

SEQ ID NO: 46763 - DNA, 1049 bp, Homo sapiens
gggttttgccacgttgcccaggctggtcttgaattcctgggctctggtgatctgcccacctcggcctcccaaagtgctggttttacagcaatgagccaccacacccagccatgaaattttaatttcatgtgtcacaaagtatttttttccattgaaaaaccattcttagtccaggcatggttggcgccaaccccatgagcccactggacccctccagtacagagcacctgtccatccttgtcagtggccagtctccattagacctggactccagggcagaggccagccctgtccatctttgtccccgtggcttgcacaaggccttgcacagagaacggatgtctgcatctgggaaattactcccttggttttcttggccttagttctctgtggaaacttgctggtgatttccctctcctgtggcactgtcctgagctcaaagcctggatgcctccccacctgcatcactcactcattcagcaaacatttctggggctctgagtcaagctgcatgcactggggacttgaggatttataaaatggcctggacccggcccttgctctgcttcactttgtgaagcttccagaaaggtccagatagtttcaattcagtgtcataaatgaaagattattctgatagttgagataaaaagcaattccaggcctaggttatagatttaatttattgtctccaaaacagaaacccaaaatgtttttatttatatattgtggagacagggcctcactctgtcacccaggctagagtgcagtggtgcgatcacagctcactgtggtctccgaactcctggggtcacgtgatccttccttggcctctcaaagtgctggaattacaggcgtgagccaccgtgcctggcctggaaactctttagatgagcttaccgaagcccgaattgcagtgcagtgtgaacaggttaacaggatattctagcacctgcactaccccatgagcagcccctcttcctctccctctccacaaaagaaccaccagcctgtgtgccaggggccacctggatgcttccatgtgatac

SEQ ID NO: 46764 - DNA, 1029 bp, Homo sapiens
ctgaagacagtgaatttaaatttttttattaaaaaaactgttaaattctcactgtttcaatttgtcaatacacttaataaattcctctgaatagaataaaaagacgcagaattacccaaaaagaaaagtaggcacaaatttctgcatagattaggaaaaccaaagggccaataaataagaaaactgctcagcctcattattcatcagtaaagtggaaatcaaaaccactgtgacatgatgttacaccttcagaatggaaaaaatggaaagatctgacaatataacatgtgggtgaggatgcagggcagctaatagggatgtaaattcacatagccactttggaaaagtttggcattatccaatgaaattgaaaacatgatcacattctgagagaatggaggtaaaaaaaatgaaaaaaaaaatcgaaaacatgaattcctatgttcaccacttcccactcttgcatatgtatacagcaaggacatttgtgtgtaagcaccaggaaacataggagaatcttcacagaagcatgcttcatgatttaaaaaaacatttgaaaagaattcaggaccgggcgccgtggctcctgcctgtaatcccagcactttgggaggccgaggtgggtagatcacgaagtcaggagtttgaggccatcctggccaacatggtgaaaccctgtctctactgaagatacaaaaaaattagccagccatggtggcatgtgcctgtaatcccagccactggggaggctgaggcaggagaatcacttcaacccgggaggcagaggttgcagtgagccgagctcgtcccattgcactccagcctgggcgacagggtaagactccgtctctaaaaaaagaattatgttcataaacagaatagacataaataaactatggtattttaacttaatggaatatactgcagtgaaaatgattaactgctgtacaacaacatgatggatctcaaaaacataatgctgacgggaaaacgagttccagaagactgtgctccatgaaactatagaaa

SEQ ID NO: 46765 - DNA, 1047 bp, Homo sapiens
gacattttgaccatggtaccatgcaggtctggtttgcacagagagggggacaggtggtactgggaccctccttgatttttttttttaataggcaatgtctcactctgttgcccatcctggagtgcagtggtgagaccatagctcactgtaaccttgacgtctttggttgaagagatcctcctacctcagcctcccaagtacctgagactacaggcatgggccaccatgcctgtcttattttacttttttagagacagagcctctgtgttgcccaggttggtctcaaactcctagcctcaaggaatcctcccaccttggcctcccatgcctttccaaccctccctgatttatagaaggagaatattattcattgcacacctagtacctccctatcccctgaattaatctttctgcatcttgatgatcggtggtaggatacacagtttataaacgaacctgaggctaacaaatactgtcacttttcttaagtttacacagcctattggtggcagatctgggatatggatctgttcggtttcagagccctgctttcctttcactggaatgtgctcttcgctttagcccttttttttttttttttttggtttctgctagcctttatttgagaaaatttacacaaaaatccccaatgcaacatttacaagtgaatctgtataaatcccatatgcctctttcccaaactgaaaaatggctttatgacaggggtccatgacaatggtataaaaatacttacttaaactgcatcattctcatttatattatacagaccattttggataatatgctcaaaagtggaggaaagcacataacacccctgtttttaaagattatttgctcttgtatcagtcttttgtcaaaggcaaatacttttacttcttggataaaaccaaggtataatatcaattaacttttaaaccaaaagcacaaaatgtcctagttgatagttttggcatgagtaaagggaagggacatgagagaacatcagctcctacaaagcttaagtttagggtcacacttgggaacaaa

SEQ ID NO: 46766 - DNA, 1032 bp, Homo sapiens
acactaagaaagaatcaaaagaaaatgctagaaatcaaaaacatcatgacagaaataaagactgccacctgtaatcccagcactttgggaaaccaaggtgggtggatcacttgaggtcaggagtttgagaccagtctggccaaaatggtgaaacaccatctctactaaaaattcaaaaattagccgggcatggtggcacacacctgtagtcccagctactcgggagtctgaggtaggagaatcatttgaacccaggaggcagaggttacagtgagccagcctgggcaacagaacaagactccatctcaaaacaacaacaacaaaaggactggacacaactgaagaaagaatcaatgatcctgaagacatgtcagtagaaactttcaaaatagaaatgctaagagaaaaaaagaataaaaaggatgaaacagaacatccaagaactgtgggacaactgcaaaaggtgtaacatatgcatattgggaataccagaagaagaatgaaggaaaggaacagaagaaatatttgagccaattgtaataaaattttgcaaaattaataacatgcaccaaaccacagttccagaaagtacagacaacaccagcaagataaataccaaaattctatacacaaacataccatattcaaactgcagaaaatgaagaacaaaaaaaatcttcaaagaagccggagggccagacacggttgctcatgcccgcaatcccagtgctttgggatgccaaggcgggtggatcacctgaggtcaggagttccagaccagcctgaccaacatggtgaaaacccgtctctactaaaaatacaaaaattagccgggtgtcgtgatgcatgcctgtattcccagctacttgggaggcctgaggcaggagaattgcttgagcctgggaggcagaggttgcagtgacccgagactgcaccattgcactccagcctggccaacaagagaaaaactccattcaaaaaaaaaggcaagaaagaaaaaaactaagcaagggtaagcattatatcagtttt

SEQ ID NO: 46767 - DNA, 1034 bp, Homo sapiens
agaagtttcaaaaaatatagaaaatacagatgataatatggcaagtatctaaaggtctccacttaacagaattaacatctgttaacattttgtcacttttgctttagttgttttttttttaattaaaaaagagaacattacagataaatgtgaagtccctgttattctgttgcccatttctgttctccctgctgctccctgagagtactaacacaaaggtgtacttctggggtgtgtgtgtatatgcatatccataaacaatatatggtatagcttctggagggatccaaagtcattagcactcaagcaagcctattaaataaaataatatcagcttgagttaaagataacatatagccgtgaaataacggagctgatttttaggtaccttgtcaaatagttctgaaagtaattgcaaagaggagttccaaaagtgagttcagaaagacagctttatcagaataaattgcatggtactgcatacaggaaactataaagaacaacggttatttagaactgttcattctgacagtgtttttcaattactccttaatattataaccacttactcatttcctgaaatcaccaggaaatttttcaaaaagatttttctcccccgatgaatatacccacgatttgcatttgacccaagataagcagttgagtcgataacatgttaatttttaaatacatggttttaaaacacagaataaaaattctacctcattgcttggagactcaattaaggagagtatgcacattagcaaaaagaagatgtgatatttgctcagaagtcttgaagtggatattttggccttcgtatggctgaatggtcaagcttgactctctcgtttgctcagggaggcccagtccctctgctgccacgggtagaaatactttttcctaaatcgctgcttcttctcactgccatacagagcaatattcaggacacagccaaaaccttctttggcagacctttttgagttctctctactcagctttctgctgtgtaatatgagcactctagagaagtt

SEQ ID NO: 46768 - DNA, 1048 bp, Homo sapiens
gcacttcccgggtgaggtgatgccttgccctgcttcggctcacgcatgttgcgctgcacccactgtcctgtacctactgtctggcactccccagtgagatgaacccggtacctcagttggaaatgcagaaatcacccgtattctgtgtcgctcacgctgggagctgtagactggagctgttcctattcggccatcttggctcctccccttatttatttttttcttacataacaagaatgccagtggttggccctgcaggcttggtgtcatggcccccaaggtaccactggagactctggttctttgtgtctttgtgtcccaccaaccttagtgtgtggctttcatccttatggtcacaggatgactcctaaaactctgtacagtgaatcagtattggagacaggaagaagaaaggaggtaaaaaagacatgccagctaactttgctcccattaggaagctcttctagaagctcacagaattacatttgtttatgtatttcattattcagagctgcgttagctttgtctacaagggagattggcaaatgtagttttcattagcccagcacattgtcacccccaacaaaactagggttgagttagaatgaaggggctagtgcatattgataggccactagtagtttctacacagcctccaacaattgctgtggatgtagattagtaacagaacttccactatggcatcatagcacctctatcccactagtacctgtagtaggtccaaatcatctaattccaggagcctggcttaaagaagaggaatattgaggcttctaggtccagtattaatcaaggtaagctagctgtgagaacaaacaatctcaaaatctcagtgaacgaaaccaacaaaaacttgtttcatgtttatatcacagtctgatgcagatcgagtggttctcctccaagcagtgactcagggacccaggctgcttccatcttacagctctaccatcttgtgactttcagattatgttggcatcattcagccagtgactaggaagaagagagaatgaaagattgtgcaccc

SEQ ID NO: 46769 - DNA, 1053 bp, Homo sapiens
tgagaatgaggatggttcagagtggagagacagggacaaggtaagttggagtgtgggtctgacttgttagccatgtggaggaaataattatcataataactatcatgtatgtttttagggggctctataacttcagtatgttttcagtgttcacatttgtaggtttacagagtttgtacttgataaggtacagaagtaagtcacttctcaaaaatcatgcctttagaagcatatatcatgcttctattatagtaatgataataatagaagtctactgctagtcataaaacttatctgttcagagaaggctttttttttttttcagagaagtcttccaggtttcagctgttgctcattaatgctcaccacagccctttgaggtcgatgcaattatgctttggaaaagctaagtaacttgccaaaggccatgcagctaaaagaagcaaaagctggattcaaatctcagctctctgcctccagagagaacaccctcaatcccgcttaacagacattagctctgcttatttgattggtggcagtggagatgaacagaagtgaacagtgagcagagaggggtctgtaccccacacacatccctgcaccccaactgtcaactgtcttccatcatcatttactatatccacgtccactcctgacagcatcagtggctcagtcttaccgacctgcatcagggttttgggctctgcctctgtttagacagagcacgatttgggaagtgctgctaagtcagccagtggctgagtagaaacagccctgcagtgggcctctgcctgctctgtggctcgtttatcatgtgtctcatctttaaaagttggggctcagtctaggtgcctcctggcctgagcaccccagaattctatgctgatcccttcattgtgacatggcctgtcatctactcttctgggaagaccatctgcacctcactgatacttgaagctcattgagtattgtcacatatcagcccagaaagtcacagggtacagcaactcatacttgctcccagcaccaggccagccccattctgcctccagg

SEQ ID NO: 46770 - DNA, 1143 bp, Homo sapiens
caagtatcatcatcttcctcattttacaaaagaggaatcagaggttcagagagaggagataattttacttaaggtcacacagacagttggcagcagagatgagctcaaaccaggtcttctgaatccaaatagtccacatgtccatcaatgtgctgatattccactgatgcactagagtcccagaggttctttgcattggcagtcattgtaatgttacaaatcttataatatcttatttttagaaacttaaaaacatacactgcctcaaattgagagaggcaagttctaaaaccaggcttttcaaaggtattatcctgtgacagttccccatgtcagacaagtctcatctctgttccttaattctgcagtggagctggcttcaagagcagtcagttaggaactgggtctttggtcaaagccttgtaatttattgcaatacagacagatatattgggtctcctatggtcctaaaaatatgagtatgaaggatgtgatggcatttcacctataagagaaaaggacttcagaaaaatgtgtagcaatatttctttctattcaaaaccttagagaagaatattaagtataagaatatcttcacttggcagatggggataaaggagactaaaagtttgctaaattcagtgaaaactcatcaaaatgctagcatttgtgaggttagagatatctcctccttcacaggcttttgcgagaggtccgcaattttgctgcatatacaggagacacactgtgccctgcagtgaatcacagccgcttggtaataggatgtttgtgtggctttgcgtgtttgtatttgtgcatgtgtgtgaacatactcacagattatcttgattaatgttttgatatttgaattgtttcctgtatttgacaacaattctgacagaaaaactagttgttgttgttgttttttcagtacataatacgtatcttttaaaaggctagaaaaatatttggggaattattttattattttattttattttgagacaaggtctcactctgttgcccaggctggagtacagtggcataatctcagctcactgcaacctccacttcccaggctcaagagattctcctccctgagcctcccaagtagctgggactacagacgtgtgccaccacatc

SEQ ID NO: 46771 - DNA, 1041 bp, Homo sapiens
caaaaagtttctaaagaggatcgcgtggaacccagcaattgattaagaatctcaatggccctaatcccctgagaattgaactaagggctccccagcaaacacagcgatttacatggggcctagagagagcgagcactgccgggggcggcggcgaagggcagcagtggtgggacgggcggggtagggggagttactgagcatgcgcccgggtaggggcgtgggggagttactgagcatgcgcccaggtaggggcgtgggggagttactgagcatgcgcccgggtaggggcgtgggggagttactgagcatgcgcccgagggtgtttcggggcgtccgaagcgggcgtgctccagcctgctcagcagcgagtggttggaaattagcaaagtgagagggtgcgtggcctgagggactcggggaggctgagggctttttttctcaacactgtgaagctcagggaaaggagtagaactgggaaccaagtaaagtaaaatcgtggcaagtgggcatagacctgaaatctccttcgtgagggaacccagaacgtgcagctcaatgtatgtttggaacgaacaggtgaaaggaagcaggaggaggagggagttctagcgaagacttcggagggaagcaacccatcccctgccacaagaaagcaccgccactccagtgggaacggacacgcgtgcacacagccacgagtgaggtttgaaagaggccccaccctccattacacctgtgctccaccgtggcccccagccaagtttaatctcccattcagcacttacttctggaagcttctttccctttccttcccaccactcattggcctttcaccccctagttttttgtctgtgtgtgggactgtcttcccccactccccttgactgaagttccttgagagcagcagccctctttttatcagggaagagatttgaagctcaggacattcttatccaagtaggtgctagccacctgggtagtcaagacagggccctgcacagttaatgtgaatcttgtcataatgccagggttattgttttg

SEQ ID NO: 46772 - DNA, 1029 bp, Homo sapiens
catctgtaaggtctcagttcttgatctcttttctgtagacactcattctcgtggtgacctcatcttctctcatggctttaagtgtggttgatattccaatcattatcacatttaggtctccagctctgacttttttctccagttccactctgtaaggcccaactccttccccagtatctacacccgagtgtgtggtggccacctcaaattcaacgtcacccaaacagaatttcttatttcccccaaactccttctccccacagacttctagtggtaaaacccctaaactttgtaatcatcttcactcccctatctcatacaccctacctttaattcagtagcaaatcctgtttcaccttcaaatatatgtagaatctgcatcgtcctccctctttccactgccaccatcctctctcacctcaattactgcactagcctgatacctggactctctgcttcccttgcaatccattctcaacagccatcttttaaaaacaaaagtcacattgtggcactgcgtagactctctgttggctccttgtttctatgggaggaaaagtttttacagtgaactccatggctgtccttgcccggtcccttgttattctgtagcctctcctgtgctcgcccccacctctgctcttccacaggtgtcccttttgcctcccttagggcctttgcactggctccttcctggggctggagtgctctgtcctcacctcagtgaggtccttgctcagatgtcaccatgtcagtgctgtgattattcagagttataacctgtcttctcctggcactccaggtctctcttaatccgcttggcctcttcttttttttttccatatcaaaaattaaccagtattattatggaatttacctattatatttattgtttattttcagcatatcccagtagaatacgggcttttccagggcaggaacctttagctggtttgctggttggtggtacatcaagctcctagaacggaactggaaacgcagaagacacttaaataggtatttgctgtt

SEQ ID NO: 46773 - DNA, 1051 bp, Homo sapiens
aatctgttaagtaaaaaatggtatctcatctgtttttaatttgcatttctcttaggagaatgagcatattttcataaatttataagagctgtttgtatttgtgtttctgcgaactgttcatatcctttgccattgggctgttaccaagttgtatgacattatacctaagggaaataagcccctcatgtgataagaattggagttgtttgcagtttgttcatcttttgattcgggttatattacatttttccatgttggtgaatttattagcagcttattttaaagtctttggatttaatatcatgaagagaaaaaggcgttccccatcttaaaattattatttttaaaatgtccagggtttcttttggtacttttgtagtttcaatatttttatatttaaattatttatccatattgaatttattttagtacatatggatccaagtttactttttttcccagatggctactggttttcccagtcatttattaatagtccattttccctctgactaaatcccccatgcctatgtgtctgtttcttgacttctgtttcttgacttctgttgtgttgctctgcctagctctgtgatgttgagctattcatgttttagttgtgacactattctaattgttaagaatatgtttgtattagggaggattgggcttgtattaaatattttattgttgatgttaattgtcagttttgtagtggtatttaaaaatgaattatgtggctgggagcggtggctcatgcctataatcctagcactttggaaggcccaggaaggtggagtgcttgagcccaggagttcaagaccagcctggacaatatgatgaaactctgtctctatgaaaaatacaaaattagccagacgtggtggggcatgcctgtagttccagctacttggcaggctgaggctgcagtgagtcatgattgtggcactgcactccatcgtgggtgacagagtgagacaacatctcaataaaataaaataattttaaaaaatgaattatgcaaactttaaaggaaactgatcatattttatgt

SEQ ID NO: 46774 - DNA, 1028 bp, Homo sapiens
atccgccagggaagagtcccagctttttcttggtgttattttaggtattaactcaggagggcttcctgaaggtttgtcagtgagatagttggggggttcctgagctttttattgttgtacgtgaacttggtacttacttctttggcttttaaactctcagcagcacgtacagatgccctcacatgctttctgggatgactttaacgctaaatagcaggggtgtttctcaagaatgtttaagaaaagaaagcagacatttgtttgcacaaacagatatttgtgacttctgtgaaaaaattccaatagttgtaatataggaaatttttataaacaaacacccctaccaactaacccatcgtgtatttttatgtgtgtatagaaaaaatgaaaggatatactaaaatgttaattgcatagtttctctgggaattgaatttaattaaaatttttttatcaagatttttaaagttttataatgaccacgttatgtttatgtaataaaaataaaatagaggctaggcacagtggctcacacctgtaatcccagcactttgggaggctgagatgggaggattgcttgagtccaggagttcgagaccagcctgggcagcatagtaacaccctatctttatttttaaaaaataaaataagagagggggacaataaatgcaaatatataaatgacagaaattttatggtctggtcaaagaactatcattgcatgaaattatagatatggtcatgtaaggttaccttttttcattataattccaccaataattctaaagtttcttttctttttttttttctacttcttccacagaaaaacaggacaaagaaacctgtgtgaattttcagcttttcaccttctctgattttatttcttcctcactcttcctttgacagtcctcgcagtccgcctgagagagtagagaagaccccctcccagaaccttcctgtaaggtctccccgctgacttcctgtagtggatgtgactgtgtgccaggtgcctgccgaagacccctgtc

SEQ ID NO: 46775 - DNA, 1035 bp, Homo sapiens
gatgaaattgcgccagtgcacttcagcctgtgtgacagagcaagaccatgtctcaaaaggaaaaaaaaaaaaaaaaaaaatttattcattagttataaatgcacactgatgttcttataagtgaaaagatatattgttttggttttgctttaagattccagcaaatataaaacagaaaaagagggaatatattaaaaaggctggcaaaatatgtatcattgttgaagcttagtgatgggtgcattgtattcaatatagtattctcttttgtgtatatttgaagtttttcatgatagaaggtttaaaaatttagaacaaaaatgaatgtggaggttcaggatcctaccagatgtttctaaatgaactttaagtgacaatggggaaaaatgtccatatcatcctggagtttaaggcagggaattcttggtagggggctattgaaaaatagccaaactgttagtcaaaaatgtacatatgatctcatggccacagatagtaatgtagaagacagatcacgaaagtactaatccttgggtgaggaagaacaggagaaggcagcccaagaacttaactgaggccccaagaactaaggaaatctgttttgtaaaaggacctgtacggccaggtgtggtggctgacacctgtaatcccagcactttgggaggctgaggtgggaggactgtgtgagcccagaagtttgaggccagcctgggctggtttaattaaattagctgggcatggtggcacacgcctgtggtctcagcgacttgggcggctgaggtagaaggattgtttgagcctgggtggttgaggctacagtgagctatgatcgcgccactgcattccatcctgggtgacagagcaagactctctcaaaaaacaaacaaacaaacctatacgaacaatggtaggaatgtcaaggaacccaggagtgaagatcggattagtcagatgctgtgagaggaggtggaaaaaaccagtgtagaatgggcaggcacctttgaaaaggctagaggaaaattttggaagggcatt

SEQ ID NO: 46776 - DNA, 1124 bp, Homo sapiens
tgagtgtttttcccaaagatttgtcaccttcttgtgagttgtctagtctgttcttttggttttatagatttattctaaactaaaagttaatggtagttgccatttataatttcttgcagaggtttttgcagagatcatccatttaatatttttgtgcattgaaggttttaattgtacagtcaacactgtcattcacttgtgattttcattttttccaagcttagaaaacttgaaggatgatgacttttttattggagaggttaaaaaaaaaaagtaggtaaaagtgatggatgcttaggctgagggtggtgactgaatatgtggtacttgaaattgagtttgagtgtccaggcctggtttcattatatcttgggacacttaaaaaagtcttgcagaggcaatctgcttgaaaatgctgtataaaccttaaacctctaaattgtaaaatgtaagtgcataataatttctgatttgtagacttctgttgacaatctttcaagacgggagaagggtgaaaaagacggaaaagacaaacagatatttttcagaaatgaaaaacatgtacattttctgacatagggaatgagagatttttctaaatgtgacccagaaggctttcaggtgatttcctaacaagatttgagttttctcggattaaatatggttgtggctctctaccatgtgccccagtcttatctttgttatgccccttcacacatactctgttcttcacatactcttccttctgctggctagtgcttccctgtttctggaactttcttaagcatttttaccatgtattatagttatttgtattgtagttacgtgtcatccttcttcgtcttagaagagaagtttccatctgactccatgttttctattgtagaccctagttcagtgccttttaaacagcagatatggaataatcctctaatggaataaatggggagaagaagggatagtttgtggttacctgggaaagcagtgtggttaagtcagcatgggtttctcaagaacaagcctttcttgaattaacctcatttcctgtataaatcagatacttattggagagagaatttgggtaatgttgttgttagaggatatcagaataaaaaaactacatg

SEQ ID NO: 46777 - DNA, 1034 bp, Homo sapiens
attttaactctgaaaattaaaattaatgacaaaagtcagatgtgcccattctcacatattcaaacaataaaacatacagacaaaaaaaggattcttgtatcccactttttgatcctattcctaatataaccactgctgagtttattgtatatactttcagacattttttatgcttagtggatatattagatctttatacattccccccccccatatacttgcatttttttttttgactaatgtcataaactttgttatacacctcagtgggatttaaaaacacctgaagcctttgttttttggctggtggcaaaaaaaccagagtaacttagagaagttacccattgatgttttcacagggctttaaacacgaagacctgatttgtttgtgtaaatcgttggatgtaatcttacagaggaccagggcttgagcaccttcagaaacatggtatcatctgatcatgatgatttccatcccacgacagaggaagaaatggagactccaaagggacagaagtgaattcttccaaatttatgaaaatgaacacttagctaaaatgtgttcactgggttatgacaagtaactggacttctagggaatgggatggcaggtggggtgctatcagtttataaaattttttgtaaccttgtctcttatttctgcttccctcccccagccatgggaacacaagataaatttggagtaggtgagggtggagagcaaagtgactccctgggctgtgcccttcacactggttttagaaagcatgcagctgactgccctggggtctgatctatggtgctgcgctcgagagaactgtaaggtctgctgtaagtgatgggggctgtggacttatgcagaagtgcacttgttgggggttttcacagtacccaccttattatactagagaggcaggtttcattgcttaaggggacaatttatggcaataggcttatctccttgttttagctctttatgtttttctgcctttaataaaatgtgaagtcacaaagcaattaaatagtagtgtagt

SEQ ID NO: 46778 - DNA, 1074 bp, Homo sapiens
ctgaatccaggtggaaaaatgctggcctacttctggtccttggtatgccaggatccaaaggtggtgccagctgatagcatatgttcaacagctgtgttgatgccatttgcctgcccagacaagcctcttgaggcatgaaagcctaaggaaggtttctcatattaaggatcaacagggactcttctgtatccgtcctaccagtgtcacctccccacccagcatcagccgagcaccacatccactgaagctcaataaagaaatgtttaatgctgaagagtttcaatcaacaagatgaaattttcaggtttaggtaaacttaggaactggcttgggttactagacttccaaattttatccggtcctaccttattgcatgacataaccgtgaggactaaagtgaaggcttttcagcagtcacttcagtgagtcctcagcatttaggtgatactgtatcaactcgtgtctgaagcaacttggatttaagatagtagatcttgtgctgattattagaatggacatcctgaacaccacttaaattaccatcaaactgcatagccagatctttaatttacgaaacctctattttgtcacttctccaagctgtcatttaagctaaaagctgctgtctttacacatataaatcaaagaaatatttcatttatattcacttgatacctaccaaatttcaccactggaatttctgaatactttatatcctctatccttccatccaggcttggctttactaagtgtcctttctaagccactcattatcaatcaagatagtaattattctgcaagaccccaaatctcagtggctttcaacaacacacactgatttttttactcatatgctacacgtccattatttgtcagctgcagctgtgttcagtgttgacctcaacctgtgatggagcagcctctgcttatgtcgctgctgttctttatagcagaggaaggaaagaaagcaaggcaaagttccacactagcccttaaaacttcttcctggaagtgagacatggtatttctgctaccacttcattggttaaagcaagtcacaatgccacacccgag

SEQ ID NO: 46779 - DNA, 1029 bp, Homo sapiens
tgaaaattacaacaaaaaaaaaagaaaaacacagaatctgactaaaggagcattcagaatatttgtatctagaataacaagtataattttattggcacaatgcttttacagtatataaaacacttaaaatacagttgcttatttcatttcctcagtaatcctagagagtatttcctgcatcttattgatgaggaattgaagctgggatagcttctctcctgactcttgaagtccgaaaacaagtggacggagctgtagcactaagcctcagcctgctcgtcttcaacctgctcctggctgcagagtcttgattgactctgcctgtctccagtgtgctttcattcccttcagtgggtaacttgtcagacctcatcttgtttttgagactttggtttctgtcttgccttcttcctaactttggtattcttagttccaaatcctgaataactcctgtaatgggcctcccagtagggggggttcctgtatttatattcacagatgtacgtattttaatagttaacatctgaaatcagtatacatcttaaagttgccatggaagttcatttcttcagtgtctgcctctgctcgtcacttgaggtgctggtaaactaagaccaaagtttagattccctgcttgagggcacttgaaccacagtggtggtgagttcagaatgcaaatgagagtaactactgacttaggattcaaatcttcaggggagattcctcccctctctgcccagttcccaggttgaaacatccaaggctctttgccatccctttctgcatggcgggtttctttgtggccatttggttccctggattcaagtggtccctgatacctgttcagtttaccatcttgggccgggcatggtggctcactcctgtaatcctagcattttgggaggtcaaagtgcgcagatcacttgaggccaggagttcaaaaccagcctggccaacatggcgaaaccccatctctactaaaaatacaaaaaattagctgggcatggtgatgggcgcctgtaatcccag

SEQ ID NO: 46780 - DNA, 1028 bp, Homo sapiens
ggatagacatggtgaagggccttctggcctgtggggctgatgtcaacatccaggatgacgagggctccacggccctcatgtgtgccagcgagcacggacacgtggagattgtcaagctgctgctggcccagcccggctgcaacggtcacctagaggacaacgtaagctgtctccattgggcctcctggccaggggtctgggggactctggacgggagctctgggagtgccttttggccaggagcgaccaaatcctcctctattctcctctgggatttgtgtcgccatctaggtgcctcccttcacagccaagcttggctacacttactgtgtgtgtgcaaactaacacgctcataaactagtacccaaagcagaataaataggccctaccccaaaaattcatgaaatgaaaaagtgatttaacgggcatgtccaagagcccctctactaaagggaaatcaatggatttgcactgcagaatcaaattcagtgtaggtgacttctgacaggtgcacttggaaatctggattatcattagaggctggggttacacggtgactaaaaccagttcctactatagtgaaccttttccacccaaagtgaacacactgacccatcaaagtgagtagcttgtgacacaacatatgccagagcctgcagagtagcttgacttcttgaagcgttttcccatttctgcttagtctgtcccatcaacaccactctgctctcttctcccagttcccaggctgtccacatttccagataactccttgaccgggaaactcaaccaaagggggtacttttgcgtgtctctaggccaaaggacaggagtggtgataggtagaaggtaggaactggcatgtaggcagtgagatggtgtaaaggtcacagaggtcgggttggcttggttccgtttttgaaagtttatctctgtggatcacaggtttggatcagagcttctttagctcaaaacaccaaaaagttaggaaaatatcctttgtaggtcagattcttctgggcccaagccag

SEQ ID NO: 46781 - DNA, 1007 bp, Homo sapiens
tctgtgtagggcacactttaacccagtctctgttgctgttgagtctctgctccgttttgtacagtcacagggaattctgatctgaaggggcaccttctgttcactcccacaaagtggtgtctggttctcactgagacgttttaagatttttccacaaatatttatatgtactaaatgtggaaccattagaaagttcttccaaaatctcattccagcatagttttggatttttcttttgtcttattttaaaataaggaagtcgagatgactttgatcattggtaacttgggcctgggccagacaaagtataaaacttacaaaagaatattctcatttggtcttaactaggtagatgtaatatatgactttttataaaaagggtatctatatgaacttgacacagtattttcagcttttgtattccatactaaagccatgaagaactacacgtaacatcatcatttgtattaattgcacaactccaatgctaaaggttggattgtgttagaggaatcggctctgtatttgcctctagagaaacacagtgttctctttgtatttatggattcctttttaccgtgtcacatttactttggtcctctatgtatttaaatgtttgaagtgccttagactcttgccatattttcaaaataaaattccattaagctcttttccttgtccctgtttcatctctgatagctgtccgccccgagccgattgacttacggcagtggcagcacacgctgatggattgagctgagcagggagggtgagtgcgccagttggctccgacagggagacagcatcttccgagggcgcttgtccacttgcacagcttggctcctgactcagattgcaagtcgggaggctgaagtttgaggcctccttagacaaagcgctcttccgatgggtagccggagatgcttcttctcaggtgcagaagcactagtccttgactctgagtacaactgctgggtgactaggtgatacgtgtagtgacaagaaag

SEQ ID NO: 46782 - DNA, 1049 bp, Homo sapiens
cttggataattcctattattccaaacttcatttttaccattttttgacagtcaaggttatagaatctgaaaaaggtttcgaatccagcaagcgaagtggaggttgaatgcgaacagtgcgaaatctctagctttctgtctccatgttctcactttcgtgaaagcctgggggtacattaatttttcttaaaatattactcatttttaaaagcatctctatttgggtatggaatttatttattgacctcaataatatattgactatttttaaccgtttctctttaaatttttaaaaatttaaataagggacaattaatgtttgctttaatcactgccacttcatgaaattcaggttgaaagtaaacaaaaatttttaagtagacatttggattctgtttttttcttgtgtagcttctgaattttgttggttctggacaggtttgtgtgtgtcctataaaaatttttaagtagacatttggattctgtttttttcttgtgtagcttctgaattttgttggttctggacaggttttgaagtttgtgtgtgtcctatcatgtgttgtatacttctgaccatagagtggtttcttatgaattaaaaatgaatttggttacaaactggataaacagatttataataatagggccacattgataaactgagattatgcaaagcaacttgtgaagtctgaggactaaatggaatagtaaattcaactaaataacttcctggcaaaaacttatcatagaaatgtaaacattaattttcaaattttattttatttgcaaatgagtataatgggtttgtcactatgtaaacacaaatataacaatggatgcttcaaacaaatatgacagaggtgagtgcttgggggtgatgaaatactccaagtattttatgcctccaggaattctatttatgttacactaatctttgtatttgagtttgctcctattcgtgcgatgacttagcctgtgttttaatgattgcttgttcaaccattttggtatccggccaaaatgattagagcttgggaagaatgtttcaga

SEQ ID NO: 46783 - DNA, 1021 bp, Homo sapiens
catttctcctgcttaactaatgtcaggttccccatctgtaaaatggggataattacagtatctgtctcccagattactgggaatattaaatgagcactcagaacagggacagtatatcctcagtgctatataagtgtttgctaacaccttacccatatcctctgctgataatacctgtaatttgcaacacagattactttttatttttatctctagtattaactagtatgatgcctttgaacttcctgggctggcagaggtcaaggctggattcctatgaggtatgtaaatggcaactcctttattggggaagagaataggttccaactacatagatttgttcaagaacactaatcccagaggaagaaattaaggaagaggaacagtgatgttctggggtcatgggatcccgagggctctggaaggccctccctatcttctcccttgtagggaaaagatattccctcttcttcaaacctctccatctgcatagaatacagaagtattattgcctctatcaccatagatgcattttgcttctccttaaacttcatataaatggaatcctgtactaaaacttactcttctgtatctggctttttcacccagtaacaaaactaagattcatgcatgtttttgcacatatcagtagttcattctctttcattgctgtgtagaatttcattgtataagtatgtcacagtttatttactaattctactcttaagttgtttgcaacttttggatgctataaatacatttgaagattaatttttaaaagacattttaatagtaagcttcattaacacttttgtagaagtgtatgcactagcttttctttttgcttacactcgagttgaattcaggaagctttgatgttttctaagcattttggtgggggttctttattgtctaaatcagattgtctctttaagaagggtttaatttttattacgtggggcagtgccagccatctttattaataatgatagctgaatagtcacaaatggtgatcaggtga

SEQ ID NO: 46784 - DNA, 1461 bp, Homo sapiens
aagttttcagcatcttaaatttttttaacgtttaagtcagttggctgcttttccttgttcatcataaaatcagaacgttgacaaattgaccttctttttcattcatagcataaataaatgtctgcctatgagcactttgctgcagctctgtacaagctctctagttcaaacatttttcccacttaaattggatcctttctttttgaccatctttctcttataatggaactttattacttccatagtaagtgtcagagagatgtttccctgtactgctttttttttttcttttttttctttttggcacacttttgatgccttctcattgtgcctaacttcgctttcttctatttagagttagatgtctgatcaaaagtacctcaggaatcatcacattggcatgtaaactaattccacacatgtttgcctggaagatgtatttcacacttgaaggggtttatttgggaagaacatgtctgaattatatcagccctcttcggaataaagtcagactttagtatgaaaagagcggtatatcctctttgtgtcaggaagcaggcataggctgcttacctgtgatttttttttttttttgacctgcccttgtcgccattgcaatcctgaaaattccttctcaaaaattaccagtagctgctttaccagcagagttacaaaaagtcacacacgctctctttttaaagtgtcactcagctccttgaaggaacaaaatgtaccagtgtcattttctgttcagataactctcctacaggaatcataaacttctcctctggacctgaacaagtatctgttgcatttaatgcaactctttttcttgccagaacagtaacccctcgtgatttactgttcaatctgtatgaaaaacctgtgtgacctaattctgcatcaattttctgtactcgtgaggacgctaaatgagtcccctgcagttatgcagtattacatcttgttgttgtttggggaagtttagaatcctgaatctctttatcggactacctgctgaatctcactgatggggagatgaaattgtctggagaggaacattatttaaaatgaagatttctattaacaacaacaacatcaacaaagatataatcttctgtgttaaagaagcccctcctgtacctttgcttcttccccaccatgtgctgaatcaaatgcatataattttactatggagtctacctttcctcttctcctagagtttgcgctttgtacttcttgcctcccttccagaaaagggattcttttgtgccagggaatcagattcactgacaaataactgggctccttggagaaggagtcatttcagggagaggtgcacccccctcgctcccactctctctctccagtgcctaagtcacacagtgccccatctccccggggttcccaccccccatctcctcatttccgctccacttccctgcttcccacctcccagtt

SEQ ID NO: 46785 - DNA, 1033 bp, Homo sapiens
ttaatagcacgggccaggcatggtggctcatgcctgtaatcccagcacttcgggaggccgatgcctgcggatcacctgaggtcaggagtttgagaccagcctggccaacatggcaaaaccccgtctctactaaaaatacaaaaattagctgggcgtggtggcacgtgcctatagccccagctacatgggaggctgagaggcaggagaatcgcttgaacctgggaggcggaggttgcagtgagcagagatagtgccactgcactccagcctggccgacagagcgagactccatctcaaacaaacaaagaaaaaacaataacgacagcacggtagcagtgataatattaacacattatgatgacaaatcatttaataaattagaacgaataacgtgcgtatagcaaataaaacaagaatcagtcttagatactatttttagtgaagtccctgaaaaatagttttccttaccaccatttttaaatttttaaaaatgatgacattttatttcccttccaaactaagcaactgtaggttttttaaaaaatcactcattttgatatttgggctatatgaagtattagatcttctacagcatttaggtccaggaggtttcactttttcacgttaatgaaaatgatggctgtcgtcatcagcatcttggcaaggaagacaaatggtctggttgccttaggacagaaccagaagttagaaagaaaaaagtctgtcctcccagctctgtactctggcaacatcatcatgtttggaaaaaactgtaatattcattttttaagacaatttcgacttttattttagattgaggggattcatgaataggtttcttaacatgggtatgttgcatgatgctgaggtttggggtgcagttgatcccatcattcagctaatgagcatagtacctaaaagtttttcatcccttcctgcgctccctccctcccccgtctagtagtccccagtgtgtattgttgccatctttatgtccatgaatacccagtgtttagctgccacttaaaagtga

SEQ ID NO: 46786 - DNA, 1529 bp, Homo sapiens
actgattactctaagaaatgtgctattaaagatgaatatggttgactttttcacttaatttaatctgaaaaagattaccttttattttcagcgttaaactagtgtacaattttttttttttaattccctagaaggacagaggcctctgtctttctttgggagtttattgtgttgacttgttgctcgtgaataatagggtaggtttcctttaacatgttatgaccttgtttaattttctcatcattacagacatttttaggaagtacacatttataaatcattttgtaacttctcattttcagcctggtcttccattaaagcccttgaaatggaagaagaagaagtgaactacatgtatctccttaagtgtcagaggaggaataatttttaaagtattgaaaacctagttatacgaaactaatttctttgatgttacaagatgaatgtgctattatgtgcgtttagcgtgaccttgaggtttcctacagggtacaaaagagaatggggctagatcaagccaccagggcctgtagaactaggattgaacatggctgaattagaaaattggaccactgtctgagtcgtgttagcaggtaatcttttaaaatcaaaactacatgagaaaatatttatactaatttgctattattctcttgtaggctagttcgttaaaagatctattaccatagtgcttcagtctcatgatctgtaagaaggcaataggaatgttgtctaccccatagatttgtagtgaggattacacgggaaagtttatctaaagcatgtagaatacaccctaacatatagtaagtgctcagtaaacattatttcatcaagcaattctatgatacgaaagtggaatcataattataatacggttatgtttttctgaaaacaaatgtctttttaaacctttactgcatattctttgtgatgttgaatcaataataattggtcaccactttttttctagttggaaatcagttgaatattagtgtgtaggatatctttgaggacagtgacagattctttaaatactgaggcatgcagaagaaaaatgaggctttatcacaggtgataaactctgcctaccaccctgttcccccaactcctacaaagagaattttctaattacatggcctctactttactagggttcctggcgattatgaggcatctctcacagtactttagggtacatttttccttaagctgtggttaggagcccataccaggagcagccctgcctattgcttaaaagtttagccatcagctgggtgcggcggctcacgcctgtaatcccagcactttgggaggccgaggcgggcggatcacgaagtcaggagatcgagaccatcctggctaacatgttgaaaccccatctctactaaaaaatacaaaaaattagccgggcgtggtggcaggcacctgtagtcccagctactcaggaggctgaggtgagagaatggtgtgaacccaggaggcagaggttgcagtgagccgagacggcgccactgcactccagcctg

SEQ ID NO: 46787 - DNA, 1040 bp, Homo sapiens
ccctgtcttaagctctttgggtccctgaagacacaatctacaaatctctagtgtgctggcctcagatcacatctgactttaagtgactctctacaagttgctaataaaatacatgttttgtctcagcaaagacaaatgaacataaaaggcattaacacttaagctgtgttagataataatggggtaacaatgaaatcctattacataccggagagttaccaggaagtcctgtaccccatcatcttggttacttataacattcgacattgttgttttgcagaaggctgaggagaatgcagagggtggggagtctgccctgggaccggatggagaggtaagggatcgtcatcctttccactgtgttctgctgaatggagtctgtgccatacctggcagcaccattcttcatgcatactattttattcttactgtgctatttattttaagtaaaaatagtaatacattagcatagtagaaaattagaatgatacaaaagggatacagtgaaaaataatctacttacatgtcagactgtcaatcaactgatattaaatgtcttgcatagtatttcagaattttctgtgcacatataatcgtatgtttacaaatatataggatgtgtaagaatcttaaatgattctataattatattgcccaataaatgatacagaagcataaaatatgacacagtttctctagtttattattaatttgaaattataaaaatacataaactaaagaagtcacatatttggttaacttatttttgaaatttttaatgggcttgccatatagcttctatgtgtatgttcatcagcctagtcctaaaattcatttcctagtagttccagtattctcctgaattatgaggatacaattaatttattggatttttttctgaagaatttaaggttccctgccagcgattcacagtgaggaggcacactcccagagcaggatgggaagggagtttgtttcaaattatcttcattttgtctcataaattctgataaacctacttggaggatcagagtgggtgg

SEQ ID NO: 46788 - DNA, 1024 bp, Homo sapiens
aaggaatcctttgctgaacacctaggctattcaaatggggtcatcaatgggtaaatctcaaatttttttttcttttaaaaaaaaatgttgttggccttacataaactcctcctctctacagtgtttcctcttgtgcaaatacttacttccagccctctaagggctcttcagtggagaagttaaccaaaacggtatcagcattctcttttactttactggcataaattattacttgccttaagcaagtggctattcaaaggacatagatcttatttaatagacttaatagtatcctagtgttctaaaaatgttgttgaagcttcaaaggtttgttatttataaccaaaagtatagcttgggcttgaagagaatgtatcttattaaatttcacattgacatttgacattaatgtacatgagaagaaatctctcatctgctgtaaatgtttacagttttatagtcatttgttagagtgtggtctgtgtaagaaatgtttttcattagcaatggatgttaaagagaatcttgacttgcaacaacaaaaatgaacactgcattaacagaaagtgtgtgtgtgtgtgtgtgtgtgtgtgtgtgtggtgtgttgcaaatttgaaaaatttattattaggatgtagtcatcatttttggatcccaagggcggacagtttcactgggctaagaaccaggaactatagcctatcctgaagcagtgctgctaagctttccctacctctccttgcctctctcttctctgggttctgtggttactcctgctcccatcagcttggccagggttgcatggtgaaaacacagctatagggtatttggagaacagttctcagagtggaggatggatgtcgggaagacatacgtttgaaaatgtgtctgttagaaataacatatcctgtgtcataaaatcaactaccagatgagacatttcagtactatagattacatgtgcactggcaagttttccaaacagtatcacctaaaattcggttttaattgtataacacagtcc

SEQ ID NO: 46789 - DNA, 1058 bp, Homo sapiens
gtgagagtaaggattttgtaaaatttgtgaagttgcgaagatgcctcattagaaatgtttaagctgtttctttctttttttttgtaattgcaaaatgttcaaagttttttatccagaagtacaaagccctggaaattacctcaccagtgttaggaggagtctgggtatatttcttgaaggaagcaagcctttttgtctcattctgtgccattttcagacaagagttaattggcaaattaatttttctgatcccctcaggcaccaccaagtctgaagatcgtgctgctttgctgaagaaattcaatgaacctggatcccagtatttcattttcttgctgagcacaagagctggtggcctgggcttaaatcttcaggcagctgatacagtggtcatctttgacagcgactggaatcctcatcaggtctgcatgtcccactcaggtgcccaggcctccctctggagagcaactaaaagatgatcagtttcattattcacatttacaggacagagcaaatatctaaacgagtgggctgttgctttcttggagccaattcttctggctgttttcttatctcccttagagcatagatacgaggtcccacatatgcctttgaagagctgaagtttgaggtagaaaaacttagtttctccttagttttaatcccatctcttgggattgccattgaacaaagtatatttaatgagggataagtcaaaaatgttgcaaaatcatagcagtaagaacaatagcaaccatcattcatgggacccttaatctgtgtcagcctcttgggcattttttcattcagttttacgacaaccctgtcagacggttaatatgatttgaatctttgcagtcaaggaaactgaatcctaggcagggtaagtaacttccccaaggccaaatagtattacagtagttaaccttttattttgtgttttatttaaagtcatcatcaaaacatattctaatgagcatttattgttgtaaagctcttttagccaggtaagttcagggctatccttttaaagcagtactttgatgttttgttttttt

SEQ ID NO: 46790 - DNA, 1029 bp, Homo sapiens
tttgtaaggatttgaaaataagcatttatatttggcataaggtaaatggaattaaaagaattaatgttaggtactttttcatatggatgtccttattaaaatcttacatccccatgtgaaatagatgtcatacccatatgaccaatgaggtcactgaagcgaggagacattaagtaacttgttgtaaaagtaacagaatcaagatacacatccaggagaactcatatttcttatagtggaccacagtttcctccctgaacggattttgctctgggaagatggttttaatagcttgtaaaatagtaacgtcaaggactaaatccagcaaccccttcccttttctttctgccttgagaaatgggacccctctggtctggaggacagatcacttacttgtttgtaccttgccccagctgtccactggttaaaatcactctgtttttaaccccaggaagaagatgaagtaccggacgatgagactctgaaccaaatgattgctcgacgagaagaagaatttgacctttttatggtaatgttacagaaaatcatgaacacaaatgctttatacctctgcccctttttctgttaagcagaatgtctgcagcctgcgtgcctggcagaacttcatacgtaaagcctatgcctttccttcagttcagaggctgcaaactggctggagttagcctgcagacatattttgtttggcccacgcagcgttttttaaaatttcccattcattgccaacataaaaaagaatcctgatttctggcttctcttgaaaaatgagatcgggcagtaccaggcccacatctttgtgtggaaacagttggccagggctgagtagcagctgcactctctggacaggcctcgcggtctacagcttaccatagacgccctcctgttcccagttcgtttctaatcccaggccagtgtcattcaggaagcctacctggctcctataggcattggaacttacaacagtgcccttacaggatcaaagcaacatgctccttagggagataggtggac

SEQ ID NO: 46791 - DNA, 1032 bp, Homo sapiens
tgggtaacagaatgaggccccgtctagaataaagcaaagcaaagcaaaatactctggatagagtttttttaatagggaaatgaaacattttaatgctcaatgtttttaatattttaaattactgtactaagcaaatgcttattttactagttttttccttcccctctacatgtatgagtttttaatgtttagacataaattttttaaagttgtggaacagtaatcccattgactattaaaatgacttgtgcactttgaacttgcatggttacttttatggttccacacgtctatgcaaagctgtgtgtgtgtgtgtgtgagagagagagatctttgctggaagtgtgtttatctgtgtgtgatatttgctgaaagtcttcctaagatgtatcatgttatgtttttacttgaattattcacctaagcctggcaagtataacttagccttttcctgatggtgcagtcatcattaataataagttattgttttctgctataacgtagaataatctggtagttaagggtgtggtttatgcagccagactttgagttcaaatactgagtcatcttcttactatgatatgatctggaacaagatgctatatctctctgtgcctcagtttcctcatctgcaaaatgcagagagtaagagtggctacctttttagggttattgtgaggtttaaatgactaaatgtacccaaagcactgagtggctgtcaacacagcaaacgtgttagccaatgttgctgctgctgctggcagggacaatggtggtagtagtagtagctgcatcagtagtagtagaagtattaatgatgctgtgtatctgaagatttattaaaagttggggctatttttttctatattagacagcctcaaactactatgcttttgatttcttctgttgctttatttacgtgttttcctctctcatgattgggctgttaatggacattctttgcattggactcaagcagaacaactacctcattctcatcagtatcttattaatttgatgttcttaaccacg

SEQ ID NO: 46792 - DNA, 1042 bp, Homo sapiens
tgtattcttagggattgttttttcataacccacccctcgttttgtttaccttttccttcccttacagtaatgagaacattagggtcttgttcttaaactgagctaaaatttcatctggattcagttatcatcaaacacttgaatttatagatcttttaatatttgtcatattctcctttactgtgagtgttttgggccttcagtgtgttttgctcatgaaacagacttgagttaaagatgcatttatccaatatggtagcattccttttttcttcttcctccactgattactgttaacttttacttttttttggttaatttctttcattttattctaattgttggagctatatataaatatacacatactttttttgtcttggttattctcttgtcttgaatttgtctcctttgtttccaacgaacaggccatcgaagacggcaatttggaggaaatggaagaggaagtacggcttaagaagcgaaaaagacgaagaaatgtggataaagatcctgcaaaagaagatgtggaaaaagctaagaagagaagaggccgccctcccgctgagaaactgtcaccaaatccccccaaactgacaaagcagatgaacgctatcatcgatactgtgataaactacaaagataggtgagtgtttggttccttcaccttgatcatctctcaccaagacgccgagtggcgctccctgaggagcaggagttgttaagttgtgcacttaggttttattaaggttctttctagtttgtgttttatggctttctctctttgtacctgtttaaaatggccactgttgctattttgtatgatgtttcatcaggtattatttaagatagttgaaaatttagtttagattacaaaatgtttaaaatatctaaattagaaaaggattcttaaggacctctgaaataccatctgaaaatgaagatatttcagatgaaagggattggaatgatggagtaatattattttttttaattgaattgttagagaaagaagaatcctaatatatttaaggtaaatatt

SEQ ID NO: 46793 - DNA, 1227 bp, Homo sapiens
ctagcttctctgagttagttacaatctactctgtaaagcgttctaaggtagcacttgttgttttcaggttttcctcccgtcactcgtgcacattcggagatgacatggtctacttaagcttctgtgtctccttggtcagcaccatcattagcccaaggtcctaaaagtgaaataatgaagactttcccaattctgtgccttattgctgacactcagagtcccctcaacctgctcctaattgtccctacaagacacccgttcacctgcctcctcaccccctgtcttcctgaggcccttgcactgctggcctggcctggcaagctgcagggtggactgcgtgccctgcctccagtctcttcctgtcctggcttctttctgaggcacctaacttgtcatttcatattgtaactttagaactcttcacagcggccccgttgcctacccgatgatgaccagacttcttagcgtaggagaattgttatcttccacagtctgaaccttcggatcttcccaactttttttttccaacgcacccctcccagctctccttatatttcagacattccaaagaattctgtgtattttgaagcgagcacatgcgcttccacccctctgttgatttgtttatgggtttatgcttttccctctctgcaacaccccgaccccacactgactctagagcagaatggggcagtgactccgagaagggatttatacatggacaggcacaggctgtgaatcccaaagggtgctgtctacacctggagggagatctagagggtatggagggtcttcccaggatctgtgaaacctggcagctgcttccctgccaccacaaaaagggacaccaacctagcagtttcaaaaatcctcaactgaagaggcttttctagaggcttgtagaagtgcccaagacgccaggtggtggtttattttcatttcccactaaagatcatgaattcagtgatctctcgaaaaggaatagagctcttggaagcagagctgactagttagatggtgttcagacccaaattggctgatgcttggaataccttctttgtgcaggctactgtaagaaagcactttatcctatttaatttttataactttctgaggtaagtatttcccccattttacaaatgaggggctaaactcagatagactagcactaccttcccaagatcacacgcacctctagccagtggctgcctgtctcccaccttctgg

SEQ ID NO: 46794 - DNA, 1045 bp, Homo sapiens
ctttgaaaatatttctatgtaaattattgtaaactttttcaatggttgggacaatggcaataggacaaaacgggttactaagatgaaattgccaaaaaaatttataaactaattttgtacgtatgaatgatatctttgacctcaatggaggtttgcaaagactgagtgttcaaactactgtacattttttttcaagtgctaaaaaattaaaccaagcagcttaaccatggtttgtgcctgttcctctaggatgaactcctatcctgagtagtaccaagtgttctaactaaatgtgtgagctgtagttcttgatgttgtataactaagcctgtaattgggctggtttctcttacaccctagcacagttaaaaaatgaagtactgtttaacatttgctcccgaaatatttcttactgtgtaaaagaagctagcttagtctgtacctagaattcctcttggttagaggagtgagtttcttttttttccattaacttgtttcctgatcgagaaacacgtgctaagatttctatgaattctgcttctttatagttaagtctctgttttccatgttctgtcatttatataggtcaaggacaagtgccttctaaggcatggataagggctttcttcttatgaaagtctagactgtcttactgtgaagatggccagggaggatagcaagcaatggcattcttgaacagtctaaggcaggtttctcagtgtggtcctgagaacagaagcatctgcatcacctgggaatgtattagaaatgcaagttcccagccccatcccagacctactgaatcagaaactctgggggcgagggctgaaacctgctttcataagcccttcaggcgatactgatgtaaactaaagcttaaaaaccaccgttttactgtgacttcatgaagaatataattgcaatatcacctaaatttttatcctggctgggatggggcagattcttactatggacaatttctggaacttacagtatgaagagcagatgaggagtttgagacaaagaaaaaattgtacagggagtt

SEQ ID NO: 46795 - DNA, 1050 bp, Homo sapiens
gaaattatgagagctgtagagagtgagttgagcatagtttgtgattttaagggcctctaaaagtattagggcggcagcagccgctgcacagagacatgatggccagcctaaaacagtaaggtcaagttgtttggacaaaaaggctacaggacgcgatcccggtccttgtgtaagaattctgactgcacagccctgcacttcagctgtgtgtaatgaaaaggggtgggtgagtcagggagagctagggtgggggcagtctctaaagctgtcttcaaggaatggaaagaggagtggggacaggatttaggatctatggggtcagctaggtttccttttgtgagtttatataatggttttgttaggatggcaaaaccaggtatccaaaggcgaaagtatccaaccatgcccaggaaggaaaggagttgttgttttgtagaaggggttggggtttgagagattagtcgggcacgatcggcagggagggctcttgtgtttttatgagaattatgctgaaataggtaacggataaggaagaaatttgggcttgactgaagtaatgggggctgtctgtgaagctttgcggcagtatggcccaggtaatttgctaagcctgatgggtgtcagggtcagtccaagtgaaagtgaagagaggctgggatgaagggtgcaaaggaatagtaaagaaagcatgtttgagatccagaacaggataatgggttgtggagggaggtattgaggataggagagtatatgggtttggcaccatggggtggataggcaaaacaatttggctgataaggcatagatcctgaactaacttgtaaggcttgtctggttttaggacaggtaaaatgggggcattgtaaggagagtttatagtctttaagaggccatgctgtagcaggcgagtgataacaggctttaatcctttcaaagcatgctgtgggatgggatattggcactgaacggggtaagggtgattaggttttaatgagatggttaggggtgcaagatcagtcaccaaggagggagtagaggtatcttatactt

SEQ ID NO: 46796 - DNA, 1463 bp, Homo sapiens
ttttgcttaagtggaaatacttgagtaatgcttggttgcttttttaacctcaagtcagtaactgtgaaagactggacttactgcacctaagatctagaaccctgaagttatctaattggtgctcatcactgagcttgtgtaggcttcctgaagcctattcagggccctgtgtactagggaaaagggttggcagatcacagtgtgtggagtatgcagccagtaattctttcttagattctctctcccctcttagaacctcccctcatttcccagggaacatctgttttccatgagggcagtactaagggggctgaagattcccacagacatataataaaaggttccaagagtaggctggcggcagtggctcacgcctgtaatcccagcacttcgggaggccgaggtgtgtgaatcactaggtcaggaaatggagaccatcctggataacatggtgaaaccccctctctattaaaaatacaaaaaaaaattagctgagcgtggtggtgggcacctgtagtcccagccacttgggaggttgaggcaggagaatggcgtgaacccgggaggtggaccttgcaagtgagccaaagtggcgccactgcactccagcctgggtgacacagcaagactctgtctcaaaaaagaaaaaaaaaaatagattccaagagtaaacaaaatcctcaagtgttactgtgcaaagattatactcaccatgtttgatttttttggtctctggtggtcatcccagatgcattcacagtcatttctggacctttaatgtaatccactgttgttattaaatgagctgatccacatggagttactttttgaaatcatgaagttccttatgaatgtttgttattgtgtcttaaattctttaaattcttaaaatatgtcttaactcacttaaagataaaagtaaatgtttctgtggtccttctgggagtggggaaagttacaactccacaaatgttaagagagaagggtgaacagttagcagtcaggcagcatggttgggagtcatgaggaagagcattcaagatgacacaagttttgtaagcagacctaaggaacgggctgaagaatgttgtggagacccaggtacttcgacttagcattctgagttcagagttcgcccaggagttccaggcttgtggcaggtttagaaaatccaggatgatcggccaccttctttctcccagaggtcgatctgatcttaagttgtacctgactaaaacctgctgcaggagagatggtcagattttatttacacacagggagatggcttcctaagattgtgtagtgaaccaagaaggtgtttacaggcatgtgaaactggctattgtaaagaggcagtgatctgggacacgtgatgttagttaaagtggaggaaaaggtgtacccttcaagcagaggattccagggcctctccaaaccgtacaagtctgagccaagggacagaa

SEQ ID NO: 46797 - DNA, 1068 bp, Homo sapiens
gaaaatctataaagagtatatagcctacaataatagctaacatgtattagctgtacttacagtgtgagccaggtactttttattctaagtactttacatatagtctcattttaaaatctcctaatgactccatgaggttgatattttgttcttcccattgttataggtgaggaaacagaggcacaggctacagggtattttgtccaagataacacagctaataaagtggtgaggccaagatttgaacagtctcttcttaaagagcctgcctcctgaagggttactgatgaattcctttcttccttcaaaatgcttcatgtgatttaacatgccttatttcattgtgtatattaaaggccctttgtttatacattactctcatctatatttccccatttggccaatgcattgtataaattaggtgatctgtaaatgattgttggctaattgatcctatgtgcatacatgggaatacttggaaaagcaatgattgttttaatataacaagttcttgatgtagcaagattgttcctatacattgtggaactctcaattttaatatttactgactccattatccatcttaaaatgggcatatcggaaagggtaaggaataaataattgatggtggtgtcacacatctagtaatatgatagttgagctaatatgaattggttctcccaccatctcaaacacaaagaaatataaaagtcccctccagaccaatgcagagccaaacccaaactcaaaagcaataaaggaaatgcccttgtgccagaaataaaaagggaactcaaagccagaagtataaacaagatctggtgctaaggtctagacctgtcttaatctgttttgtgtggctgtaatagaagacctgagactgggtaacttataaagaaaagatgtttatttaggtcacagctctgtaagttgggaagttcaagggcatggccctggcttctggtgaagactttcgagctgcatcaaaatatgatagagaaagtcatctcatcttgggccatgtgtatataatttaattttaataactaatataaaattattgttaaa

SEQ ID NO: 46798 - DNA, 1022 bp, Homo sapiens
cacccatgtttctctgtggtcttatttgtacttatattcttcagagtttttcctaacttttcccttatacaatttgttgactgcctttcttgtgctgcttttacccttacaattaggtggaatttaccacctagtggtaaatggtacaatatatcatggactattataaagcattgaaatctgactttttcctctacatttgtatttagtttattaatttagttaattcacgttttataaatataaaatattaatttaaaaacaaaggcttttatctcttaaatttcacaaccgttatattcacagttatatgcatgtttgacatcactggctttatggtcatcagagctgctttttgagtcatctaattttcagagcacatcatcttcactttcagccaaagttagctgtgattcagctttttttaatctgtgtaggatgttgtcactggaaattttaccaagagctataaaagtttgctcaaatactatgatagaagttttttcgtttgttctgactatgaatatttacaacctcttcaatgtaattgttcattgcttttaaaaaacatatcaatatcttatttttgaaaaacatttaatataaagcactcttacatatgaagtgaaatgaatagaaaatgtatatgattttaatgttttttttttttttgagacgaaatctcgctcttgtcccccaggctggagtacagtggtgtgatctcagctcactgcaacctccgcctcccgggttcaagcgttcctgctgcctcagcctcccgagtagctgggattacaggcgcctgctaccacgcctggctaatttttgtatttttagtagagatggggtttcaccatgttggccaggctggccttgaactcctgacctcaaatgatccgcccgcctcggcctctcaaagtgctgggattacaggcgtgagccaccactctgagccttaattttggttttttaaaaagtcattcaaaaatatgcctggaaggaaatacatcaaaatgttaaca

SEQ ID NO: 46799 - DNA, 1037 bp, Homo sapiens
aagtaactgggactacaggcctgcaccaccatgccccgctaatttttgtatttttagtagcggttttgccattttggccaggctggtcttgaactcctgacctcaaatgatcctcctgctttggcctgccaaagttctgggattacaggcatgagccaccatgcccggcctttgtcacatttgaagactgaaatgtttaagtcttcaatgtacaactctacaatgtacaactgagggggaaatgataggcatgtgtcatgggttgaattgtattcccccaggagatatattgaagtcctaatccccagtacctcagaagatgaccttacttacacatagggtctttgcagacataagtagttaagatcaggtcatagtggaagatggtcagctcttaatccaatatgacctgaaaacatagcaggagaatgccatgtgacgatggaagcagatattgggcttatacagctacaagccgaggaacaccaaagattgctagggacactagaagccaagagaaagacacaaagctgattctcccctaggatccttgggagagaataaccctgcccttaccttggctatgaattgtagtcactagaactgtgagagaataactttctattgtttcaagccccctagtttgtggtaatttgttactgtagctctagggaactaatacagcttgtttccaagaaacatgtatatgtgtttgtatgttgcttcacactatgtgttacctaggtgagaacaaaagaataggagggttcatgtttgagaaataattactaggattgtagtgattgtagtaagacaaagagaaggaaggtacatcagttatccactactataaaaatccactccaggccaggtgtggtggctcacacctgtaatcccagcactttgggaggccaagacgggaggatcactagagtccaggagtttgagaccagcctaggcaacataatgacaccccctcctctacaaaaaaaaaaaaaaaaaagaagaagaagaagaacattagccagtgtggtggt

SEQ ID NO: 46800 - DNA, 1029 bp, Homo sapiens
catcctcccatgcttgtgcccagccacaccattccctcccactgccaaggtaagcattaaatttttaacaccatggattaggtttctaaaatattaactataatttttgtaaatggaatcatatagtacgtaattgtttgtgtgcctggcctctttagctctgttgtatttgtgacatatctccgtgttgtagcagcagtttgttgactttctttactacgtcatgttattctgtttttttaatgtgccacaatttagttttgatgaaaatttggcttgtttccacttttaactattaaaaacagtgataccaagaatattcttgtacagtcttttgtgcacatatatgtgtatgtctcttgcctgaatgctggatcgtagggtgtgcctatgtttagttttcccaagtggttgtacaaagtgactgtaaatatatctgaggtctagttactccacatcctattcagcacttggtattgccagtctgtttaattttaaccagttttgtaggtgtattgtagtcattcattgtggttttaatttatattaccctgtgactaatgagactgagcaccctttcttttgctttcattgtttttaatgatcacaaataattgtaggtatttagtatttattgggcacagtgtgatattttgatacatgtatacagtatataatgataaaatcagggtagttagcatatccatcacctcaaacatttctttgtgctgaaaacattcaaaatctgttctagctatttgaaaatatacaccagcctgggcaacatagcagaccccatctccacaaaaataaaaataaaaaattagccaggtgtggtggtgcacacctattgtcccagctactcaggaggctgaggtgggaggatcacttgagcccaggagttggaggttgcagtgagtcatgatcacaccactgcactgggcaatagagcaaaaccctgtatctttgcaaaaaaaaaaaaaaggaaaaaagaaaatatacagtaaattattgttaattatggtcact

SEQ ID NO: 46801 - DNA, 1051 bp, Homo sapiens
ccagggctccggaactagctctgagtctgcttctttgaagtgctgcttctgaagcaccggtttgccgtgatcagggatggtcctgcctggagttctctttatgcccattctctttctacttttgttctgctgggcgtttctggttttgtttgtgtgtaagagtccgtgtggattgcaaaaaacaaaatctagaaagtaaagtcatggtttcttccttttttcttttctaatttgtaaaaatctgtggggtttaatcttaggctttatttgtaggtgcttgttcctctatcccatttagacacttagaaagtttgaacaaatcaagggctttccttttttctgcagagcacgttagattttctataaacctaagtagaaagtggcattgtggtagagattgtgcctgatttgtaaagaatgttaaaaagatcgtagaaataatttctaattcaattccgtcgttcagatactttcaaactcctgtgatgctacttacatcacaacctattacacatacacatatgtgtaaaacagactgaagtttcacgaacagcatccttagtatatacagttattccaacgtagtttattctgttctaattttttttaatgttgattagagatccattaaattaactataagatccttcaagagatcagtgcctatagttgaaggtaccatgattttctagaggaagaggttagctccaaggaattaaactgaacagaggcaaactagtgtcgtggtgtggctaagagtgtggaacctttaggttgtgtgtagtagcttatgcctgtaatcccagcgtttgtgagcctgaagcaggaggatcacttgaggccaggagtttgaaactaacctgggcaacatagtgagatcctatttcttaaaagagagagagagagcatggactttggagaaggacagacttgggctcagatcctggttttgccactttctggtcatatgatcagggcagtctgtttggcattcttgggtctcagtgtcatttgactagggcaatctagttggcattcttggatcctagcc

SEQ ID NO: 46802 - DNA, 1039 bp, Homo sapiens
gtctcaaaacaaaacaaagctttttgaatgatacgattatgtgagaagtgaataaagatagtagtttccactaaagccgtaaaataatattaggcatgtccctgtatcaatattaaattaaaagacctactattaatggcactgaatgccataaagtacttgccttttcttggcatcatgtttggtgaatgaggtatatgagaaatatcatttcaggggccctagaggatgctggttgctggtgtgatgatttaagcacatcatttgtaattcccctctgtggtcagcctagtctgagaatgtgctgttgggagactagggtgcttattaggatctcttttctgtgccctgccatgactctggcaactcagatggctcagagaggggtttactttattactgattattaaattacattcacagtttattattgttacaggggcttgacagtagtgagtcagcttttggagcgaagtgtgggctcttagcaagatggcatttcgagcactcttggatgcccttgtcaggctttccccttggaactcactgccttcattacctttgtgacattttagtttttttcctgctgaatgtggctctttttcttctggtttaaggaacaaccttatattatcagcctggcctcctgtatggtggatctgtggaacatgactgtagcgtccttcgtggcattgggtattacctggagagtcttctttgcttggctccatttatgaagcacccgttaaaaatagttctacgaggagtgaccaatgatcaggttgacccttcagtgagtattgagaacaaaccgtggtgtggtttttgttttgtctcttgtcacaacccaacttgtgagaaaaaagttccttataaggcacagttttattacaaatgtatattgcttttgttatttactttgagatttagaggttaatcactccaggaggcagatgaaccaaaacttaggatcatcaaattcaggactattgttaacagttaccaaggtgccttttgttgttacctaagaaccttcaaa

SEQ ID NO: 46803 - DNA, 1070 bp, Homo sapiens
atggttttcataaatgggctttaggaggttcataaacctgaaaaattttctgcaagattgtgagtatatatgtttctcaggagagggtccatagctttcatcagattctcagagagttctctgattcttgaaagaataagaacctctgcttgggatttgaatcttggataagtaataaagaaaagcaatagctgacatttgttgggctcctactacacactaggcattaagagctttacatgcattttatttcatttgtgcctccaaactctgtgaggaaagtgttatgattatccttcttttactgattaggaaatgacagcacagagaagttaccacaattaacctggagtgatgcagcttgctggagcttggacttgaacggagataatctgattctagaacttgggggctgttagccattccttagtaggacatccatgccaagccagatggttctaagcaactggctttaaagttcctttgccttcttcatttcattgcctgagttctagtataggattctgtaggccctgaattcgtactgtttgttaaccttcgtgtttttgtattgggatgggtgagaggaggaagatgctttttgggagtcagatctgtttaattttgagcaagtgtcttagtttttttgtcttagttgtctttaatgtaagtcctagaactcggagccatggccctcaacacagggttactgtgagcataaagtaaggtgataatagatgtgaaagaactttgggagccgtgagctctgtgggattatgtgctaggatggtgacatctcttgtgctttcctggggacagtgggcagcctcagacctcagaaggacagcacctgcttggtccaaagggtatgagattcaggactgtttgtctaagctgtctgtggtcaaaagtacattctggactgaagagatggtgatgtaactgggctgtgtgtgtattgaaaaatccctctttgctctttcctcatttcaggtttgtcctttgagtcaagttaaatatttattgagcatttctgagtacaaaagtggtgtattggagagttgggaggg

SEQ ID NO: 46804 - DNA, 1082 bp, Homo sapiens
acaagttcatacctgatatctatatttacacagatcacatgaaaggagtcaactctgggaagtaagtatctgtgtttttgaagtctgtttctgcagctttttcacatgcctgttctagttgaagttaaaactgccagctctgaggttgcgcagccagaggaagaacaatttcagaattaatttctttctgccttattgccgttgtcaccaacaggcatttcttgagtgcctgtcacatggaaagcatcccagtggctagagctggaagctaagggtctggttcctagccttggggaattaaaacctttatctattaatacacaatgctttaggctttaaattccatctgcactctgttccaacaaaaaaattaaagtggacaggttcttccaccctgagtaaataacagtatagggttaaaatcttttgttatctaagtgtaagtcagcatctctcttcatcagtggaaacaacatatttacatccagagaaagttgttattgcagacgtgaatttggtttagtgaaagcctttgctttgctaaaaaataaaaattttaaaaattagaaaaaaattctaagtaaggaaaataagttcttaaaaaatgatgctctatgtaatgaagatacctgttttaggctttgcttgtgtatttagcaactaggaagttagagaagcaattaaagccactttcttaaaataggaaagtgttaaacatacagaaaagatcaaagaatagtacagtgaacacggagatatactcctgctgcctatagttaacgataaatattttgccaaatttgcttcacttgtttgtgggttttgtttgtttttgttttttactgaatcatttcagtgtgaatgggcatcatttcacttcacatctgaggctttgcaggttgtgtctcctaaaaataagaatattagagtctggggttaactgttgtaggttaagaagtcaacttcttcttaagtgatgccacagctgatcctttttcacagctgtttcacctgtggtttcttttaatttcagcaaaaagaggaaaagagagtaaaggaggggggtgagtgttttatacaac

SEQ ID NO: 46805 - DNA, 1054 bp, Homo sapiens
aacaaaagaagaaaggcaacctaagcagttgtacctcaggagaaagtgtttgaagagaagtctgttctgcttgttaatttggaagaaagggaaggaaaagggggtggaaggcataattttatacataagtagtaagaataaagggatctaaccttaacaagtcttcagttttaaggaactcaggaagagataaaggagagaagttaatagagtatggcaagcagtttcctgaatgtatttgaataagtgtaaaagtaaggccatgaaaaggccgtttcatgtcagatagactgtgttgttctgtgacagattcaataaatatgagcgtcatccacttaacccttggaattaactctacatcttctagaactgattaagatttttttttttttgcatatactcaataaagatgatgtcctcctgctgctgctttaatgataaagggaaagtttcatttttttttttttttactagattcacttaagaagatttgaatctgatagtctcattctgatagtctcaactattacagttgctctaattaactgttagtttaaccctctacagttagttgatacaatgattactcttataagacctgtattctgttttattgttgcttgaactttggattttgatattatgagtgtatgtttctggttttttttttcctcctctcttttgttggctttccattttctggtttgtacaattattaatttgtgtttacagggtggatgcgtagactcgaccaaccaaagcctggcgctactactcatgacccttggacagcaggatgtttccaaagtcctgctaggccctctctctccctacacgtaagttattctttttcaacctcgttattctgtccagtgtaattttctcattgcccaaaatgacaaagggtgttgtgctgcacagagcctgcactatgaacacctgcttgtgtttatcctcaaatcagccagcagttgtcactcttaacctggtgtttatttttacatacaaggatttttgcatttctttccttccttaatcccaggtaactgaaatt

SEQ ID NO: 46806 - DNA, 1048 bp, Homo sapiens
accatccagaatcctccagcattatggtatagaatcgagtaaacaaggatgaattcaccttaacaaatgatgcccaacaaaggcaagatcattggactcagaaggccaaagttatcttggatgcttggcaaagatttgttatattagccagtggcattcttgggctagaagggggagcagtactctgggtggtaacccagagggaggaaaagtggcaatgaccaattccatgtgtgggagcagcatgggtgttgtgggccaagaggaggggccggggcacagcgtaaagaaaaatgtcagttgatgttcttgttctctatcatggtcctgccttttcttttttcctttttttttttttttttttttgtcctaagacagagtttcaccagagacaagctatagcacctgcaggtgggttgaggtcaaactgtcccatgacatatgatacaagagttaaagaggccctacaggcatctcagtgagttcactgtgtagacatgttgcccaggctggagtgcagtgacatgatcttggctcagtgcaaactctgcctcccaggttcaagtgattctcctgcctcagcctcccgagtagctgggattataggtgcccaccatgacgcctggctaatttttgtatttttagtagagatggggttccatcatgttggccaggctggtctcgaactcctaacctcaggtgatctgcctgcctttcagcctcccaaattgctggtattacaggtgtgagccactgcatggttctgctttttctaacctctggaaaacagattcaggagctggggaggaagaccaggattttttgcccattgccaagatcatgaattgatggcaacaatgtcaagagctgccggcggaagagcaatgaagacatatcaaacctatgactcctccagtgggcgggagtgtgagaggtgcttctcattttcaaatgatttgcactattttttttttttggagatggagtctcactcacccaggctggagtgcagtggcatgatctcggcttactgcaacctctgcctcct

SEQ ID NO: 46807 - DNA, 1031 bp, Homo sapiens
tatccaaaactgaaatcaatgctcctcccaacccctaccccaaaaaatctcagacccagaatgttattcctctcctccatagcaatctccatgaaagagtcatctttggtggccttggaggtaccaacctttcccatactggtgaagaacatggtgtggtgtgatcctatcccatagctccttaatcttccctatatcctagtacccagattttaaaaaatagggctcaggctgggctctgaggtgagggaagaggaaagttggggctagccagggccctgaggcatgggcggggcgtggtgtgacatggtaaggggtgggagtgggcaggagagactgcctgggtgaggcttgcctcagatggagaagcctgacctggatccacttgctgcctgtaggagctcagtcgccaaaacctgtctggcctaaagacaggcacagtttgatttaatagttggtactgacctcacttgaacattaaatcaataaatgccaacttaatggagctgttgctgggaaactaaggagtatcaaatatccaatatctgcacagaggagattgttttgatctgttttgtttttctaaagctgcaacttgctccttggtgcactttaggttattcctttttggtaggaaagtggctcccacactctcctctccacccaccctttgaagaggcttggaaatgcactcagcagctgcccccatgataagccgaagggcctgtcctgtccaggttggcaggtcctcccagcaggcagagtgaggagttcatgaatgagggaggagactatggtgtctcagaaggaaaactctagaggaaaaacacttgagtaacaatgcccagttcaacctctggatctctcttgcagcttgctgaggctctatttccagctgaactgtgtagctctcagcgtgggtgccttttatccatcactggtgtcatgccaggtcatcttcatcttttcttagctaactgaggaggacagtcatccaagctggggtctcctctcctgtgtgtctctcctag

SEQ ID NO: 46808 - DNA, 1050 bp, Homo sapiens
aaaactacaaaaattagtcgggtgtggtggtgggcacctgtaatcccagctactcaggaggctgaggtaagagaattgcttgaaccctggaggtggaggttgcagtgagccgagattgcaccactgcactccagtgtgggcaaaagagcaagagaggaagacatcatctcaaaaaaaaaaaaaaaaaaagaaagaaagaaagaaagaaagaaagaaattcattgtaatgaattgtaattcaaataatgacaaaaaccacgattatttttgtaccagcctaatataaccagaaaaatctgggaatggacctagttttaggtagagcagaatctaaggttcaaattatgcatttggaagtgtctctcctccctcctcccttcttccctccttctctctctctccttcccttcctccctcccttttttcttctctctgctctctctttacctgtccttctcttggtttggcttgtttctgcttggtttcattctacaggcagggcctcttcgcaaagagggttttaaaatggtggctgaacattctgaaaacatcatctcagtttagctaccccagcagaatgagaacttctcttcccaactccctagatcaatcctggggaagacactgattggccttgcttgaatcatgtgcccacacacaaaccaatcattgtggccagggggatagggtgactggccagtctggatcatgaattcaccctctgggggctatccatgacaatttgtcctactagataggacctcatgagaatctggggaaaaccaaagaaggaggaaacaagttactagactaacactatagctactacggtccactacatattccaaccagcttaaaggaaagggggaatttatcttaaggatacaggagtatcttgtggaatacgagggaaggcatacagctgggcctttggagagaacttggaagctatcaggaccctggcagcttctttctgcccagatgcttcattctctctctctgcaatcctcctttttctgcttcttagtgtacccagtgggaagaaagtgg

SEQ ID NO: 46809 - DNA, 1030 bp, Homo sapiens
tttcataatatgaggggattatttaatgactctactgtacatttcttggaagaaatactctattaatatttaggatattgttgggtgttgggtgaagactcattacttaatgacaccgagtaaattaagaaaaagtgtgccattcacataattaacagcagagacataatgtaatactcatttgaaaaaaacctttaatttgaataattgcttgaaaagacctaactgaacactagattactactgtgacctggaaaatggagagaaatatgttggttttcatactctaagacccacatgccatttctgaatgatcacgtattttaatagcttgactgtaagtaagtgtcattctaaatcatcagagatcattggccaattccagaggttccttgaatatgtttaacttctaggcttttgaaggggaagctgttgggtttatttatttcattaaaaaatatttattctatttcctcattaaaaagtaatacatgttcactgaagagcgttggagagaaacactgaaaaacaaagggaaaaaatataaggattatgtataattcttagagacaactcatatcaacattttggtgttaagaatttgctttccagtcagttttttcctttttaattgttttaaaaattacacaagaaatattttctcattataaaaaaattgagacaatatagaacaaaatgtagaagtcaccctattatggtctaaattgtacctccctaaaattcatgtgttgaaaccctaagctccagttcctcagaatgtgattatttggagataggggctttaacaaggagacgaagtttaaatgagggctttagggtagacccaatctgatgtccttataagaagagaaaatgtggcctgggcctataatcccagcactttgggaggctaaggtgggcgaatcacctgaggtcaggagtttgcaaccagcctggccaacatggcgaagccccgtctctactaaaaatacaaaaattagccaggtgtggtagcggacacctgtagtcc

SEQ ID NO: 46810 - DNA, 1041 bp, Homo sapiens
cttttctctttttttaagtgagatgatatcatgtgtgttgctctgcagcctgctgcttttactcattcatacgtcatggacctcaaagtttagattagcccgatcctagtgcattgccagatggtcgcttagaggtggtgatggtggctttagcctcctaataaactgtatcagacatcccaataaatatttagttcaagtaaaaggtcctcaataaatacttagttcaagtaaaaacagagtgcttggtaaacaatgttgcttcagtataaattcccctgtgggactggcactgcccttccaactagattgtcccttttagaccccttccacagagccatcactgccagtctggaatgataaatttgaataacctgtgtgagattgggtgaacaattaaaaacttcgttttactgtttctcacacctccattattctcttgaggtttttttattgtcgttcttttcacacatactaataaccaaaagtgattttccctccaatccacttaaattgaccatctccactccttctagtacatgcgttgtcaaagctcacaagaaaatggggatgaattaggcttcttctttcctggcctctctcccatcaacatccttcagacaagactaaacattccagacaataacatccatacaagaagttgctttcttaaatcttaaaggaatattacagtgtaaagagaatacgtattgaaatactagcttccgtttaaaaaaagtggtggaagaaagaccaaagttcacccttgtccttgataatcattcaaacacaacaaggagaatgagaaacaaaaaatgcaaatgctggctcggtggctcatgcctgtaataccagcaccttgggaggccaaggcaggcggatcacttgaggccagggattcgagaccagcctggccaacatggtgaaaccctgtttctgctaaaaaatacaaaaattagctgggtatagtggtgcacgccagtaatcacagctacttgggaggctgaggcatgagaatcgcttgaacctgggaagcagagg

SEQ ID NO: 46811 - DNA, 1743 bp, Homo sapiens
atttcttcttgtgctagtttaggtaaattgttttaaaaggaacttcatttgtttttaaattggagaatattcctgttgtcttttacatgtttcaatattgtaagctctggtaataatgtctactttttaattcccgatattgataatttatgttttatcttctttttttcttgatcagtctttctagtgttttatcaattttaatgcttttaaaaagccaacgttttactttgcttttctttattttatttttatttttctctgatttctgctcttaagtactttcatttttatggtttttggcttaatttgttgcaacttcttgaaatgaaaatttatttaataacattgttcagcctttcttctcgtcttgtgtatgaatttaagattatgaatatcttagtatacacttttactgcgttttactcattttcattattgattcaaagtatttttaaagttattctttgtaccatgggttctatgaaaatatattgattaatttacaaatatatgcgggtttctagttatttttctgtatatgctgtggtacttttgtcagtggttatattttccataagagatttttaatttaggtgccattggcaaatttccattaattcaaatgcagaacttcacatttttcaatgcatacgtgagttttttttgttgaggtattaagaatagcataaatttataaaatattaagtaatcattgaatgcaaaatatgtcctattttgcaacttaatatacttttattaggttgacgctaaagtaattgcgttttttactcatactttaatggcaaaaaccacaattacttttgcaccagtctaataatgagaattattattattattatattgtcttttttttttttggagtggagtctcactctgtcacccaggctgaactgcagtggtgtgatatctgagccttggctcactgcaatctctgcctcccaggttcaagcaattctcctatctcagcctcccaagtagctgggattacaggcacgtgccaccacgcctggctaatttttgtgttttcactggagaacagggtctcactacattggcctggctggcctggaattcctgacctcaaatgatccccccgcctcggcctcccaaagtgctgggattacaggcatgagccaccgcgcctggccctaataatgagaattcttatcaaactgtttacacagaataacatgagtgggtaatggtgaagctgagtttcacatttttatgcgatattcttcagtgttgctatttgttcagtacttttaagaattatataaattttttatagtctatacataaagtcaatattatgggtcccaaatatataaaatgtttgcttgttccattgtttatgttttgaatacaaattatattttgtatgatttcattaataatttgttgagaattttatggcctaacatgtggtctactttctaaaatattccagcttcatttgaaaaggatatgcattcttcagttgttaggtgtttgcttttgattgcttgtatttctcagtcaaatgtaggaagtggagattaagaaaagggctggcacttttggtgattgaggaggagaaagtatgagatagttgtcttggatagtggaagagtaaatgttctaaagaaatataaaatgatagttgagcagcactaagggcccatttgagtatgaatctaaagagggaccaatctgaatgcatgtgttttcatcagtgat

SEQ ID NO: 46812 - DNA, 1049 bp, Homo sapiens
aaacctcatgaaccagcctctactagcttcttgcttttcttctgcagcttcctcacctctctcagccttcacaggtttgaagacaattagggccttgctctggtttagggtttggcttgagggaatattgtggctggtttgatcttctatctagaccactcaaacttttgtcacatcatcaataaggctgttttgctctcttatcatttatgtatttactgcagtcgcatttttaatttcattcaaaaactttttctttgcattcagaacttgattgactggtgcaggaggcctggcttttagcctctcttggcttttaataataccttcctcacttagtttaattatttctagcttttgatttaaagtgagagatatgaaactctttaatatatgaaactcttcctttcccttgaatgcctagaggccattgtaggattattaattggcctaatttccatattgttgtgtctcagggaatagagaggcctaaggagagggagagacacaggaatggctgttgctggagcggtcagaacacacacagcatttgttgcttatgtttgtcatcttatatgggcacggttcatagcggccccaaatgattacaattgtaatgtcaaagatcactgatcacagatcatcataactgatataataataaaaaagtttgaagtattgcaagaattaccaaaatgtgacatagggacacaaagtgagcacgtgctgttggaaaaatggtgctgacagacttactagattcacacttgctctaaatccttattttgtaaagaaaaaaaccccacaatatctgcaaagtacaataatgcagggtgcactaaaatgaagtatgtttgtataaaaaaagattgtgattaataattcagttgtaggggttggtatatcaaaagatttcgactgctattacattttgttccgattttaagagttgttactttagcttcatttcaaattataggtgctatgtaaaaatattctgttgtgtacctttaataattcctttctctgcttcttttctaggtatcaca

SEQ ID NO: 46813 - DNA, 1025 bp, Homo sapiens
gtggtttctactaatgttaattgaattgaagagtgccatagcacattttagattcctggcatcatttaatgccctcatttttaagtcaagcaagatacagcatagtcttagggttagattgatagagtaaatcacgtttaatgcttatctattgttatcaataccttttttattttaaagaatttggaaagaatgttgtcttcttaagtcttgttttaaaatggctctgtaaattctacccgtttttaattttacatgcttttaattataggatttacagttatattgcgattttcctaatattattgatgtcagtattaagcaagcaaaccaagagggttcaaatgaaagccgagttgtaactatccataagcaagatggtaaaaatctggtaagtttgctttatgattgaataatggtttcattttatagttctcagaaatgtgtattttagaatcttagtaccaaaattattttctggtaggaattttgattgtagttttaaatataactctaaacatcagttcagtaaactttttgataacatctagctttttgtattactatcaacaccatcttcctacagagtttcttgtacattactgtactttttttactcatttttatgattagcaaagcaccagttactttctcccccatccctactctagattatactagttctctgatgtaatgctcacccctgactaaaatattttatcaacagggatgtatatgtgccagttatactgcctaattaaaggagaaaaaataaatcaatgatgtctggaatttatataacaaaatgtaaatcaatcccaggtcagccccacccaagctgtaggacatggttgattctaaaagattaacgctttctctttttttaaatagcttcagaaatctaatttattttaatgtaaataggagaaatgaattattttatactttgctcttaagtttctcatttatcttctctgtcttctttttaactcagatgcttcttgacccttcctggcttaaactag

SEQ ID NO: 46814 - DNA, 1027 bp, Homo sapiens
tgaaaccctgtctctaccaaaattacaaaaattagctgggcatggtggtgcgcacctgtagtcccagctactcgggaggctgaggtaggagaagcgcttgaacccgggaggtggaggttgcagtgagtcaagattgtgccactgcactccagcctggcgacagagcgagacacggtctcaaaaaaaaacaacaacaaaaaaaaaaaaaaacaagaaaggttatttggcataggaagaacctgattgaccttgaggtattggtagattttatataaatgtttctgagtagaatgaatatgtttataaaatgcaccttaaaaataggtgaacaagttcataatatagtgcataagacaaatatttaaaaactgcaaaatattaaaaatgtaatattaaagataattatacaaatacaatggtggtgcagtggaatggctgtatgttcacctttgcttgtgcaaagaggtgagcattagagaggacctcttagaaacagtggtacttgaactgagttttgatgaatgaataaaggttcattgctcagaagaagtgggtatacattcttaggtagaaagatagcatgaagaattatcaaggcatgaagcagcatggcatttgcttgaaatgatttaagtcatttaatatggctggaacgtaggttgtatgttggcagtggcaggagctgagattggagatggaggcagaaaccagctcatggaaggctctatatgctacatttgttttaggctttatcttataaatgatggaaaactattaaggatggtattgttgctattaattatcattgccttcttacatgctttttcataaaatcaacttttaaaccacttttgtaggctgagaaattgtaaattgcccttttgaggaactaagtacttctatcactatactggcactacatcggattcatggttcaaatgtttattctgttgcttgttcttgtgatatcattttgtcagaataatcactgtgatgtccattgtgactatccctccctttctttata

SEQ ID NO: 46815 - DNA, 1038 bp, Homo sapiens
tggaatcttaattttctttttggaaatttaaaaatgattcttcacaaatctcaaattaaaaattaaaaatctacaaagacctatatcgcaactcccaagttctcaagaaagtaagggaaattcaaggggttaaaaataaagaagaaactgagaaaaaaatccagccatctctcagtgtccatgagggattggttccaggactacccatggataccaaaatctgaggatacttaagtggaacctgtggatatgaaaagttggccctctatatacatgggttttgcatcctatgaacactgtatttctttttttaaataactaattattttttaaaattatttatttatttattagagcaggacttgctgtgtcacccaggctggaatgcagaaatactatattttccaactgagtttccttgcagatgcagaacccgccctgccagtacagagggcccactggatttattgaaaaaaacccacatataaatggacctgtgcagtccaaacccatgctgttcaagggtcaactgtagtacataagatctgataatctggcagtcaggtggtgagggttgatgatcagccacatttatcaagggggttaagatttaagagcaatttaaaagggccaggtctcagacctgtgcaaggccacgagttaaaagtgagactatccctgagtaaaaccaggacacttaagtaaatacatcctcagtaaaacaatatatagaatgtgaaaaattcacccactagcaagcagagaagaaaaggaatattgtcatttttaactgcgcttctggtgaggaaaaggagtctctcctaagaatttgtcatcataagctttggaatttgggcttcattatactacctacatagactgagaaatcctaaattaaaagtggtactctcctaatattgtgtggtgcttggaagaaacaaaaaaatcttttcggaaccacatactcttaacctaggcaacccataattcccacagataaaagcattgcaaacacaagcttttaatagaaaatttaga

SEQ ID NO: 46816 - DNA, 1071 bp, Homo sapiens
cgcagtctcagctcactgcaacctgtacctcccaggtttaagcagttcttctgcctcagcctcctgagtagctgggattaatttttgtatttttagtagagatgtaaccacacctggctaatttttgtatttttagtagagatgggtttcaccatgttggccaggctggtcttgaactcctgaccttaagtgatctgcctgccttggcctttcaaagtgtagggattacaggcatgagctactgcgcctggcctgcaaatgtgtttataatgacaaattccacttttttattgctggtatatagaaaatttattgacttttgtatattaatcttggatcctgtaaccttgctatagttacttattctaggaggatttttgggtcaattctgtcaaattttctacatagatgatcacattatctatgagtaaagacagttttatttattccttcccaatctctttaccttttattcctttttgtggtcttattgaattagctgggacttccactattctgttgaaaagctgctgtgagtggagacatccttcccttgttcctgatcttagcaggaaagcgttgagctgtaggtttctcatagatcttctttatcacgttgaaaaaatttctttctattcccgagaggtttttttaaaatcatgaatgagtgttgttctgtagtttgctcagtgttttttgtttatttgttttgttttatggagacagagtctcgctcttttgcccaggctggagtgcagtctcacaatctcagctcactgcaacctccacctctcaggttcaagtgattctcctgcctcagcctcccaaatagctggcattataggcgcctgccaccacaccgggctaatttttgtatttttagtagagatggggtttcaccatattggccaggctggtcgcaaactcctgacctcaggtgatctgccaacctcagcctcccaaagtgctgggattacaggcatgagccgtggcgcccggccttgctcagcgtttttatcttggttgttagatttgttaagtgctttttctgtgtttattgaaataatcatg

SEQ ID NO: 46817 - DNA, 1024 bp, Homo sapiens
gcaaagcaggtctgatggttacgaattccctcagcgtttgcttgtctgaacaggatcttgtttctcctttgcttataaagcttagtttcgccagatatgaaattctgggttggaaattctttactttaagaatgtttaatattggccaggtgtggtggctcacacctgtaatcccagcactttgggaggccaaggcgggcggataacgaggtcaagagatcgacaccatcctggccaacattgtgaaaaaccccatctctactaaaaatacaaaaataattagctgagtgtcgtggcgcatacctgtagtcccagctactcaggaggctgaggcaggagaattgcttgaacccagaaggcagaggttgcagtgagctgagattgcaccactgcactccagcctggcaacggagcgagactctgtcaaaaaaaaaaaagaatgtttaatattggccccaatctcttctggcttttagggttttcactgagaggtctattgttagtctcatgggcctccccttcgtaggtgacctggtctttctgtctgactgcccttaacatttttctttcattttgaccttgcagaatctgatgattatatgtcttggggttgatcttctcagggaatatcttactgaggttttctgcatttcctgaatttgaatgttggcctgtcttcctaggttggggaagttctcctggatgatatcctgaaatatgttttccaacttcgttccattctccccatctctttcaggtaccccagtcagtcttaggttcagtttatttacataatcccacatttctcagaggttttattcattttcattcttttttctctattcttgtccgcttatcttatttcagcaagatagtcttcaagctctgagattcttttctccacttggtctattctgctattaatagttgtgattgcattgtgaagttcttgtagtatgtttctgagctctaacaggtcggttatgttgctctctaaactggctcctcctagtattgtcagtgg

SEQ ID NO: 46818 - DNA, 1044 bp, Homo sapiens
atttgtttatttgttatgtgtgtgtcttatttggtaaaatgtgtgttcaaatcttttgcccatttttttagatgggatccttgatttcttgttgttaagttcatattttgcatcttgatatctgttccagtacaattggttgaaaagattatcccttctacacagcatatcttttgcacctttgtcaaaaatcagttgtctacatatgtgtgggtttacttctatatacttcattctgttccatgatctatttgtatatatttaacatcattttgattactctagatatataataatttttgaaatcacacagtgttaggtctccaactttgttcattttcaaagttgcttttgctattgtaggcctttgtatttccatattttatgttcatctcaatttttttttgtaaacattaaaacacaggaaaagaattagagcatagatataagggttatttttacttatagcattatatgtaaattaaaactacattgttttgaaaaaacttccactgaacaaacatttttctcaccatgtttactctttttttttaaattttattattattatactttaagttttagggtacatgtgcacaatgtgtaggtttgttacatatgtatacatgtgccatgttagtgtgatgcacccattaactcatttagcattaggtatatctcctaatgctatccctcccccctgcccccaccccacaacagtccccagtgtgtgatgttccccttcctgtgtccatgtgttctcattgttcaattcccacctatgagtgagaacatgcggtgtttgtttttttgtccttgggatagtttgctgagaatgatggtttccagcttcatccatgtccctacaaaggacatgaactcatccttttttatggctgcatagtattccatggtatatatgtgccacattttcttaatccagtctatcattgttggacatttggcttggtttcaagtgtttgctattgtgaatagtgccgcagtaaacatacgtgtgcatgtgtctttatagcagcatgattt

SEQ ID NO: 46819 - DNA, 1033 bp, Homo sapiens
tacttttatataaaagagatatataaattgccaataagcacacagagattccagtagataaatagggaaagtagtctcattaaaggaaatactgtaactaacaaactcaagagaaagtatttagacccagtagtaacccaaataaaataaacgttaaataaaataaacccaaataaaataaacattaaatataaccatttttattttttaataattaaagaattattactgctcgcagaggtataataaaagttgtgttgcacacttctgatacacaaaggtgtgataatagggagctggttaacaagttaactgtggtacatccttctcttatagtgatatgtagtcattatgtctcagaaaaatgtataaacttaagaacttgaccatattataatgccaagtgaagaaacaagtcacacaaaattatatatgtaatatgaccatgactgtataaaacaaaacaacgcaagtcatctaaagacaaaatctagagcaatacagtacaaatatttatagtaattgttcctgaatggtagaactgtagtgattcttctgcttttcaactcttaaattttcaactagttagattttcttgatgctatagccacttgtttttgtaacaagtatagtgctaactgaggtattcggttttggaaatctttaaagtacagacttttttgatgatgggattcaatttaacttgtttatttttcaataaaaatatttagtgcaaaaatttttgacacataaatatagtgcaaaatgataggaacatcatgatgtatttagaaattttaaattcagttttatgggtaaaactgaaaaaagaatttttttgcattctaagtgataattttgtgattcttttgaagaactgttgtaatcaatgactaaaattagatttactggtgcattttaaactactatgtttgttttattgcttaatttagacatgttcctataaataaaaagcagtaatcagaaacaacaatttaactccattaatttatgttcctgtgggcatggtaga

SEQ ID NO: 46820 - DNA, 1028 bp, Homo sapiens
tcatattcttaaaacctgaaaaatagtggttatataaggttttgaggaaagtaaagtttggttttgacagtggtatcttcattgtcatctgtgccattataaacccttctgtagtttgagacactgttctaagcattttttaatacgtatttaatccctttagcaaccctatgaggtagttaggtataactgttttacaaactgctgcacagagaggcagagtaactcacccatagtcacacgcgaataagttgtacagctaggattcagacataagtgttgtagctctaaagtctgtgctattaatcagtaatatactgtctcaaccctgtttatgctccatccagctactactttggggtttatctgggagtagagaatggaaaaaggagaaatgatctggagtggtttctaatagtcctgaagaatagaggcagtataattactgaggccagtggttaatcatcctcttctcacttagttatagaaatactattgtctctcgtttctcttctgtaaatcttacaagttcatcacaggagtttttctagagtatcttaacttccctgtattatgtgacagcatcttaacctcagactgcatatccttttccactatgctccatctgagaacacagttcagatgcctcatgatctttcctagtttccacctagtgttgtttctagcatccttctatagatgttgggagtcagtctataacaatggtggcagtcttattaagtgactctgtacctcaaagatcatttattctttggtgaatgaattttccattttagaaatcttagattccattgtatattacattatctcttcatattagttacacagaccagtggaccagactagttgaaggttgtctggacattttattttatggcttggaaattttagtgaaattaatgaaggaaacttccagggataagtcagaaataatttgtgtttagctttaaaatgtgttcatatgcttatgtttaaatagaagtttagtagatttctaaattgcacat

SEQ ID NO: 46821 - DNA, 1044 bp, Homo sapiens
gcacttattaataggattggcaacagtgttattatataagttctggatagtgaaaactcccttattggccacacttccaaggatggcacctgaatccaaagaatggtaggactgcccaaatcagagagccctgcacattgtttctgtcagactggaggctgtctcaatgtgtgataatataaacgataagcagttttggtttttggtggcttttttttttttggttctatgaaaagtctggtgaaagggtactacgtctttcaaaaaactcttctgaaaattattttcatccatctgtctatccatttaaaaagtattgaattttgtccagctctaggcactgttgtagatactagagatctaacagtggaaaaaaacaacaaaacaaaaagccctgctgatagatcttgttattcttctagtagagggtgataagtaaaatacattatgagttaggtgatccactctatggagaaaaattaagcagggtaagggaatagagagtggaatatgacttaaaatagtggtcagtgtcttcactgagaagatgacatataaaaggatctcaaagatgatgaggtaacaaaacatatatccaggggaagacaattctggattggtgagatttagcaggtatgaaaattcataagaagataccgtgaataaattttaggtcctataataatttatagttagtaagaaatgatgaactttttttattagctgtaaaaatgaaaatacagtctgatttttaggtaactgaatcctgggaaagtcaagagcgcacccgcttttttcttccagtaaatggcaccaccgtgtatttgagtttattcactcttcctgcccactaacatcaatagccagtctatatccagtctagtatattctaccttgtatgtcatttcttttccctcctcgtaattcccaatgacactagttcagtttaggtcttgtcacttttctcctggattattattatatctttttttttttttttttttgagacagagtctcgctctgtcgcctgtgctggagtgcagt

SEQ ID NO: 46822 - DNA, 1030 bp, Homo sapiens
atttttgtaaataaaatgtaattgttggatttttcacatgttagatttttgcaataatctgagatttacaacactttctgatgtatgttcactctgattctgaaactaaattatattattggatttcatatacagtattaaaattagtggtggtttaccaagattaaactttaaagcatatctgaaagttatctatctgtaaataagacaaattgtctacagaattagttttatatagtcagtgatgtgtaaacctcttggctttaagaaccacaacaactttgaatgcattaagaaaactgtcacacaattgatccgaaactgcattaagaaaaaaattcctacttttttttttttttttcctttcactggtttcttgtctctcagggtcatcgttccatgggctgtccccacccaaccccaccaagtttccttcattgacatttctgttctttccttcacaaattctgccatggcttgtagggagagcacctgattaaccaatactgagctgggaatgaccgacacttcttagctagttctataaattttgttagtttgtttttgttagccccagttaatctcaaatagatagaaatttagaacattattgaggggattataatgggattaatcccttttgcctatcccataatgtattcagctgtttcatttctttttgttcatttgtgattttgtgttttcaaagtaaaaaatctgaatatttatttagagtttactttggattaaaaatattcaatttattagagcttcaaaataataactgtagctcaaacttttaagttccatctacaaatcttaaaaatctattcgtaaatctagcaaatttcaacacttttagaggggaatcttacaaattaaattctcttacgtatattaatgtatatttataaatatgccttataaatatataataaattatatattttgtttcttcttaaaatacttgaattgtctaacaagctttgtaccatttcatgagcaggtatttttgccaaagcatgatata

SEQ ID NO: 46823 - DNA, 1026 bp, Homo sapiens
ttgttcttcttttcaagattattttggctcttcggggttccttgcctttctgtatgaattttaggatcagctttcccatttctgttttttttttttttttttttaaaagaacattgggattttggtagaaattgcatttaatctatagctgtttgggaagtattatcgtaacaatattaaatattccattcatgaacataatatacctttccaatttcttagttctcccttaatttatttacgcatacaactcttactcatccttgggtcagtttattcccaagtattttattcctttttgatgctattgtaaatggagttgttttctgaaatttttattgctagcgtagagaaatatatacgatttctgtgttgatcatgtactacagctttgatgaatttattagctctaataactcttctgtggattctttagaattttctatatatactatactattatgacatctttgaataaagagagtcccattttttccgtttctgttggatgacttttctttttcttacttgattgctgtctagaatgtccagtattatgctgaacggaagtagtgagagcagcattcttgtctcatgcatgatcgtagcgggaaaactttcagtcagtaaacagtcatttactgttgagtaagatgttagctgtgcgctttatcatatatgtcctttatcattttgaagaagttcccttcctttcctcatttgttgagtgtttttatcttaaaagattattactattttttcagatgctttttctgcatgaattgaaatcattctgggatttttccccttcattctattaatatgattacattgtattacattgattttcatgtgttgaaccaccattgtattcttaggctaaagcccacttggtagtggtggataatccttttaatatgctactggatccagtttgctaatattttgttcaggattttttttacatctatattcataaggtatattgagccatggtttccttttcttgcagtgtctttgtctgac

SEQ ID NO: 46824 - DNA, 1032 bp, Homo sapiens
ctatttgttttctattatgtctgtatcttttttgtcctgggttcctccactgctgcctttttgttgttgttgttgttgtttttattgttgttgttggtttgatttttttgcattgtaccatttcaactcctttctcatttccttttttgtacatgttttagttattaatggttaccttggggattaaattaacatcttgcatgtacaacagcctagtttgaagtaataccaacttagcttcaataatatctcaaaactatgttcccgtacatctccctctctccctttttatgttgttgttatgacaaattacatctttatacattgtgtaactgttaacatagatatataattactgttttatgcacttgtcttttgagtcatatagggaaaaaaaggcagatttctgaaccaaaaatactgctggcttttatatttacctatgtaattacttttatcagtgttctttattttcttacatgggtttgagttattgcctcttgttttttcaggctgaagaacttcctttagcatttctggtagttcaggtctacttgtgacaaattccctcaactttttgtttatctggaaattcattaatttcttttttgtttttgaaggataatttttctagatatttcagcacttgaaatatgtcatcccactgttctctggcctccatggtttcctatgaaaagttggctgtcagtcttacttgggatctcttgtatgtgaggagtcacatacatctcttgctgctttcaagattctcttcgtttttttgacagtttgaacatgatgtgtctctgtgtgcatcttttaaaatttatcctacttggagtttcttggaagaaagactcttggctttctcagatttggaaagtttgtaaccatgatttcttcatatattctcttttctctctccttgcctttggacttccatcatacagacaggcgttggtatttatgatgttgttcccataagtctttaaactgggtctatttttttttcattcttttttcctatttctt

SEQ ID NO: 46825 - DNA, 1055 bp, Homo sapiens
ttattaaaagcaagctctcagcaaataaagatgatgtcctgctaacaggctcccacttcacagattgattaccaaaccccagcacacacgcgcgtgcacacacacacgctgaagagccccagggtcctacccgctgaacaaggcgtgaacttaaccccattctcctagtgcgcttgtgggcattattcagaaagaatcactcaggaaacggcaaacgggcagttatttatccctctggatcaccagtttcatctgggacaaggagtcccatctttcagccttcaggcactttttgggcttgaaagtgggttttcactggggacccttggccaactcctgtctctgtcagtataattatttttcctttactgcagatttttcctcctgctaggaattaatgattgccttgttctttacatttgcttaatttttgtgtacttatctcttactcaacccaaactgtcagttgtgtaaatatcctcccagctttttcaaacatattagctgttctgttcatttcatcttttttgttttcttttttttttttttgagatggaattttgctcttgttgtccagactggagtgcagtggcacgatctcggctcaccacaacctccgcctctcgggttcaagcgattctcctgcttcagcctcccgagttgctgggattacaggcatgcaccaccacgcccgcctaattttgtgtctttagtagagacggggtttctccctgttggtcaggctggtcttgacctaccaacctcaggtgatccacccacctcagcctcccaatgtgctgggattacaggcgtcagccatggtgcccagcccatttcatcttcttcttctttttttttttttttccacagtaccacaaaacaatttaatggaggaagagatttttttttttttttttttaccccgaggaactatatcacttaaggatggcttacagaaggaatgagcttgcaaaaactataagagagagagagtgtgtgtgtgtgtgtgtgtgtgtgtgtgtgtgtacctatgcagtgtatgtgtgggtctatag

SEQ ID NO: 46826 - DNA, 1185 bp, Homo sapiens
cttttaatcggagcatttagtccatttacatttaaggttactattgttatgtgtgaatttgatcctgtcattatgatgttagctggttattttgcacattagttgatgcagtttcttcctagcatcgatggtctttacaatttggcatgtttttgcagtggctggtaccagttgttcctttccatatttagtgcttccttcaggagctcttgtaaggcaggcttggtggtgacaaaatctctcagcatttgcttgtctgtaaaggattttatttctccttcacttacgaagcttagtttggctggatatgaaattctgggttgaaaattcttttctataagaatgttgaatattggcccccactatcttctggcttgtagagtttctgcttagagatctgctgttagtctgataggcttccctttgtgggtaacccgacctttctctctggctgcccttaacattttttccttcatttcaactttggtgagtctgacaattatgtgtcttggagttgctcttctcgaggagtatctttgtggcgttccctgtatttcctgaatttgaatgttggtctgccttgctaggttggggaagttctcctggataacatcctgcagagtgttttccaacttggttccattctccccgtcactttcaggtacagcagtcagacgtagatttcatcttttcacacagtcccatttttctgggaggctttgttcatttctttttactctttttttctctaaacttctcttctcacttcatttcattcatttgatcttcaatcattcgatcaaatcggctactgaagcttgtgcaggcatcacatagttctcgtgcgatggttttcagctccatcacgtcattttaggtccttgctacgctgtttattctagttagccatttgtctaatcttttttcaagattttttgcttctttgcaatgggttcgagcatccttctttagcttggagaagtttgttattactgatcgtctgaagccttcttctctcaactcatcaaagtcattctccatcgagctttgttccattgctggcaaggagctgcgttcctttggaggtgaagaggtgctctgatttttagaattttagcttttctgctctggtttctccccatctttggttttatctgcctttagtctttgatgatgctgacatac

SEQ ID NO: 46827 - DNA, 1032 bp, Homo sapiens
ctcctacctttagagccatacccttccctctgtccctcccttctgctcccctctcccctctctgtctccagtgttccttggaaaagagtcctgcagtcctttctagaggatatatacttggctaccccagtattctgggatttgagttacagaagagttaagctagcgggtccaaattcaagatgtgaacctttattttctatccctgttttcagtgtggtccataggcctctggtggaggtggtaggggtgggggtgttttgttttgtttttctccaaagaaaaatatccagttttccgtaggagtggaggtagggtatttattggctgctcagctttggggaagtgctctgggaggacctggttgcttctttaagtaggttttgaaccacttctactacatttaatttagcctttcaaagacccctgaattcccaagcctttcgtgtaccctacaacttaaatttagacgtttctcagcattcttccctgtcagttaaggattctactcattgatatgctttccagcttctaaaattttctaatgccgcctcctattatttttgtctttgctgctttatgtttttttaaacaaaaactcttttctcttctagaagttacagttttaggagtccaagaagctaaatatttatattcagtcatctctctttaactggaaaggaatttaagtttttaatggccttttttaattgttgtcattctgtttggtatcaactttaatattcctatctactatcttccgttatcaactttattcagatagtaaggtactaaataatgtatttgtgatcacctgtgtcagaacataaataagaataaaaataaacttttgatgaattagaaaaaactcttttttttttcctataaggtgcatatatatttgtaattatctttgggacttaaatgtttagactggaaataaaaatattagagctgaaaaagtgattgactcttttccaagtactttagagttagtacaaaatatattctcagtgtttattagtatgtaat

SEQ ID NO: 46828 - DNA, 1033 bp, Homo sapiens
aaagtgcttggaaccagaagtatttcagattttggaactttttggattttggaatatttgcaaatacattcttggggatgggactcaagtctaaacacagaattcccttatgttttatatataccttatgcacatagactgaagctaatgtaatgaatttgtaataattttgtacataaaacaaaattttgactgcagctcatcacatgaagtcaggtgtgggatttttttactgtggtgtcatatcagccctcaaaaagttgcagctattggagcatttcagatttttggattagggaggcttaacctgtatttttattttttacctattttcaagagtttctgtagaaaacagagatataaaacccctgtctttacataacaagtttttcttgctatagcccctctgcataccatcctttttaaattagtgactatgaggcttgtcgcttctcttctctcttgctccacagaggaagacattcttctgatcttgagtttcttgtagaattaaaaccgccatggttgcctaaaatagtggttcccaaactttcaccaccaaggaccccttctgatgtctttgcccacctccatagtttaaaataagttttcaccacacatttctataaataccaatcagtgcttctgaatggcatgcaagaaccagtgttgtccgtctcactaagttgatattttaaccacaaactaagaatctaagcattattagttaaaacttaggcagctttatcataggaaaacataaaagttctattaaacttttgaaattttgcaacaattcatgggctacccctgccccttcaccattttcttggcttgaagattgagaatcactaatctttaaaaatactatcatggagtctagttacagaatattaaaactgaatggttctggaggaatttatttgaaccttctcattttacagaggaagaaacttatatcccgagaaacgagacagcttggccaaggtaatatatacaaaaagccaagctataatgaagactctagtctcac

SEQ ID NO: 46829 - DNA, 1068 bp, Homo sapiens
gaaagagagatctgacttcgttcttctaacgtggctattcaattgtcagagcaccatttatggaaaggatttttttcccattgtcaaaaatcaactatagaggtatgggtttatttatagattcttaattgtattctaatgatctataatatcttcttatgccaataccacattgccttgatttctgttgctttgtaggaaattttgaaagcgagagtcctaagtttgttttttctaggttgttttggctattctaggtcccttgtatttccatatgaattgcaggatcagcttgtcaatttctatactaaaataaaggcagttgggattttcataagcgttgtattcatgacataaagcaaatgtggagaatattgccatattaagccttccagtccatgaacatgagatgtctttccatttattgggtttttaatgtcttttaacagtggattataatttttgctaagtctcatacttttgttagatttatttctaagtattgctactgtaaaaaaaatggaatttcctgtttttggattgtgtatataaatacaattgcttctgtatattgacattgcatcatgcaacatcaaactttttcttttttgtggattccttaggattttctacattgaaggtcatgttgtttgcaaccagagatagtttgaactcttccttttcaatctggatgccttttctttctttctcctgccaaacggtcctggctagagccactagtacaatgcttattaggtggcaatagtggatatccttgtcttctgatcttagggagaagctttctctcatcactaattatgatgctagctgtgggttttttattgataagctttatctggttgaggatgttgccttctgtatagtttgtcttttacaaaaatccaaatcccttccatgataaaaacactcaacaaacatacattgcatctactgaagtagtcatgtggtttttatcctttattctattaatatggtacattacactgattttcaaatgtttttgttttaagacagagttttgctctgtcacccatgctggaaggaagt

SEQ ID NO: 46830 - DNA, 1045 bp, Homo sapiens
tacttttaaaataaacttattttagaacagttttagatttgtagcaaaattgaagatagtagagagagttcccatatatcccacacctagttttccctcttaagatcttaagttagtgtggtgtatttgttgaaattaatgacccatattttcttagcttttacctcatgtcctctttttgttccagaatcccactaggatactatactgtgtgtagtttttaaatctcctttgacattgactgtgacaatttctcaggatttttttttttttttttcaattaccgtgaccattttgaggagctctggtcaggtattttgtaaaatctccccctgttaggattcatttgttttccttatttgtctgggtttgttttggggaggaagaccgcagaggtattttcatcacgtatatagggcacatactatcagtattctatttgctaagtataacttaggttttacatcaatgataacattaacactgatgtgaaccttaatcatctggctggggtagtgtttgtcaagtttctccactattaaactactcccacacctccttcctgtctttccatactgtactgttggagagaaagtcactgtacagtccacacttaaggagtgggaagttaatgtacttcactgccttgagggcagagtatctacaaaaaattatttaaaattactcaacatgggaggtgtatttattcagacatttacatcagtatgaactcatgatcaaattgttccacttttggcctttagaaactcgtttatttgatggctatgtccctttgacatacccccattattgtgggtgttttgtttttcttaagcattatcttactttctggcactacaacatgcttcaggtacatcttgtatatttcctgcttcagtcctagaatcaaccatttctccaaggttccctgtttcctttaattgtcaaaggatagaggccgggcgcagtggctcatgcctgtaatcccagcactttgggaggctgaggagggtggatcactacaggtcaggagtttgagatcagc

SEQ ID NO: 46831 - DNA, 1031 bp, Homo sapiens
cccagcactttgtgagactgaggcgggtggatcacctgaggtcaggagttcgagaccagcctggccaacatggcaaaaccccgtctctactaaaaattcaaaaattaaccaggagtggtggcacatgcctgtaatcccagctacttaggaggctgaggcaggagaatcacttgaacccaggaggtggaagtggcagtgagctgagatcacaccactgcactccagcctggctgacagagtaagactccatctcacaaaacaaaacaaaaaacttgaggcctgacatggtggctcatgccggtagtcccagtactttgggagtccaaggcagggggttgcttgaggccaggagttctaaaccagcgtcatgaacatagtaagaccctgcttctacaaaagaaaaacatattagctgggtgtggtggcacgtgtctgtagtaccagctactcaggcagctcaggctcggggatttcttgagcccaggagtttgaggctacagtgagctattatcgtgtcactgtactgcagcctaggtggcagagtgagaccttgtctcagaaaccaaaacaaaacttgggttaaaaaaatgtagagcaagagcttatgtttttatcaccctccccagtcccctactttcccagctagcaatgaacgtcttaataagactttaacaagaatagttttgctctgggaagtcaaatcatgagtgtatatcatttaagtgccattacaaatattcagtctcccattgcgaatatctagattataacagtaatacgtgactgaatagatacataacatatagtttattctagaaaaattgtatatagctccctcaaagtagatgattgtggttcttgaatgcgggctgaacacttacttgcctgacaacctgcaagccatgaagagatccacatctccaaggcctagtgggaatggggagacagttcatgctgatatagaaactaccctgtaggtatcgcagtacaggtgagaaaccaacatgaagtaataacacctgctatttaag

SEQ ID NO: 46832 - DNA, 1047 bp, Homo sapiens
agctctatattgagaagaaactggtgggaataggttccaaactaagtaggaccaggagaatagagacaaaggaaaaaggagtccggttagaaataggggaggagaatatagccaaaagatttcagtaagtaagcttccatgctgtctttttaaaattgtttttgaggtataacttacatacagtaatatgtacttacccttaagtgtatcttaaatacagtgaacattgacaaatggatatacgcatgtcaccactaatcaaaacacaatgttttcatcactcccaaaagttcccttgggtcccattacagttaccgctaccatctgtagcattggtcccagaccaccactgattggccttctatcagattagattttagtctccagaattttgactctttctccaagaaatgtgtactctagctgctagcaaaaagtgaagttagaccctttaaagggtttaggaaatttatcttatgaaaataagcgaaaggatcgatgttaaattctgtatgaagttagaagagagtgagaaaataaggaacagtataacatgcttacaaggaaaacattccagaaaagcattagtcaagtaaaggagagccaaggattttaagtcaagccaaactagcctttagtataacagctatagacaaattgtcattaacttccaaaactgggggaatattgttctcatgaacccttcctaaggaatcttcaggagaactaggttcagacaatcaagatgactgaagataatttgaaataaagagttgcgctaaacatttaaaatatttttacatttagaaacagaactaactgaacataaaggagaaagtatagtatgtactggctctatgacctgacacagttagctatattataactaaaacgtagaagggaaatatgcaaaaaatttaaagtgttttcagtaattgacagctggcaacaatgtcttgcgtgtaatgtgggataaagcaaaggagtatttgtaatattctaattttggtgtccttaagaactgggatttttctggttgggggaaaa

SEQ ID NO: 46833 - DNA, 1038 bp, Homo sapiens
ttctttcacatactctacctcaatagattttgacagttcttaatatttctccattctcacctcccagcccaaactaccatctcttccttgaacttctgtaacggatgtctaactagactctttgcttccatgtactatccgttctcccatagcagcagaatgagcttaaaaaggcctgaattagatcattcatctgtttgaaaccctctgatgtcttcctatttcacttagaataaaaaaaatctaagcccttaccatttatgacctggtccatatctactctctaacttcggttgcttatcactaacctgtttacttactaaccttggtctctacccacctttgtcttcctcaaagcataccatttctttttatgcctcaggacctttgcacttaactgtttctttgccaggaatgcttttcttaggttatctactgtaagaagcataccacttctagtcactcttgtcacatataaccctgatgtatttccacttaacactttctgaaattctttccgtatatgttctggctttccttcactactatgtacaaacatttttatcacaaacatttatccccagcacgaaaatagtgccttgcacataggaggttctgaacaaacctgttgaaggagtgaatcaatcccagagatgactttaggatggtataattagaagagtgttttgtattactctggaatatatctctacattcgtatcaaggtctttcgcttcacctgaaactccttaaccttaaatcttttctgcttctccaaatcatgttgtctggatatttaacctgtgcactaattttctcatcagagagataatacttgctttaaatcacagaatctttaatacagttagttataaagatgagcccatcagataaaatacagcttttctttaggacagtttatttttggaagccttcctgatttcccaactagaaaggactttacttcatagtatttagtgccttctcaaacataatttgctcaagatcagggactgaattatttaaatttttctctcc

SEQ ID NO: 46834 - DNA, 2186 bp, Homo sapiens
ttgaagtggtattatctataaagaacctacaagctagtattgataagttttaacattgaattgaataaaatataatatttaaatccataagaccttaccttgtttgtaacattctgttgattattttactacatatatagcatgagactaaccatatttggagatgttgaaaagtataatttaaagtgaaagtgttaggtcaagttatatgacttgaaagtatactacacacaagattgcatttaaattttgcattattttgggagatgcctcaagagaaaatgtcaactcataacatcctaatgaaatgttttgactctgaaataagaattgatgaaattatacttgggtttagctttcttaataaagaaaatcttctctgacaggaccgaggtgatgagttcacatacactggaagcggtggtaaaaatcttgctggtaacaaaagaattggtgcaccttcagctgatcaaacattaacaaacatgaacaggtactactatagacactgtttagaatttgaacattgaataaaagtttcattataggactgtaaattgtaacttacgttgcagaggagaatttcaaactgggagttaaagatctgaaattaaaattccagtgcctgattatgtaattgtttttcagcatcctaacatatctttatactgttattttttaaatgccataatttctagtcttactgaatacatgtgatatgcatttgaaaatgttaacaactttgaaggaaaggagcctgtgtaatttaagtgaaattgagaataaggtggcttgtctactactccattggtcaaagctaaaagtgacaaactcctttttagagtaaactcagtaatttgaaataaagttatgtttgggagccacatttatgtacataaatgaaacataaggtaacttaatcagatctgtactgaatgtacttttagaatgtctgctaatcagatatcttctaagagttgttaaagggaatgttcatttagttacaaaagtgatcttttctaactaaatccccttaagacattacaaaagagccaccgtgtgctgatctttattctatagaaatactaatgacatctcagctcccgtgggtacagaaaatttattaatttcaaaatgttttattttataaatgcatgctaataccaatattaataagtaacccagaccaccagatagcaaaaatcacattatagtttgtcctgctgaaatttttgtgaacatttcataaagttaacagtttttatatcctgttactaagggtattttgtcgattgagtaaaagtgagtgtttttcactttgagtctaaatcactcagttttaagtagtgtccccttaatttctgattactgtgtgatgtaaagaatataccagtatgatttcaagactttcatgcgtatcaatttacatagaatctctgtttttatgtgttctatattgtttctgatagtaggattatttttactgaaccagcagaggagacaggtcagatttgctggtgaaaacattcttgagacaggagcttagctattcttttctagcaagaaagcagtccttcaagaagagtgtcttaaaataaatattttgatgtgtttttgtcaatgaaaatgtatctcaaatttgcaaaaggactctttcaagttgtcaaatctgaaaattatttttccctttaataatcgataattttgcttgaaaggaacttccttcataactacccaccattgtaatgtacatgttaagattcctttcacacttttggacaatctgataagtaccgctacaatctcattagaaaataattgacaagcagtaaacatgttttctataaagaggagatagtgaaaatgaaatatcaactgaaaacaatttaggattgaattatcagagagactttaacatctggtcagtttatacgttaagttgtgaatacgccttgtgattgtaaaagtgcttgggcaaaggtacctgtatgtcttacaaacatgaaaactgaggtgaaaggcactttgctctgacccatagtatactctttgcccagtagtgtatggttgaattcatttttgcttctttgctaagaggtagttcgacaccttcttgcttctgagtttattcctatttcttcccagctcttcaaactttaagaaactgaagagggcagcaaagtaac

SEQ ID NO: 46835 - DNA, 1049 bp, Homo sapiens
atctaataagctcattgatttactactattaggtgaatgcatatactaaataagttccagctaagtcaggtactacttccaattcagtgttcttctttgaccatgcattaatgcattatcagtaaaatgtagtgatctcaagcagccagaagtcttcattgtcattagcacaggcatttggatgcttcaggcttattgaaatttatctttttatggagacctttaaagaacattctcatacaccacttattcttaatatcttttaaactttaaggattctctattgtctggaatgtggaaagtagacctgggaaggtcatttgtaccttgctgacaaatttatatttctggatttctttctacattattccagcaattcaccttacacccttaccaaagatcactattgaaaaaatcatttgctttagttttccaacgttctcccttcccccaacaaacgttatttaaagaaaaattccatgtatttctagttgttttctattatacgtggcacagatgttattactttcagaagaaccctacaggctatctgagaaccaatcccctggcttgggggtgacatcagaaaactgatttgtcttctctgctggtgggggaaagcataatcctattatctggaataatatggaaagaatcatagaatcttaaccatcaggtaaggtataattcaccttttaattgagctaatgactcgattgtgtacttgaagaaaaattacatggtataaagacttctttgttgttttttagggcattggccctaaactgtgatgctccattggatgataaaattggagcagagtctcggaattggagagctggtaagccagtcagagtgatacgcagttttaaagggaggaagatcagcaaatatgctcctgaagaaggcaacagatatgatggcatttataaggtgctctatctggcatgacatcttgtttgtcattcttcctgggctttcaaggcagggttgttgcaaggaactactgtgggtgggctcgaggaaacagtagccatcttatattgcta

SEQ ID NO: 46836 - DNA, 1050 bp, Homo sapiens
ttccttaaactttaaggaaatctaatcacaactcctgaagacttacctttcttagatctgaaacttaagatcagtgtattataaaatggaatctcttagcagtcacagctacataaattgggattttaatagttgtctgtgctttgaattcttttcctttaaatgtctgtttcttttatgtaaagtttttcagtttggggaacgtgtagtcttcccctcccttttaatttctcaccaggatctaaaccccccttctctgtgaagcttaaatctgcattgtactctccctcctccccccccatcagtatccagcaggttacccttcagataaagaagggaagaagcctaaaggacagtcaaagaagcagcccagtggaaccacaaaaaggccaatttcagatggtaggtaatgattgcaaaatataaataataataacatacttttgttgttgttgttgttgagacggggtctcactcttgtcacccaggctggagtgcagtggaaagatcttggctcactgtagccttgacctcctgggctcaagcgatccacctacctcaacctctgaagtagcccacggctgtacaccaccacacctggctaatttttgtatcttttgtaaagatggggtttctccatgttgcccaagctggtcttgaactcctgggctgaagggatcctcctgcctcagcctcctaaagtgctgggattacaggcagaagccactgcatccagccaacatactttttaataaagagaaatattaagaaaataaattgagacttaaatgaaagcaaaggatttggctgggggggcatggtagaagatggatcttttgtttaatagtgtcagagccaaatagcaggaaataacagtatcctaaattttaggggaaattagatgctgttttatgttggttatctttctgctaaacattacttgtgccagttaactcttttgtttcatagttctgcttagaaccacttgtaagtctgctgatacatttttaaaataaatctagatgactgtccaagtgcctccaaagtgta

SEQ ID NO: 46837 - DNA, 1049 bp, Homo sapiens
aggcgtaagcagagtctgactttgttaggtcacactcattttcacttataggaaattaagatacaggaagcagttgttaatcagcctaattattctctgattgggaaagatagggcttgttagtgataactgaggtgagtttccactgtaggtgggagagaagcaattacagatggaggaaaaagccacctgagtggtgtgaaagttgtcttccctatgggtagtgtcccactgggacagattctgaccttcctaggtcatattattgtgaccttgctgctagtgattactttggatgttatgtactattgccctggacaagtttcatgcccattctcttcagataagccaggaacacatttattaagccagaaaaaaacaggtgttagccaacagtgactttaaataaatacatatgtgtatatatatttatgtccaaactccttccaaaggccctgtgatcagcagccctacctacatctgtagtctcctcttaaactggtactcttgtgcccagattgcttgactgcagtggtcactgttttatttaaacatgctcgacgtcttgatacccctgggcctttacatacatactgttactctgactggaattctcttttcatgtgtctcactctttcatatcctttaagtctgtataaatagattcctcagagagatcttcccaaactaccctttctaaaatggcaactctttaaaatttagtttaaaaagtccaaacagatggggttactatgttgcccagactgatctcaaacacctgggctcaggcaatcctcccgcttcagcctcctaagtagctgggtttataggcatgagtcagtttgctctgtttcatcagttattactatctgaaacagtttttgtttgtttactctgctgtaggaacgtaagttccaggagagcacagactgcctttttattaccactgtagatgagtgcctagcacattgtagctacctgtaactcaaaatacctgtattagatatacccgtattataggaactgtggaagtaccaggttaaatattg

SEQ ID NO: 46838 - DNA, 1021 bp, Homo sapiens
ctaacaaatgggagggttttggccaccataatggaaacagggctgtccgtgaagagtgggtccagggtgtaggaagctgactagctccagaaaggtgagcttgggggttggtgggagcatcgaaggggaaggacagagcaggccagttgctcctgtgtggtggaggtcagaggtcaggttgagggatctgagctccagagctatctccaggggttgggtgaggggaagtgagttagcatacagtgttcaagcaggctgtttgggaaaggattcaaccacacagatccaaccaaaccttgagggtcacctatacttgagcgagagcaaagctccttaaggaagcaaagaagtcttgagagagaggaggcagggcagcatagagtcctggagaccaaagaggagaaaatgtcataaatggggtggggacactgtgaccagacaacccggtgaggtcagagggaagggaaacaggaaaagactgcatggaatgtgtgcgcaggagatccctgtgacctctgaggtaacaattaaccccaggtcagcccatttgtgcaaggctacagagtgaatgacaaggaaggaatgcacccgattccaatcactgcttatgatggccagtgattaaagatgggaggaaatcccacagtggctcaagggaacaggaacaagttttcagaatggtcagactttgccccccttgtggcattgggcaaaacacttaagtgggtcacctcactgaggcctttcccttccacatggagtttcctggctttgctggccatggtggtgtaatccagcactgcctggacagagctttacaccaacaggtatcagagtcaattccaaagttcactcagtgaccagcttgtgaaaagagcaaataaaccatgggtgttttatctcaaatgccattatctctgcaaaaatgacctctggaatagcacatagaacatcctctatgcattttagaaagtgagtgcattggatataaagacactgcaatggccaggcacagtggctg

SEQ ID NO: 46839 - DNA, 1032 bp, Homo sapiens
tagttttagttcctttttttgcttcactccattgtagcttaggaagctagtttcaattccggattctaccgtctatctgtatgactgggcctttggtcagtctttctaaaatgaagattgctcattttacaaatgagtaaaaactacctgacatgtagtgcaggctttgtaaagcactcatcatgctgcttgtcatactgtaagcactgatatggcataggaaacccaacccccaaacatagcaccttggaagttgagaaaacagcatatactggaaggccactgtcacatctccctcacccgtctctgaagcaggccataaagcctaggaaggtcatcctcttatctctcttgaaaaccctcatgtggcaggtgtcctgccctatatcagggtggaaggaatgtcacacagggacaccaagaataatctgaacaaacaggtcttgctaatctcatgcccccaatttattaccgtgagatcatacccgctttgttcaatcatacttctgcacaactatccactttctcaaacctatgcataaaagtacacagacttttctttgggtcatttccttaggaagactccccatcatgtaaaacttatattacacaaatttgtatgcttttctcttgttaatctgtattttgttataggagtctcagccatgaaccttaccatggttaaggaaaacttgctttttcttctctacacactcaaataaattagtttgcctccttttccatgcttacccaatataaaatagtaaaatgcctctttttttttttttttttttttttttctgagagggagtctcgctctgttgcccaggctggagtgcagtggcgcgatctcggctcactgcaacctccgcctcccaggttcaagcaattctccagcctcagcctcctgagtagctcggattataggtgcctgccaccacgcgtggctaatttttgtatttttagtagagaaagggtttcgccataatggtcaggctggtctcgaattcctgacctgaggtgatccaccca

SEQ ID NO: 46840 - DNA, 1124 bp, Homo sapiens
aatgatgagtcatcaaagcctttgtgctaatgacttctttttttatatctccatccagttccaggtattaatttggcatctctacttgttaagtataacaaatgtaactctgatctttcctctcagctctgcttctctggaatttctcctgcatctcatctcatttcattgctcactcatttcattatgagttatccaacacttcatggttcctcagccctcacatccaaagtatcacttaacaccttgtaacttctgcttcaggaataatattgtggggatcaatccgcttgtctccacctccaatgcattatcctaccattcactcccatcctccctccaatctctttccagcatgatctttaaggcctattgccttattggattgttctcataggcctcaggatatttaaaattcctgccatatctctttctaccccaagctccacccatgtcttatctagatggtttttcatgttctctctacctattggcttttcttttcttcaaactgtatacaaccttcctgaatgtgctgttttttgcctgactgatttctcctctcattttcccccttttcatacatctttctgatctctacttgaaagtacttcttcagagaaacctgacctgttactcatttctcttctctgattaaatcagcttccctaatgatgagctgtcttaattccctgtatttttccctaacacttagtggtttataattgtatatttttgtgattatttgattgtttctacactgtaaagattctacaagggcagagaccaagtatttttatttccttctattctatatagcacactgttccctcactagcactatagtataggtgctcaacgaacatttattgtgcaaattaatgacttttacatatatgcaaaaatgaaggaactgtaaaaccaggacacgcattgggaaatacatcttacccatcgtgacccaacacacataaatatataaaattgaaacaaaagtttcacaaaactttatcaactatgctgtactctattttctttttcttttttttgcagggggatggagtctttctctgtcacccaggctggagtgcagtggtgtgatctcggctcactgcaaccttcac

SEQ ID NO: 46841 - DNA, 1004 bp, Homo sapiens
ggttagtttaaggctttctgagattcatccatatttattttctttttttgagatggagtctctctctgttgcccaggtcagagtgcaagtgcagtggcacaatcttgtctcactgcaacctctgcctcctggactccagcaagtcttctgtctcagcctcccgagtagctgggattacaggcatatgccactatacccagcgaatttttgtatttttagtagagatggggtttcaccatgttggccaggctggtcttgaactcctcacctcaagtgatcagcctgcctcggcctcccaaagtgctgggattacagacgtgagccatcctgcttggtgattcatccatattcctgggagtagctatgatttgttaattttcactgctgtgtagttccatcgggtgaatatattgtgattcatttccttattttcttgtagattgatttttgagttttcagtttttagttcttatgaaaatgctgtaatgaacattattgtacatgtctattgttgaacttacgctagaatttcttgaggccctagcaaatggtttttttttgagatggagtttcgttcttattgcccaggctggagcgcagtggcacaatctcggctcactgcaacctccaccacgcaggttcaagcaattcttctgcctcagcctccggagtagctgggattacagacattggccaccacgcctggctaattttgcatttttagtagagacggggtttctccatgttggtcaggctggtctcgaactcctgacctcaggtgatccgcctgcctcggcctcccaaagtgttgggattacagcatgagccactgcgcccagcgacaaatggtttttaaacagttgcactgctgatgttttggtgcttggtaattccttgttgtggggacttttttatgtttaacagcatctacccattagatgcaacttgaactcttcctcttgtgacaaaaatgtctccaggcattgccaatgtctcaaggatac

SEQ ID NO: 46842 - DNA, 1035 bp, Homo sapiens
caataaattttgctattgaataacatcatattgctttattgcaaatattcatcttttttttttttttttacacatttgtcatagagatactgagaaattcttcagttgtagtttatcagaatacttaaaagctaaattacttggagtattttcaagatgatattttatttcattattttatttttaggtgattcctcctaaggagtggaagccaagacagtgctatgatgacattgataatttgctcattccagcaccaattcagcagatggtcacagggcagtcaggactgttcactcagtacaacatccagaaaaaagcgatgactgtgaaggagttcaggcagctggccaacagtggcaagtgagtagaatcagtttgctatttctgtttccttcaaagatttatgtaaatatgttaagaaacaaagtagacagaggagcttataaatgaaaagcaggagtctcccatgcaatttttcacccttcattgaactgtttctgttttctgttctttaggtggttgctgaacatttgacttaaagaaattgctctttattttattatctcgttcctagcagttataagtggaacttcttatcctatagttgccatgagttttcgtttctacacatgattcatgtttgttgggcagtttttttggtgtgtgtttgataatgtttaagccttaaatgatttatatgtattagaagattagtacttttaaaagcaaaccttgaatgacttgaaaggccaccattgcattagttatttattgctgtgtaacaaattatcccaaattggccaggcatggtggctcatgcctgtaatcccagtactttgggaggccaacgtgggcggatcacctgaggtcgggagttcaagaccagtctgatcaacatggagaaaccttgtctccactaaaactacaaaattaaccatgcgtggtggcacgtgcctgtaatcccagctactcaggaggctgaggcaggagaattgcttgaacctgggagacagaggttgcagtgagccgaga

SEQ ID NO: 46843 - DNA, 1032 bp, Homo sapiens
ttacacctgtgtgcaaaaatcgtggtccaattgtgagttgtttcagaaaacagatgcaggatacgtaaaggaatggggcaggacaggctccaactgggtaattggcatgaaaggagaaaggggccggggcacgtagactcccaggcttaggactccagttagtccattggaagtcaggtgagttatgaatattgctcatgtgcctgctgaacatgtgtgggagagttttgttcgagggagacagaatccaggaggagacttttgtctgtgaacttgggctggtgtgcagcctttctgctgaaacctgatggaattaagttttaaacagttcggcagattctaacttgtcattgtggggcttgtgtgtagctggggtttggagactgcttttacactaaatcattcctgtcacctgctctcaagtgaagcagtctgcagtgtaagccttgctggtatttgtgtagagtggcactgcctctggtgggaagaatgcagcagcttcacgtgtttgctgctcctgaacctcagatctttgttgacaatgatgctgagagaagaggatgatatgttgtgttttgaaaggatcaggactagaagcataaacctttaaaagggaaggtccaggagtcagatagatttaggttaatcattaccatctacttctagctaggagtgttaattttttcatttgttcatttgggaataacattacctattttataggattgtttagaataaatgtaagatacaagtgtgtatagtgtaatgaggtagtatattgtataacacttcactttaatgataactaggtgcatttttggtctaagtatatgagacagacctggtactgttcagaagagcctttgtggagcctgtttttggagtcagatagctagtttaatagtagagaacaaaaattggagaaagaattttgaaacaataagatttatctctgttggttattcttaatatttgcacaactgcttaattgaaattatatgactttttattttagcaaaataaattactttt

SEQ ID NO: 46844 - DNA, 1028 bp, Homo sapiens
aggctctgaatgtgaacatacagcatttgctaaatactttggcaatatgtgtcaaggagaaacattgcttcagtggccaaatcctatgagtatttttatattactttgcagcaactgaaagaatttaaagatataaggggtctatcctattgggtgctgctgggttagaaacattttaagatcagataatccaaaacaaatatattatattattccatttgaaggagtgagcaataagttttataatttttgtatcggatagatacttttttaaaaaagaaacaacactacatttttcttcactttttctgtagaccatgggatattttgtgttgctttggtgattgtaaaaaaaaagtctttaatctaaaaaatagaaacagggtaaatacatttaaaattcttttttaaaggctcaggcttatttatgcgagttattttaattatacttaaaaatgcactcactctaacatacatatatttgaataattcttttaacagaagttttactgtgaaatggactgtgcttaattgaatgttttctaggtgctaggaaaaaataatttgatgaatatcaccaactctttaccaacaagaattcatgatatagcctgccaagcatgtattatcaaagtttctgtagctgtagctttaacaatgtcagttattatatgatttttatatgtaactccagtaatgcaagttattaaaatataagaatatatagcttgatagctaatatgaacaaatttacttgaataacctgaagataccttcaattaaaatgtaatagctttgagtatggattgtttgatttaattcaagtgccagcaagccacatcctatttaggaaagtcttttaaacgtttcctgaaaaagcactattaaaggattaagtaatgaatctggtggaactctttttggtagtgctctgatatcaagactttttttctttgttttttaatgggaaatatattttaattgtattcataatttaggaagtcttatttttacaaaatattatatgt

SEQ ID NO: 46845 - DNA, 1063 bp, Homo sapiens
aatgagagtaaactcctggagtagtgactgacacatggcatgtaataaacatttttctttctacgaggtattgatatttattaacctcttaaaagcaatttggactccctttgtctcttattgtcctgtgacagttaccatgagtgcattctcccatttttgtttaccagatctgccccaggaactttttaaaaaattgatttctttcttttgaaaataaaacaaatatgtgaaacatactgaaaatgctaaaacctacatgagagtattagaaagtaaagaatgtaattctataatcagctacatatggataggcagagagaggggtctgcttcttgtccagctgtagctctgtgctagtggaagcatgtcctggagttcacgatgtggccaagagaacagatgtagttaggcaatggaggtgggacagagagctgcaaagtgctgcacttgcccctcttactggacccaaaaggctctcaagtgtaacacctttctgtagtgctgtagatcattaatctgggtgtgtgatgaccatctgatctagcacatccagtggcattgtgcatattgggataggaatttgattttgtgaactcaagctattcagcagggcccatgaaaaatcaccagaagggtaggtgggtctttgccactgtctgatgtttcaaagatttcttgtattaaatgctgtgtccaaaattatagaatactctccagtttgtatttatgtaaaaaaaaaataaaaataagctttcactcgtatttttaacatggcagactttgtaaaaacatttaatgaaacaagtaaatatatacacttattttgaagtctttagtattttagagtatatttgacagcaaaagagggtgaggaaaaacaaatttggatttctgtcccgctaaaaaattcttaaaaaaatatttaatgttaaatatattagaagaaaatataggggagtatttatttgatccttgagtggagcaagacttttgaagcggcacatcattggtggacaccatgaaagaagatttcacgtatatctttgaaaattgcaagctg

SEQ ID NO: 46846 - DNA, 1046 bp, Homo sapiens
gaaatgagtgggccatttaaatggccctctaaaggtcacagtgactgtcagaagaagtaagaagagagtataattcttcagctcctggacttccataggaaagcttgaaatcttatacccagattaccaaaaaaaaaaaaagacaccaaaaaacaaacaaaacgtttgtaagaattaggactataagatatgatatccaaaaaaaagttgaactaccacatgttaaataatttaatgtttggtgtgacaaatattaacaaatgttaacattttaatatttttttctgattataaaagtaatagatatttgtcaaaattctacaccaccttttaaaatcacctttgtttctgtgttattaccagtgcagtgcccctcagaaggagtagtcactgctcttgaggctgcctccacaggcctatgtcttggcttctctagtccataagtgcttccttaaagatttaacgttacccacatcagtcccaaagggtttttgagagaacagcagggaagggcagcaggattatttcatccacattcagggtgttatatctagaaatatcataattgcaagtaaagatggtgaagcttgtcgctttcctcacagtgctgtgcttcatcttgatagtgcatatcacatttctcatggaacatttccttccttaagcagtcggtacctttaaaagagcatgtcttaactgaatgtcattatcaccaaaagtctattcaaatgataacatagagctatggttacagatgtaaactgagatctgtgaaatatttttggatgaaaatagcagcctcttgaccagattatttttcatataatgttatatttatggaaagtttcttagaatgatcctcatcaaaatgcttgtagtagttatctttagtggaataataatacgaggagcaacttcatttggggggaagaatgtctaagtttgtaatagtttgacaggggcaatgactgaaagtctggattctttttcaccaagagtcctcaggaaggaatcatcacccttgtgagtccactgcagtccagtgt

SEQ ID NO: 46847 - DNA, 1053 bp, Homo sapiens
aaagcagagtagttttgtgtggtatttcatccaggcaaaagtaagtccaggtaagctattttattctgcctatttcataaatatatatgtgtctgccagtgtcagtttcaatatttttttctggagctgtgggcattccttttctgaactctagactgtccattctgccttcctcttcatacaactggaaaataataagaattatttagatgtcataatcaatttatttcaccaaacaattatcacttgtcttgccatgtagtatacatttttgaatcagacacagtttttgttctgtcaaccttggcattactgacattttagagcagataattcttcgttgtggaggactgtcatgtgcatcataggattccagcagccttcaccaaacaggcattgccagctatcccctgggaggcaaaatcaccctcatttaagaatccacgggtctacagcgaagatatagacagaaagagaacattttcaatatttgtcatttttagagaatatcttggttggaagaactgaattcaagactgacagaacagaaattgttaaatgtttttaaaaacaaacctggatttttttcttttttcaaatccaaatttcttttttgttagcaaagcaataaagtctggtaacatgtgcatatcagctactatatacttattaattatataatctcatttaacaatttaacattacctgttcttatggaaattgaacaaccaaattgaatactaatcaagtttcacctaagattaaaattctgtgatgtatgtgtatatgcacatagtagtcactgagtaaatatttatgaaatgaataaaaggcagcaaatcattattcattatttgcacgtcaggcttataatgactgtggctggaggagtgcgatcagacaataacaaatggcctttgcctttccacggtttctcctttaaatgtaacagatctaattcacacacatgtctgcatattgctctaaagcaaggcattactttacttatctgcatcacaggagacatatgattaaattgtagagcccagcagt

SEQ ID NO: 46848 - DNA, 1026 bp, Homo sapiens
cctattgctcctagccttcatggggctgctacagcatgctattgtactgagtatggtaggcagttataacacaatgctaagtacttgtatatctaaacatagaaaagatatagccaaaattaggtattacaatcttatgggaccaccatgggatatgccatttgtcattgactgaaacgtcccatgtagcacatgactgatgtgtgtgtgtgtgtgtgtgtgtgtgtgtgtgtgtgtcaaggtgattgcattgtttaaacagtaaaattgttggatagattatgttccttccctatcatcacttctttcaaaggtaagatagaagaggttgtgtccactgtaactctgtgagaatttgatttgaattcctcaacggggatttttcatttgggcaaagatcctatgagtaaaaacattatatagagagaggacaaaaaagctatggagaattatagtgtgcagggcagagttactcaaattatcatctttggatccttgtaatcaaatgctgagggcagtcaaggctctgggtaacctagtgtttgctgtcttagaacattttagtgaaaataaggaatttaatggcgttagtttcttgcttctaactgtgctggggagcttaggaagaaaagatcatgagctctgggcttctaacttaacacaggtgttgacgacctgtgccactactcagctgaagctttcggagccactacatggtgccaccatctctctttgttttcccatttgtgagaatggcatagttcatataggggctgctctctcagcctgggtcctagcttaagcaagacctggagcagagccacaaccaagattcaacatgagcaagacaaacgttttgttagccactgtggtgttagagatgattgttactggaacatgaatgatagatagtctattatgaagtgcttttagaaaatgcccacatagtgccctagaatagggtccattatgttaataggccttctccttaataactttcaaagcattgattatggctttgtgtag

SEQ ID NO: 46849 - DNA, 1040 bp, Homo sapiens
gagttaccactgagtgataccctgtgtcgcttgcttctctcatttgaaagtgtcccatcagacgtcatttaaaggaaatattaccttattgttgagtaaatgctttccttctcattttattctctccaaattgtaattcctccaactttgttattttattttcaacattgctttgagtattttcggttcttcacatttttgtatacattttagaatcatcttgttaatttctacacacacacacacacacacacacacacacacacacacacactgctgttaatgattgagattgtgggaatatattgctcttcctaaattatattgttggcacccaagaagcctgaagaactcctgaaataaaaaagcccaaggcagagcttctagggtctagcatctgggaactcactgattctctagcaacagtaatgaaattggatgtgactgtaggcgaagctcatgccaggttttagcttagcagtggcccactaccagctccacctgtctaactaatgtgaactctcatctctgttctttatgaattaaattgcttactctttagaatacgtagcaagcaggtggtatgttcctgttgagaggtttacacattaacacagtgaggcaaagattctgctatagctaaagatggttctctcttcccagttctcttcacttaccaaacagggccactacctccgaggtgagctcatgattcagatggaaaaaaattagttttttctcagcatctaatgcagcctgttgtttgtgcttctacagacattaaagtgaataagaccttaaatctgctgggaaactgcttaccaccatttcccactgtattatatgtttgtaattaaaaacccatgagaaataaaagtacacgtgaacatacacacatgtggaaaattaaatacttgtgacgttttgatgagtcatatgtgtatttgtgctgtaagaacaagtatttcttcatgaagccccagggatttaggtttttctgggcagaggatttttacctagctcttgtaatttacaaagaa

SEQ ID NO: 46850 - DNA, 1037 bp, Homo sapiens
gccctgacccctgctccccgggccatttctctagtttctcctactttgcacaccatagcaagacctcttgcattccccacaacagaatggctgtttcctgcttctgggcctttggtcatgcctgtcactctgtctgtccttgattgtgttcttcccctaattctgactgctgcaagcccaggaatgaggagtcctgctgtagatggcatgctagaatgtgttccatcagtcttctctcacgccacctgtgagatggcttcatggcacatacctgtgtaggcctgttccaggaaacagtaatatagccttagtggttttgtgtatttgactctccaacatcagatgtggtgcccactggctagctacaaatgactgttgaggaaattagtgaatgaatgactctctgggaatgtctttgtttggtttctagaagaaaaagataagcataacactctgtacactacaaggtgttttagcttttttgaaattcacgggggaaacaaaagcaaagcctctgattgactagtgattctggatgatgataaactgtatttcccaggagtgttctaaatatccatgcaagaaaagactggggtttaatgagtccctgctttctgtaggtacagatgacatgtcaggctaattttggtcccttggggattatgaaggcctggaccttcccatgagcttggttcagggccttcccagcaggtcagagctcatgacatcaaacaaatcagagttgatacctgagcttttgaggctggtataaagaagatccagtcttgagagcagactttggcattagatgttggctgcagtctcttcctagtaggtacaggctttgtaggagttcctgaaaggggaacggggactatagccttatcttgaaaatcaaaacaaacaacccaaatgacaacaaactaacatttctagagcacttaatatgtgccaatcactctgcagagtatttctgagagaagtcatttattcttaagtcttgtttccttagcatgatgtatataccctgaggccta

SEQ ID NO: 46851 - DNA, 1095 bp, Homo sapiens
aaagagcaccatcaaactgggaatcttgtaaactatcactgtgccccagatgttacaaaaatgagcaagaggaaataaaatctaacgagagcttgttgcagataatcaggaaataactgtttatacagatcaactttggagactacctgttccactcggaaacaggtaaagcctgttaagtctagccggtcgtggtggcgggcgcctgtagtcccagctacttgggaggctgaggcaggagaatggcgtgaacctgggaggcggagcttgcagtgagccgagatcacgccactgcactccagcctgggcgacacagcgagactctgtctcaaaaaaaaaaaaaaagagaaagcctataagtctgtactccaaacagaattgaatatactcaaataagcatttgagggtataaaaatgtttaccttggcttagaatttttaaaactattaataagaatggaaatgatgactaaaggagaaatgaaaaaagagttgatgaaacaaagggaagaaatggaagaaaaagacaattacctcataagtgaataaattgtaagatacctaagggaaaatagactgaaatgaaagcaagaggcaatgaagaaaggcataaaaacaacgaagagaattgaaaatgacaaagaaaaaagtaagatgaatccgagaaagtagggaatggtaggtagataggcaaagacataatattcatattatcagagtccctgaagaagaaaaagaaatggaacataattcatgtttaaaaacataatccagcaaaagtttccagaaattgaaaaaaaaactaaatctagaaagggttccctaggtacctggaaaaattaacccagacttattgacttttgggatatattttagtacaactattagatttcagagataaagatgaaatcatcaagtcttctgtgcaaaaagaacatataacttacaaaggcaaacttacaaaaagcatcacatgttgaaaaactgacatacaaagcaaggcaacatagagcagtgtttttttttaaagctcaatgaaggtgtgaattgaaggattttatatctaactgaatgttctcaaatgtcaaggttatag

SEQ ID NO: 46852 - DNA, 1081 bp, Homo sapiens
cttattctgaggaaaaaaaaaaaaaccaaaactttttaaacttattttttgacatagggtcttactgtgtcacccaggctggagtacagtggcgtgatcttggctcactggagccctgacctccctaggctcaggtgatcctcccacctcagcctaccgagtagctgagacatggtggcacaggccaccatggcgggctaatttttttatttcttgtagatacagggtttcactatgttgcgcagaatagtctcgaactcctgacctcaagtgatccatccgccttggcctcccagagtgctgcgattacaggcatgaaccacagcgcccagcaaaataaactttctttattttcaggtctagaccatcagatagatttattcaaatattttctgggaacctttatgggtagaacatttaatactgtttagaagacttttaggaatactatagatttcaaatgcatcatttaaaataaataaattccactttctctctcctaggttgtatttaaatttgactgaatatctggatggctaagaacagacatttatcttacacatggaaaactgacgaaacctataagcctatgtgtttgacagtgaagtatgttttatggacttaaatgccacaaacagttaagtccattggcttggagatgacaagcacgagtttctggtatgtctagtgttctcattcactgattcagtcagtacacagataatcagtatagagaacttaagaggctggcttatgttatacctaaatttttactttcttgtatacaacaatgctaaaattgagcagattgataactgccagcaaaccatagatttaagataaatgaatgatttacccaaccctaaaattccatgggtaaaaattttgattcctttattttcaatactgcgttccttataggtcttacatgcatatgcaaggatattttatcttattcattcatttcatactctcaaaacaccaaacttcaaaaagttaattattgtcataatgcattattccatgtgtggtgtcaatacattttagcggacaaagaagaaacatgccagttaaaacattt

SEQ ID NO: 46853 - DNA, 1084 bp, Homo sapiens
gaagtatcctacttgctgagaagtgccaaatgaccctaatattcaaaatatcttagaaatgctatcctttagttaacatacccttaaattttgtaacattgattttaccctggatttagtccatacacgtcaatgtacagacttatcaaagtacaatgctggaacaactagtgtttgtatttttggaatctagaaaataaaaacaatatagccatgatttcaaataggtgagtttccttatataacatttattcatatttattgtataagcatcatgattttttcttccaattaagttttagtgacttcctaaagacatttttaacaacattcctcaaaaataaacttacttagttttcagttttagttactagtgcctgcctataaaaggaccttaaatgatttaaccctaaagccagattcattcctatatatacccagtcagttgtctgcaaagaagtcctaagacttcactgaatgcccagccacaaaactaaattaccttcaaaaattaatgttttatagtttgtagaattctcagttccatgtcagttgcttaattagttgtcataccaaaaaaaaccatacagagcacacattgttccaaagaagctggataatgtagcacaatgtagactgtgagattaaaattaacttttgataaaaagggagtgagtacttgtatagaagtaacattttatctaccataaaaatgtgtaacttctacaaaacccacaaacagtgaaaagacagtctggtaaatccaaggtttgtaaaaactatgcacaaaacccacagtatttgggaaaagaggcaaggtttatacaagtagcagttttaaaaatgtaactttgttctactatcaattacacattaacatacacacactaattgaaaatatgctacaaccatgtctggaaaagcagtttaacattttctaaatggattttatcccacatttactgtataatgtagctgttaatactgcacaagtacacttagcgataatgtttactttactttaaaacaaagggattttctccctcaaaacaagttttcaacatcaaacctatgcttataaaaa

SEQ ID NO: 46854 - DNA, 1052 bp, Homo sapiens
gattttaaaggttaattttttgatcctttagagaggctgaaaatatttttaaaaagaatgttaagacatataaaaataagaataataagacatatattagcacctagataatactgttttaaatacgggactcaactggaaatgaattaggaaattttttttgaattggtaaaaattgagaattttttgaaagcgatacagcatgtctttaaaaaggaatgaaagaagacagtcccaaagtaaaatgtcctgtaaggagtttcgagaaactaagtatacctgggcaatatgcagagagttccaagtggagcaaaaagagaaattggcagaggagaaggaagggttggtgaaatgtcttgaagcttctcattctgaatatgaatttaatgtgtgtagtaggaagctactataggttgctcagcaagaagggggtaaaaatgattatttaaccagttcttgatgtttcaaggtagatgttagtagaaagaggctgggggtaactggagtactcatgaaatgacgcatttctcagtgagaatggtgactaagaaaagggaaggaagagcacaactaagtaattacacaaaggaatgattgtcaggtgttggctataaattatgcataggaaaaggtggaaaaagatgtattgaagaaaagctcaagatacagagtaagagagaccaaagcagcatccagcaatcatttttttgtgtgtatgcactttatttgttctaaaccctgtaaggccttgctacttcaagtgtggtccaaggcccagcagcaagggctttacctgggagctcaggtaaagctcagaccttccccaggccttctaaatcataatctgcgttttaacaggatccctaggtgattcttacgcatattcaagtttgagaaactgctttagaggatacctcagactgtaaaaacttcaaactaagaaaaacagatatataacaagttataattaacgttaaagataactttttattagtactaatggtaggattaacaggtaaagagggggtagttagtgttagaggggacctcag

SEQ ID NO: 46855 - DNA, 1035 bp, Homo sapiens
aaaatataaaagactttatacaattaatgtcaggcgggtttaacattagaaaatcaatcaatataattctaactcaatgtagtcagttaattaatgtaatataacttttcttcatatagaatttctaagtatctctactcttgagtagaattcctaaacatctctactattttaggaaaacatctttttccgtgaaaacatgtttgtgtgtttgtatgtgtctatatctgtgtgtgtatttatattcatatccaagaatacaatagaaattatcatataatattaagtgactaccagacctctgcattgaaaatgtgattgttaggtcagaattttatctaaatcttgaaatactcttaaataaaagccatttggcaagtaatattaaatatagatcaactatcatagcagtaatatagtaatatatcaccaaaataaacatcataagctctaactgattggcctttgattttccaggttcttttttttaaaaaaggattaaatttaaacttggtggaatagtgggcatactctttgtttattgcaatgggatttaagtgattatgtgttgtgtttctacatgatttgtcagtaaaatgggaatcacgtgtgattttttttttttttttcttcagacagggtctcactctgtcacccaggctggagtgcagtggcatgatctcagcttgctgcagcctctgcctcctaggcacaagtgatcctcccacctcagccctccaagtactgggaccacaggcatgcgccacaacgccagctaatttttgtttatttatttattattttgagatggagtctcgctctgtcgcccaggctggagtgcagttgtgtgatcttggctcactgtaacctccacctcctgggttcaagcgattctcttgcctcagcctcccgaatagctgggattacaggtgtgtgccaccacacctggctaattttttgtacttttagtagagacaagtttccaccatgttggccaggttggtctcgaactcctgatctcaagtgatctgcccc

SEQ ID NO: 46856 - DNA, 1095 bp, Homo sapiens
atttgaatataagcatagaccagatatggtggctgacacctataatcccagcactttgagaatctgaaacgggaggaccattgagcccaggagtttgagaccagcctgagcaacaaacgtagtgagactcccatatctacaaaaaaatttaaaaaaaatgagctgtgcgtggtgacgtgtgcctgtagttctagctacttgggaggctgagatgggaggatcacttgagtctgggaggttgaggctgcagtgagccatgattacaccagtgcatgctagcctggggcacaaagtgagaccctgtctcaaaaaaaaagataaatgcaaccacaatccagcatttaaaaaacaaaacaaaatcctgacacttttactgtgtgaatgaagagtggaatcttcattaataaaactgaaacaatttgttaggaaaaaaaacttgtcaactgtaaaacaagttaataatgtaattattaaatttaagctaactttctactggctatattatttgtaagactattagccagacatctctgtagaatgatgtgaaaattataatattaataattacaaatgtaatagtaattttcaggtagatgaacattagcttctttttaagcctgatgagtgagtaaatctcttttttgctctttgaaaaattttacactattcaatcttttctgcctaatttgaccctaattttgatctcatattgtaatagtgtggaaatattagctcatattttagttaagattgagctctatacttgaaagagaattatttttgaactaggaatttaattgaaccttgatattaagctcactccaagtatgcagtttatctggctttctatagatatattcctgtaaatttttataccttgatattaatggggacttcagtcagctggcataatagaaacaacataaattttggaggcatattgatctgggttttaatcccagaccctatctcattttagttgtgtgactttagtgatattcttcctctggatccatttgctcatgtgtaaaatggtgctaacaatcttggtcatgcagggtttttgatgatcattaaagataatatatgtatcgg

SEQ ID NO: 46857 - DNA, 1020 bp, Homo sapiens
aaacattggagtgcagctatctctttgacctactgattccatttcctttggatatatacccagtagtggtatttctgggtcatattgtagttctatttttaacattttgaggaaactccataccgttttccattaatagctgtactactttacaaccctaccaacagtgtgtaaatgttccctttttctccacatccttaccaacatttgttttcttttgcctttttggtaataatgattctaactgaaatgaggtgatatctcattgtggttttgatttgcatttccctgatgattagtgatgttgagcattttttcatatgcctgttatctacttgtatgtcttcttttgagaactgtctattcaggtcttttgcctatttttaaattggggtctttctttctttctttctttcttttttttttttttttttttttgctgttgagttgtttgagttccttatatattctggatattaaccctttgagaggtgtatagtttacctatattttctgccattctgtaggttgtctctttactctgtccatcatttcctttgctgtgcaaaagctgtttagtttgatgtaatcacatttgtccatttttgtttttgttgcctgtgtttttgaggtcttactcaaaaaattcttccccaacccaatatcatgaagcatttctcctatgttttcttctagtgttatcatagctttgcattttacatttaagtctattacctattttgagttgatttttggatatggtaagaggtagggggtctaatgccattcttttacatgtggatatttagttttcccaatactatttattgaagagattgtcctctccccaatgtgtgtgcttagcaccttaggtgtatgactttatttctgggttctctgttctgttgcattggtttatgtgtctgtttttatgccagtaccgtgctgttttgcttactatagctttgcagtatattttgaagtcaggtagtatgatgcctgtggctttgtttcatttgc

SEQ ID NO: 46858 - DNA, 1033 bp, Homo sapiens
ctagatccttgtcctttcacttgtttgcctggcacctgctggagatggagaccaacttactgaactttagacatggcactctgtaaaagtaactaggaccttggagaactttcttgctgacttactcttagatgactatttccattctgttgtttatgtcatttgtttgttcatatatggtcattaacacagattctataaggattctaagagactgagaaatgtagtaattaagtaaagtagtaatagaaatattatgagaatttaaggtgtaatatttcaaatcagtggggaaagatgtatcctttaatacatggcattagaattacttgcatttgtccagaaaaaaaacctacattgtttatgctgaaataaactccagaaaataaaatatttaaatacttaaaaatgagaactatgaatgtactagaaatatacataggtgatttgtttttcataatattggcatagagaaggcatttctaggcaagactccacacctaaaatctgtaacagaaactattgaaaaaaatttactatacacaaatttcaaacttttatacagaaaacaccactagcaaatgtcaaaagatgatgaacaaagtagagaaaaaatttgtaacacacatataagaaaatgaactaatttctttagcatttaaagaactcctaaaaattggaggagggtgaggattgaaaaactacctattgggtattacgctgattacctgggtgacaaaatcatccatattccaaaccctcatgacacaacttacccatgtaataaacctgcacatgtaccccttgaacctaaaataaaagttggaaagaaaaagcaacaatattgtaacaaatgtaaaaaaaaaagcatgaaaaagataaacattttaatttaaaaatggacagagatttgaaacatcagttcccagaaaaatgaatacaagattgactgtagccttgttggcagtagccaaatcctgaagataaatgttcttcaatggcatgacttgttaactaaactatgataacagct

SEQ ID NO: 46859 - DNA, 1155 bp, Homo sapiens
cctgcctctgtccaccctctttctttccatcacagcctctccagtcaggccatcattatttattccctggaaaaaatccaagtttctctctagctttctgcctctcatctctcttatagttagctgtcagattaatattcccaggtgtagttctctttatatcattgtgctgctcaaaattctttcctggatctcttctatttactcactaaggcctacctttgcaatctgacgttcaaaggttcaacccacttctcttcccaccttcctatgggaggcaggagcatgtagcatgcgctcttgggacatacaggcacagccagatgcaggctccaatgcctacggggcaaattatttgccctctctgacccgtacctacctttctcatctctaactttaagataaaaaaagcacaggtatgcctcggagatattgtgggttcagttttgggccaccagactaaagtgaataccacaataaagtgagtcacagataatttttaatttcccagtgcatataaaagctatgtttacactatactgtaatctattaagtacactatattgtagtctgttaagacattatgtctttaaaaatgcagatactttaattaaaaatattttcttgtaaaacaaatactaacaatcatctgagccttcagcttgtaatcttttcactggtggaagatcttgtcttgatgttgatggctgctgactgatcatgatggtgattactgaaggctggggtggctgtgactatttctgaaaataagacaacgaggtttgccacaatggttgacttgtgctttcacaaaaggtttctctgcagcatgtgattctgtgtgatagcattttacacatagtggaacttcttttaaaatgtgtcagtcctctcaacccttgccactgctttagcaaattaagtttatgcaatattctaaatcttttgtttcatttcagcaacattcacagcatcttcaccaggagtagattctatttcaagaaaccattcttcgctcatccataagaagcaactccttattcattcaagttttctcatgagattgcagaaattcagtcacatcttcaggttccgtttctaattttagttcttttgctatttccaccatcttggcagtgacttcctcagttgaag

SEQ ID NO: 46860 - DNA, 1050 bp, Homo sapiens
tcttttcgttgtacagctgaacttattacacagtttctaggatgccagattatccgtttcttttttgtcggattattttcaagtattttttttctcagaaaggatggacaggtggtacgttttctgactccttaaatgaccgaaaatgtctttcttttgcccttaagcttagttggcacttcagctgaacataatattttatgtccatgtatttttgccttggatttttgaaagcatagttctgttatctaaattgagcatacagtaatgctaccaaggagcccatcagtgtgattcttgtttcttcctagataacttgcttgaagcttgtaggattttctctttaggtgcactattgtaaaatctcaacatcatctgtttatttgggtcctttgaaaatttatccttcttagcctttggtgggcctttccatttcaaaacctaagattttcttttcattgataaaatgttctcatattttttcttcattgtattctttgttttagcactctgttagaggttggatcttatggatttgaccttcttctctcttttctctcttatctcatgttttccatctttttatcttttgttgtatctcctcagtggcctttgtactttttgttccatcaataagtggaattcttctgtttgctctatgctatgatctgaatgttggtgtccccccaaaattcgtatgttgaaccctaatacccaatgtgataatattgatgaggccttttggaagtgattacatcatgagggctcggccctcataaatgggattagtgcccttataaaggggtttaaggagcctcccttctcttctgccatgtgaggatacagaaggtgtcatttacatggaacagacccttaccagacactgaatctgctggtgccttgatcttggacttttcagcctccagagctgtgagcaatacatttctgttgtttataaattacccaatctaaggtattttgttatagcagcccaaatggatgaagattctctttgattatttgaattttaaaattttagaaatcaaatta

SEQ ID NO: 46861 - DNA, 1029 bp, Homo sapiens
cctagatatcatgctattttacctacagttactttagtgtttacagacaattctagttattaacagtaatgttctgtaaagtcactacaaatacttaattagctaacactgaactattactcctagaggaagtaaggggttaggttcctgtaagcctctggtcacaacaattttgtcaactgatcaatacatagcctcattttatgtgtgtttctgtttaaagatacttcatttattgttgattcattgacgtcgaactcttggccaaaagcactgttaactcatgcctgaacaaagcttatctaacccattgttttctccctatggcatgtcacaaccttcttaggaacactagccagcacttcagcactgtgcttgatgatcatttgaaggactgaagtcatcaaaaacaagcaccaaaatgtgacaaatgtggtactaaataaaccgtgaaaaggaaacttgtgtttatagtataagagctgaagcagagtgtcactttatttgacatcagttggaaacatgtgggttgtgtgactcaaattttttgccactttgtgtgtacctgcaaatgactacaatagtgccacaataatttttttatttttatttttatgattatactttaagttctgggttacatgggcagaacgtgcagtttgttatgtaggtatacatgtgccctagtggtttgctgcacccatcaacctgtcacctacattacgtatttctcctaatgttatccctcctgtagcccccacctccgacaggacccagtgtgtgatgctcccctccctgtgtccatgtgttctcattgttcaactcccactaatgagtgagaacatgcagtgtttggttttctgatcttgtgatagtttgctgggaatgatggtttccagcttcatccatgtccctgcaaaggacataaactcatccttttttatgtctgcatagtattccatggtgtatatgtgccacattttctttatccagtctatcattgatggacatttgggttggttccaactc

SEQ ID NO: 46862 - DNA, 1047 bp, Homo sapiens
ggcttcactcctgaagtcagcaagaccacgaacccactggaaggaagaaactctggacacatctgaacatctgaaggaacaaactctggacacaccatctttaagaactgtaacactcaccgcgagggtccgcagcttcattcgtgaagtcagcgagaccaagaacccactagaaggaaccaattccggacacagtatctcctagtcagtatacatgggagtcagggacccatttgaggaggcagactgacccttagcagacctggaatgctgtgctgggaggtccgctgctctctttagagctgtcagacagggatgtttaagtctgctataagcccctgactggggctgctgccttttttatagagatgccctttccagagaggagcaatctggcagtctggccacagcagttttgctgagctgcagtgggctctgcccagttcgaacttcccagcagctttgtttacactgtggccgtgaaactgcctactcaagcctcagcaatggcggacgcccttcccccaccaaccttgactgtcccaggtggatctcagattgctgctgtgctggcagccagaatttaaagccagtagatcttggtttcttgggctcagtgggggtgggacctgctgagccagaccacttggcttcatggcttctctctggcttgtgttctgggcgccagtagggtatggaaaaaaaaaaagctcctgcagctagttcggtgtctgcccaattggctgcccagttttgtgcttgaaacccagggccctggtggggtaggcactggagggaatctcctggtttgcgggatgtaaagaccgtgggacaagcacagtatctgtgctggagttcctcagactcagtccttcatggcttcccttaggtaggggagaaaattcccccaccccttgtgcttccaggtgaggcggtgccccaccctgcttcggctagccctctgtgggctgcacccactgttcagcgagtcccaatgagatgaaccgggtacttcagttggaaatgcagaaatcactcaccttctct

SEQ ID NO: 46863 - DNA, 1081 bp, Homo sapiens
tgattctgtatgtgatcttcgattaatttgacagttgcatataagttagcatagcagatttttaggctatttattattttgaaactcttaagtttacttgttgaataaatgtcctgtatagcaacatttattaaccacaggtatctatttattttgttatactttatataccatttatgataaagaccttttttttcagttttggtttatttgaaaccatagatggctctattgaataaggattatgaataagagtgggttatagtagagtaggtgatgaattgtgaagttttgtgttggatctagtgaaggtgatagttttaccgaaagaccaggtcagcaacaaattacaggggcaggagttatggaaagtttgttcactgccgtagtctggcatccattttttaccttttatttgaatagatttagagtctttttattttttaagtgaccgcatcttgctttgtcacccaggatagagtatagtggtgtgatcatagctcactgcagcctcgaatctctgggctcaactgattctcctgcctcagcctcccaagtagctaggactacaggtgtgcacccaacatgtttgtctaattttttaaaaattttgtacacatggggtcttgctgttttgccaggctgttcttgaactcctgggttcaagcatcctcttgcctcagccttagaaagtgctggggttacaggtctgagccaccacacttggccttagaatcttgagtaatcctaaacctgatagaacataatgacagccttgtgaatattaggggtctcttttgattgctccagatatccttggtacattcctttgaattgttgaatatggttctcactctagttctatgaattgaaatcaaatattaaactggagattataaaatctttgacaagaccgatgtcaaggagcttttccctattgttttttctagttttgtgatttcaagtcttaggattaagcctttaatccattttgagttgatttttgtgtatggcataagataagggtccaattttattcttccacatgtagctatctagttttctcggtaccatttattga

SEQ ID NO: 46864 - DNA, 1066 bp, Homo sapiens
ccattggaattttgatagggtttacattgaatctgtagattgttttgggtaatatgtatattttagcaataaccatccttcgaatccatgagctatttttccagttatttgtgtctttaatttctttcatcaatgttttatagttttcagttatagatctttcatgtagttggttagatgtatttctaagtatttatttttgattctgttgttaatgggattgttttattaatttctttttcagagagtatgttttagtgttatagaaacacaactgattttcatatgctgattttgtattctgaaacttaactaaatttgtttactagtttctaacagttttttgttttggaaggagtctttaattttctttatataagattgtgttgtataaagacagtggcagttttacttcttcctttctaatttggatggcctttctttctttttcttgcttaattgctttgggtaggacttccagtagtatattgaataaaagtggcaagagtgggttctcctgatggtgttccctaagtactgtagtctttctttacttttacattcctttttacattctttctgttcctctaactgggtaatttcaaattatctgtttttcagttcacagattcttctgcttgattaaatctgatgttgacactatttcattttgcatttcattgttatattcctcagcttcggaatttgtttctttttaatgatttttatctgtctgttttcattcttttgttcatgtattgttttctttatatatcatttaatcatccatctgtgttctcttgtagctcggtgggcttccttgaaacaattagactcattttcctcattacaatgttttggtcaatgatggactatatatctgatggtagtcccataagattataataccgtatttttactgtactttttctatgtttagatatgtttacatgcacaaatacttaccattgtgttacagttgcctatagtattcagtacagtaacatgctgtacaggtttgtagcttgagagttatagactgtaccatatagcctaggtgtgtagt

SEQ ID NO: 46865 - DNA, 1068 bp, Homo sapiens
ttgtggcatcctctccagctttgtgtgagttttatcatgaaatattttgagtgtgtgaaaatgtataaggaataatttaatatttatatactctctactttgctcaataattatatatacactatatatatacaccatatatatatatatatatatacacagcatatttatgtatatatataaattgtagtttcctttgaattctttcccacttcatgcttttcctccgcaaagtttcatatctgaagataaaaagaattaacaaagtgtaatgtcagttttaaataaagaacttgctagatttttaagaagaattctgaaggattatttctataaaatataaatgtctcatcaatgtttgtgagagaaggcatggaaaaaaatcacgtttagatttgttatttgtatttctgtgtgaaattctgaagattagcccagttctaccatgagggtatatatcatggagcatatttttcatattgaaggcaaagcaaagatagttttcaaaaactatgacccttacatttatattgacaacatctgtagaccataaaaaagcccattgtctttttttggcattctttgcaaatgacttattttaccgataagaattgctagtgatccaaatgaatataatattgtttaggcaatattgtttgggaaagactatgatcctcatttatgaagcagtatttcagtgaaaggatcttaggcaatgggaagcaaataattcaactctatttcgaataatttttattcagtggtttcaagttttctgatattttcttctgtactgtttaatctgctgttcatcccttctagtatatgtttcatataagattctatatttttcacatctagaggttccattaaaaatatatattcactttctctccattatgttcatgttttcttttaaattattgagtatcttttaaatgtttataaaaactgtttcaaggtttttgaattgcttaatttcattatctgagtcattgacttttttttccctccagattatggattatgtgtttctacttctttgcatacctaataatttttggtttg

SEQ ID NO: 46866 - DNA, 1088 bp, Homo sapiens
agtaaagaggtttggggaaaacaatactgggaagatatctgaatcctgctgcatgctaccattatcactgttttccatgttgatgctgatggatctctgctttttcttgacggactatttaatcagcaggcagatcaacaggccaaaattccaccataactgcaaacttaaatgcagatgaatggattacaacatgttcaagccttgcaatgagaggcattataatgtatgatggtataattaatgagaataacctgtctgctagtaataagtacatgggtcattatgtctgaggctgagaatgagttcatcaactgggtagccaccactgcagcaggagccaactgccgtcagtgctgggtatgcctcaagttgctagaggctgccaggaatgggctaccttggagaatcgtccctgctaacatttctggatggatatgccgataccaatgggggtggggtaataacacttgtaatccaacctggacttttttttaaccaaaccaaacagtctatttttgcctaagccctaactaaacacagcacccttgttacttaaattacacattacagcaataagctacatgtagaaaaagatcttaatgatagtatcactggacttatgttatcagatgaatttgctcagctgcgtactgttgtgttgcaaaatcggatgacattaaatacgcttaccacagcccaaggaggggtttgtgccttactgtatactgaatgttatgtgatatacctaacaaatctcacaatattactctccttgcaaagccatggtgggtgtggtttttattaattgtgcttttaattctcctgtgcttatcctgtatctgtaatctatatcaactttgccttccccatgtatctgtaagggtattttcctacaaatgagtatcaaattgagtctgaatgtggaggtaaagttaaatattaaatttgaactcaattgaccatttgaactcaattgaccacaaacagtggtcaccaagtcctggaatgggttgtatgagtgagcccctttaggcgttcatccagtgttgtttcggagaaatctctgtttcaatctattcctatat

SEQ ID NO: 46867 - DNA, 1052 bp, Homo sapiens
atccttgtgtccgtccaccaaacttcttctctgtgtctcagataatgtctgctccattcttccagttgtgtaggcaaaagcttgggagacattcctcacttttctatcaagaaatcctgttagctctaccttaaaaatatccaaaatttaatcacttctcaatgccactgcatctgcctatcatgtacaattcacctttcttttttacctggctgtttcatttgccttctaacttgtctttttgctttctcccttgacccttaaggtctgtcctcaacccaccagccattgatactcttagaatgttatatgttatttctctgctcattgccttcccatttcacttcagatccaaatttcacagggcctagaaggccacatattattttatccccagtgatttctctgttcttagctaccatttccttatctactttactataaatgtgtgtacttccgtgctgttctttgaatataccaattgctcttgctcttgtgtctttgctcttgctactagttccatgacttgacttggaaaactcttccctagggtcttcatgactcttccttccttcctttagatctctcctcaaatataatattacttttaaggagagttacatgttaactattctatataaaataacaacaaccttcgtttcactcccagcttctctaggactgggaattcctttcttcgttaccctaatttattgtccttattatactgatagcaatttgacatactatgtattatttatcttcattatctatgtactgaaatgttaattccatgaaggcagcaacttggtttattttgttccctccaatatctctagtccctagtccaatgactgttatataataaatgtgcaataaatacttgaatgagtgatggattaatgtattagatgtgacttttatttattctggtaggtattccttcaatctgagaactttatttaattctaaaatattcccagcagttacctcctgaaatattgctttatttttcatccccatagttattacttctggaatgttgtaggcat

SEQ ID NO: 46868 - DNA, 1748 bp, Homo sapiens
tagaatattggatatattttcactttattcctaaaatccacttttcatcataatcctggatcttcctctcattttcagtttattcccaagtcctttggagacaatttgataaggaagaaatgtgagagtataaaataaatcgatatttagggatcagcaccagtgatagatcagaaatggaataaaggtcaactgagcatattacttaaaaaaaaaaggtgtttctatcttgatgtgtctctttcttggttgacagacagaaggtgttattgagtctgacttggaggcttccaataattgtgtgaggctagatactatgtgtttaataaatattagttgaaagaatggatggattgataaaagttgaagaagtttaggaaagagatagtatcaggatatggatttcatttttagtaagttagtttgagatagtagacaatccaaagggagaggtcttgtatagctggaaatatgagattggtgattgggaaggtgagggctggattatagattagatagtctttcagacagaggaaagatcagcagccaagagaggtgctacattttctgagagaaaagatgtacagagaaacaaggaaagctaaaaattgagtctggggtacatccacctcgtaggtgtaatttaggtatctcacaggtgagaagaatgttcggttaaaaattttggcagccttaacattctaaatattctgtctacagagcaagatattattagtactaaaataaacttgccattttaaaaattttaaagtgatttatgcttttacaaaatcatagtttatcagaaaagttccttctaaatgacattcaaataaaagaataaggaattatgttagctataaatatattttctttaattagaatggttcgtaaaatcttgtttttctcctgttacacacctaaattttgaaaatttgctttctgagtatgatttaatatttaatatccagtttttatgtgttcttcaacataaataggccctgtacttgcacattttagttaaaaattcatgggcatgttacaggagatgagaattgtggtgacagacattattatgaaagctatttaatcatcacattagcaaatcaaaatgtaaaacctttaaaataaaatactgtttttcttagaaataaaagctcaccagtaatttaaatttttttccacagagagagtcagtactgaaacaggaaataaatgaccttgtaaaacggaaaattgcagtagatgaagaaaatgctttcttaaggaaagaattcagtgacttggagaagaaatttaaagataaaagtcaagaaattaaggtgtgttgacttgtacatagttttgtgggactgttgctttgaagttctgctttaagctttgttagcctttgtggcacagaaagtgacagatttggaggaaaaattgccttaggccctcctgtaccatacagttttctcacatgcaaaaactctgataaagatgctttaaagccagaactccaagctttataacttttagataaatagttaatgatggaaatggagctaagaaagtaggagtgtgaatatgtggcttcttgtaattagattctgatgggactggcattattaattgataaaacccaggtctgggaggatatgtctgtatgggtctcaaaaatagctggggacagcatcaaaggcagcttgatcaattaatgggctctttgcaaatgtgtactcatcaaagctgtcatccagtgaaaa

SEQ ID NO: 46869 - DNA, 1050 bp, Homo sapiens
gtattcttagttttccatttctgcatcactttgctgaggataatggcttccagctaaatccatattgctgaaaaggatatgatttttttaactgctacatagtattccatagtgtatatgtattatattttatttatccagtctgctattgatggtcacctaggttgattccatgtctttgctattctgttgtgatgcatatacaaatacatgtgtgtttttggtagaaaaatttatttttctttggctactgagtaatcccagtaatgggattgctggatcaaatggtagttctatttttatttttagctctttgagaaatctccaaactgctttccacagtgactgaactaattttcaaacctaccaacaatgtataaacattgccttttctccacagcttctccaacatctgttatttttgactgtttagtaaaagccattatgattggtgtgagatggtatctcattgtgtttctgatttgcatttctctgatgattagtgattttgagcatttctttcatgattgttggctgtttgtatgtcttctctttttttttttagtgtaaagctcttagttgtcttttatttgcaattctagaatcatgcagcaactcattctgtaaggcagaatgtgtattcaaatgagccgatctggggaggttggttttatagacagaaaagggcagagaaaagcagaaacagaaaacaaaatgtcgtttaaaagttacttttcttgtacaactcaaagcagaggggatttggggatttctttatccagttttcactggcctgtttcgatatttgactgtttctctctcttgattttttggaaggtcaaataatttagtttctgcttggtggcctggaacttcagaatgaatgattccattttggtttggtttgttgggcctagtgcaggagctcagtccagaccaatgacctcctatacattttgtttaacattttttttttattattatactttaagttttagggtacatgtgcacattgtgcaggttagttacatatgtatacatgtgccatgc

SEQ ID NO: 46870 - DNA, 1030 bp, Homo sapiens
ttttggtggataaaaataagttgttttgtttttactgtgaactgtgctatagttattttggtataaatgataaacgtgaattatgtaaaaataaatacatgcagtacagaaaagtacaaagaaggtaaaagaaaaaaacgttagactaaaaatgcatccctagagaattaacagccataaaattctgtgagcattgttctacatttttctcagtcctgatttataaattgaagattgggtagacagatgtttttaaataaaagggactatattgcacatgttcttttggtaactaataattttaggtttttttttcatataatgaaacaataaggctctctgatgtgaaattgaggagattattacatcttagataattattttttctctataaggaacactatctttctaaaactaagaacaaactgatacgaaaaaccttggcgattcatgttattatttttttttaaactacatttcatctgtagttgattttggcactctgctctgtatactctggaaataagcacataaattcaaccattttgactccccccaatttgtatcttaagaattacagcatttatcttctcttgtataaccacagtgaacacagatgtttaggcataattctatatagtacttcagtgttcatcactaaacttttttactcttgatttgttcattccatcctgtttgttttgattcatctcatgagcccatttttaccagggccttccctattgctaccatatgcttttctgcccctgttggcatccaatttagccatgtgacttattttggccagtgaaatgagaggctttgcaaatgttttaaaggagccgttgtttgatttgcctttgcttttcacctttttccaggagaacagcctatttccactatagtctgatgctccagtttggttcttagaacagagaaaagcaaatgtaatgtgaagaagccatagatctttgtttttggaaggtgtcaggtttttttttttttcctgcagaattatgtagagcagctg

SEQ ID NO: 46871 - DNA, 2079 bp, Homo sapiens
gttggcatcataaatgtcttcttttgagaagtgtctgttcgtgtcctttgcccactttttaaatggggctgtttgtttttttcttgtaaatttaagttccttgtagattctggatattaggcctttgtcagatggatagattgcaaaaattttctcccattctgtaggttgcctgttcacttgatgatagtttcttttgttgtgcagaagctctttagtttaattagatagcatttgtccatttttgcttttgttacaattgcttttgatgtttttgtcatgaaatctttgcccgggcctatatcctgaatggtttcagtagatttccttctaggatttttgtacttttgggttttacatttaatgagtctttaacctatcttgaattgatttttgtataaggcataaggaaggggtccagtttcagttttctccttatggctagccagttttcccagcagcatttattaaatagagaatcctttccccattgcttgtttttgtcaggtttgtcaaagatcagatggttgtagatgtgcggtcttatttctgagatctctgttctgttctattggttcatgtgtctgtttttgtaccagtaccgtgttgttttggttactgttgccctgtagtatcgtttgaagtccggtagtgtaatgccactggctttgttcttttcgcttaggattgtcttggctatacgggctcttttttggttccatattaattttaacgtagttttttctaaatctgtgaagaatgttaatggtagtttaataggaatagcattgaatctataaattactttgggcagtgtggccattttcacgatgttgattctttctatccatgagcatggaatgttttttcatttgtttttgccctctcttatttctttgagcagtggtttgtagttctccttgaagaggtccttcactctttcacttctcttgttagctgtattcctaggcattttattcttttcttagcatttgtgaatgggaagttcattcatgattgggctctctgcttgtctattgttagtgtatgggaatgcttgtgatttttgcagttgattttgtatactgagactttgctgaagttgcatatcagcttggaaagcttttgggctgtgatgatggggttttctagatatagaatcatgtcatctgcaaacagagacagtttgacttcctctcttcccatttgaataccctttgtttctttgtcttccctgactgccctggccagaacttccaatactatgttgaatagaagtggtgagagacagcatccttgtcttgtgccagttttcaagggaaatgtttccagcttttgcccattcagtatgatattggctgtgggtttgtcataaatggctcattattttgaggtatgttccatcaatacctagtttattgagcatttttaacatgaagcgatgttgaattttatcgaaggccttttctgtgtctattgagatgatcatgtgtttgctgtctttagttctgtttatgtgatgaattagatttattgatttgtgtatgttgaaccagccttgcatcttgggaatgaagctgacttgatcgtggtggataagctttttgaatgtgctgctgtattcagtttgccagtattttattgaggattttgtttgtttgtttgtttttttgagacagagtttcgctcatgtttcccaggctggagtacaatggcgtgaccttggctcactgcaacctccacctcacagattcaagcacttctcctgcctcagcctcctgagtagctgggattacaggcgcttccagtatgcctcgctaatttttgaggattttgcatcaatgttcagggatattggcctgaagtttttattttctcagggtttggtatcaggatgatactgacctcataaaatgaattagggagcagaccctccttttcaattgtttggaatagtttcggaaggaatggtactagctcctgtttgcacctctgatagaattcagctgtaaatccactggtcatgggcttttttttggctggtagggtatttgttactgccccttcagaacttgttat

SEQ ID NO: 46872 - DNA, 1075 bp, Homo sapiens
ccttctgaggcctacttgtgtcagttcatccatctccacctccgcccagttctgtgctcttcctagagaggtattatgatcatatggagaagaggcactttggctttttgaattttcattgattctttctcatctttgtgagtttacctagctttgatctttcagtttgcgaggacctttttgttgatgctgttattgttgttgctttctgtttgtttttcttttgacattcaggcccctcttccggagggctgctgtggtttgctgggggtcactccagaccctattcacttgggtcccttctgcacctgcaggtatcaacagtggaagatgcagaatagcaaagatggctgcctgctacttcctctggctgggatcttcgtcccagaggggcaccaacctgatgccaacaggaatgctcctgtataagttatctggcaacccctgttggggtctcacccagtctggaggcaggggttctgggatctgcttaatgaagcattctggctgccccttggcggagcgggtgcgctgtgctgtggcgaatctcaatcatctggactgcctggattcctcagagctggcagggggaaagtctaagtctgctaatctgtgaatactgtggctgcctctcccactagaggctcagtcccagcgacatcagagttctgtccctaaacccctggctgcagttgctgaaattcctgcaggaaggtcccacccagtgaggagggatgggttagggttccgcctgaagaggcagtctggccatgatctgccatagccatagccactgtgagtgctgtggggaattccatctgggtccaaaccatctagtcttcctggcactggcaggggaaaattggcagactggagctgcagtgatggctgccaccccttgcccctactccccgggaactcaggcatcttaggcaaaaggcagggtggtgatgatgacctccccttccattaggaagttggtagtcgtaggtagtcaccagcccattggctgctgagaggccaccaagaggctgccgagaatctggacagctctgcacttgggacccaaggccct

SEQ ID NO: 46873 - DNA, 1056 bp, Homo sapiens
taacatatttgttagcacactagtatttttcactttaacattatattttaaaaaatcataacatataactattttagatggtcatataatttatttttctactgttggttatatatgttatttgttttactattgtaaataaagctgcaataaacatttctttgtcagttcagactattactattcattatagtgtactgactacacatatgtgtacacacacacacacacacacacacacacacagacacacacacactgacctatccacccagggaagacttccttttatgaagctataacatcatattaaccatatgcaattcacttttttttttttttgacagtgtctcactctgttgcctaggctggagtgcagtggcacgatctcgactcactgcaacctctgcctcccaggcttcaagcaattcccccaccttagcctccccagtagctgggactacaggcacgtgccaccacactcagctaatttttgtacttttcgatagagactgagtttcaccatgttgactaggctggtctcgaactccttacctcaggtgatccatccgcttcagcctcccaaagtgctgggattataggtgtgagccactgtgcctggcccaattcacttttaattagttcgtacataacatacccttttaaaattatgccataataagaatgtacgggggtcatggattctaaggggacctgcctactacatgatcagtaaacgttaagttactgaaacttgagacattgcatgctatgatgtcccactttggataatgcaatttaaaaatcataattgtattttaaaactttatggcgatgtttctattttaatttaaatattactctagtccatttaatgtttgactttgggtggatgaatggttctgcagtggtgaaaaatgtggagaaacaaaatacaagtgagaagtccttccagttagatcacagttataaagacagaatgtaaaattgtactataagccagggagaatctgagtttccatttacacaaattattttagaaatgttttatgtaaa

SEQ ID NO: 46874 - DNA, 1033 bp, Homo sapiens
cagagggtctgatattgatagtgactatttggcattaactaaagtacagtattctggtttttcaggtggtagggagaagatctgattgtagtacctttacttgggctcagaatgctggtaacttttgtcatactttagttgcaaaatattatgccagagttaataattggtttgcttttgtttggtttttatgatttttactttattattgtttctattccatttttttctcattttcagcatggaagaatatcaatcttatactttctctaggtatcttactgtacaggatcaaaataactttcaatatattaggtcaaggtgccacaaagatagtacttttatattatgcttatcatcgtatttttatacttaattagtttcgagtttatatgtgtaaacttaatttgaaaagttgacttgatttattcttcagcattattgtaaatgaaaactgccttgtaatttgttgcttgatttaattatattcagtaatttatatttttaattcagttgtatatgtagatatgaccacacaaatatatgggaaatgatttttggatagtttgatatttaatcaattttcaggagagaacaacttagcagtaaaatataatgttatgatatgatttttagccttaataaatgaaagacatttttatttaaaagaaaaatttgaagtctttatcttttgtaagtcttaactataaactttttttctaaaggccattgtgtattatattcacaaaatttgaacttgttatcattcaactccactatcctgcatgaaaaataaaccatttctgctataaaaagaaggctgccaatagatattctgatatttcaagcttactttaagttccaagcagaatgaaacagcccaagatattaaaatctagaaatttagcatatctaatggaaactgcaactcaactttaactactctatagtggcacttctcttgccgctgtaataaaacttaagaatgtttagtgattttttttttcctactattattcaaaattacattacc

SEQ ID NO: 46875 - DNA, 1034 bp, Homo sapiens
atgtgaggcttataacatattttggaaaaatctgaatgtgttttattttgctatttaagataaaaagaaatttatagaaaaatcagtcttttcattctagcttttaagcactgtcaggattagtttactcttaggattggaatctataggtaatttgtaaattgtggagttattctaaaccctcttgtgtgacatgtaaatattactaatttttgtcagtacagtgtgatatttacatgtcatagaataaatacttagcttgtggttgctcaattttgtaccaaagatgctactgtcatttactggatgtatgtatatacccataattgtcatctactggatataagtataattgggttgtaacccactcggtgttaagttttatttggtatatggaagaagttaaagttttggaattaattttcttccattttattttgctgttaacaacttgactgtaccatgtaagtatttagatactaaaggaaagctaaatttgactgacttgtttattactgaattttgctataatgtgatagtgttataagcggagatggtgatagtttattttttactcaaatgtagtcaataatttaattttattttgtgaattacaaatgctacctgaaaatatttggttaaaagtgagtagatggaagaaatgcaaatatttatatttttaaaaggagtgctagatgaatttgttgatattagacattttattactcaatatagtggtctttctaaaaatgaagtataaatttaaactagtacccttagttttatttgtgaatttttattataacactattttgatttacaatattatgttaaattgatattctttttctttttcttttttttacaagaatatatgactattattaaagtcatttattttcaggatatagatgattcagctaacaatgtttactttattaattggtaatagacatattgctgcatttctgaaatcaattttaaatataaagttaatctctgaatatgggcatttcatgagaagaaaagtgtgt

SEQ ID NO: 46876 - DNA, 1024 bp, Homo sapiens
cccaggttcgagctattcttctgtctcagccccccgagtagctgggattacaggcgtgtgccaccactcctggctaatttttgtgtttttagcagagatggagttttaccatgttggccaggctgatctcaaactcctgacctcaaatgatcctcctgcctcagcctcccaaagtgctgggattacaggcgcgagccgctgctcctggcccttttgcataattcttgaaatttgttacctgggttctccagagaaacagagccaatagaatacacacacacacacacacacacacacagaacaattatttactatatttatataattccttatagtaaattagatttatatgagatttcctataaggaattggcttacgtgataatggaggctcagaagtataagatctgtagtcgctcagggaatgctatgcagccataagaaagaatgaaatcctgtcctttgcagcaacatgagtgcagctggaggtcattgtcctatgtgaactaatgtagaaacagaaaactaaatatcacatgttctcatttataagtgggggctaaacctgagtacacatggacataaagatgggaacagtagacactaaagaactgcaaaaggaagggagcaagggctataaaccttcttattgggtactgtgttcactatctgggtgatgggatcaatagaagcccaaacctcagcatcctgcaatatacccttgtaacaaacctgtacatgtgctccctgaatctaaaattaaaaaaaaaaaaaaaaaaaaagattttcaattggcaagctagagagccaggagagctgatggtatagttccagtttgagcccaaaaactatagaaccaggaaagctgatggtgtaagttcaagttcaagtcagaaggcaagagaagactaatgtcccagcttgaaggcaggcagagagaaaggaatctttcttactcagcttttattctattgaggttttcaacagattaaatgacatccatccatattggggttcatgcttt

SEQ ID NO: 46877 - DNA, 1475 bp, Homo sapiens
agaaggatggtcaccagagcctgggaagggtagttggaggaagtgggaataattaatggattacaaaaaaaatagttggaaagaacaaataagacctggcgtttgctagcatgacagggtgactattaaaaaataatttaattgttggttggtttgtaatgtaaaagttaagtgcttgaggtgatggatgccccatttaccctgatatgattattatgcattgcctgtgtatcacatgtcatctaccctgtagatacatctactgtgtacccacacacaaaaattctagagattattttataaggataaatgatactcatttttattattcattgataaagttttcctagttttgtttgtttacagttttgtaggtactatagtgttatgcttaatatcaataattcgttaatattttggttaggcattacattttttgggaaattatttagttcgtatcttttttcctggaatcaaaatcttagagttagaaggaaatttggagatcttcagatctgcaacctccctgacagctagcttaaatatgaccagtaacggggaatgtctcactgctcaaattgcaagaggattatctctttattaaagccaagataactatatttcgtatataacttcagtacctcattagaaaaattaaagattgatatgacaggattttttgttgtttaacctgctacattctaaccactgtacttttaggttttgacaatttatacttaataattagttttcatatacccttcacttggcttttgtcccagttactgttgttgctccaatgctcgcattcaggttactggtgacttgttaaggccaatatttgaacccctccatttaacacctttaatttttatcatatttcaagcttatctctttatcagcttctgaatcacattgtctcattttatgtcctactcttgctgttatcttcccgtctctttcagtggaacagtttttcatttacttcttaataactagggtttgctaagactttatccttggtttacttttcaaaattaatgactttatgtttttttgaaaaattatacatacttacattcgagcagtaagaaagaaaaaagaagaaagcaaagaaaaaactagttcacaacatgttagagataaaaatttttaatattatcatataaccatctcttttttttctttttcttttttttaaattttttaattttttttttttgagacggagtctcgctctgtccctgaggctggagtgcagtggcgccatctcgtctcactgcaagctccgcctcccgggttcacgccgttctcctgcctcagcctcccaagtagctgggactgcaggcgcccaccaccttgcccggctaattttttgtatttttagtagagacggggtttcaccatgttagccagaatggtctcgatctcctgacctcgtaatctgcccactttggcctcccaaagtgctggga

SEQ ID NO: 46878 - DNA, 1040 bp, Homo sapiens
aaaataaagcatttaaaatattaaaatattcattttaattattgtttaccataattattgtagaggtattcttctttagaatggcacttatttttatgctgccttagaccaaggttgtaaggtatatttaaatttatttctatttttaatctagaatgctactaatgaactcactaaacagtcatcaaatgtgaagactttgaaatttgaactcctagcaaaagaagaacacataaaggaaatgcatgaaaagtatggtttttgtatttctatccattgtatttggtgccacctagtggcaaccagctctattaaacgtgctccaagaaactgctaatgtttacgttttccttccctagttcatatttaaacctacctaagatgaaagtttaaggaatactatgtatagcatgattaatggcaagctatttacttttttaaattagataatgatgaagttaaatttccgttattaaacatatttaattttgaataaatacaaattaatggcttcgagacaatgaatgaaaaactttacaacgtggtggttatttggccccccaaatatatgattagtatttgtattggatttaatgcctaagcttataaagctaaggtaaaaaaaggaaagttttgtttgtgtttaaaataactggaggttatggaagtttgtactcttgtgtttatcagtacaaagattttaaatgctctatcccactgaatcaaaattattttctttctgtatctttcaaagctacactattgcttagaaatagtaagatgtttagatagaattccagttgtcactgatacatttgagatatatgtatctcacaaacacacctgtagacctcattataagtgaagagcacttaaaagtgatatgaatagataaaagcattagacaaaaagcttggttaattttttaactgataatattttgaagtttatttatcaattaagagtaagtcttgcttattgtttaacagggctctagattaacactctttgaatcctggcttccctacctactaggccta

SEQ ID NO: 46879 - DNA, 1024 bp, Homo sapiens
ttattttatgactgctgatcttttgcaggatctcaagcttactctcctagtatcaagaataagtgagactgaatctgcaatggcagaaattgaaacagcagcatctaagcagcttcaagaattagcattgcaaagtgaacaggtcctagaaggtgcacagaagacattgctgttagccaatgaaaaagtagaagagttcaccacatttgtgaaggtttgaattacttgtcgtttactaacttgtactttactttaggcagataggcagtagcctacttgagatgatttggggaataaagtttctttctgctttcctaacacagaaagcatcttcttctaccctatttatcacattgctaataattcctccataaagaatttatttttatagtttgaatttaaaattttctaccatcttattaatatttctttcttaatgtcaatttagttatgaaattgtagtagtcaagtcatctggacaggttttaagttgaaagaattaagctgttcccaccctactctccttttgaaaatcgttcaagcaggaacaaccagaaacttgctcagtgttcagtgatgctaagagacatctgaatcccaggccacaaactatcaagacatggaatagacagaggaatggcacatgacaaacagaacaaagagaagacaaactcaagtatctgcagaggtgtaccatctagaaattatctaaaagctgaagagccctagaaagccttcattcccctagacatagaagttaataacattttatgccactattgagtactccacgaagaggaaattccttactttgcttctttggaaatcatagataccttgggagttttctcattttaaaaatatctgcaaaatgaattgataaaacattttatctcctttatctcttttaatgaatatttcaactggtgtgaagtcaagccaataatgcctgcctctgaggatcctaaatgattgcaaagtattaattttagtaaatgtaatttaccttttccagattcaaaac

SEQ ID NO: 46880 - DNA, 1103 bp, Homo sapiens
tttcctgagacgaaatctcctcctggtgaaaacgctgtgaacattgtagaaatgacaacaaaagttttagaatattccataaacttagttgataaagcagtggcagggtttgagaggattgactccagttttgaaagaagttgtgctgtggtaaaatgctactgaacagcatcacatgctatagagaaatctttcatgaaaggaagaatcaattaatatggcaagtttcactgttgtcttaaagaaattgccacagccagcccagctgtcagcaaccatcaccctaatttgtcagcagttatcaaccttgaggcaagactctccactagcaaagtttttacaatgtgctgaaggctcagatgatcattagcatttttaataataaagtatttttaattaagatatgtacatttcttagacataatgctattgaatgcttataaacataacttttacattcactgggaaaccaaaaacattgtatgactcactttattgtgatatttgctttattgtggtggtctgaaatggaacccatgatatgtctcaagtatgcctgtattttggctattaacctctatcagatatgtgatttgaaaatatttgtcttccattgtgtaggttgcctgttcactgttgtttgctgtgcagaagccttttagtttgatgtagtcctacttatttatttttgattacgttgtctttgcttttgatgtcatttctaaaaaaatcattgtccagaccagtgtcatagagattttttaaaatgttttcttgtaggagttttttctttttttttttaagagatggcgtctcactctgtttcccacgctggactcccgactcctggactcaagcgtcttctagaaattttatgctttcaggtctgatacttaagtcttttatccatcttgagctgatttttgtctgtggtgtaagagaggagtctaatttcaatttttttgcctttggatatccagttatccagcatcatttactggagagactgtcctttcaccgttatatatcaccctgtcgactatatttatggatttattactgggttctctattctgttccattggtctatgtctgtctttttg

SEQ ID NO: 46881 - DNA, 1069 bp, Homo sapiens
aaacagtcctttgcacttgtgactttataaaggcaatgaaaataattagtggaaattaagctgagcctgtgctcgggaatcattaaaaaatatatatatgagtaccttctacatgccaggtattatttcaggtttggagaatatggcagtgaataaaagagataaaaattcactactgtaatagaatttacacttctggggacggaggacaataaatagttaaaatgtataaactatgaaatttactaggtagttaacttgagtagaattatgggtgggtagatacattaaaatatgtatatatgtataaaacaaatattacatagttataaccagagtgtgggtctttactaagatttctataaatacccttagacaggaatggctagaaaatgtgttcttgatttatggtgtgttgctttattctttgttatttgctaatccttttttaggtttcattttgtccattttagtccactttgtatagatcattttcttctattggaactatataaaaaattctgtctgtttgccttcagtttttgagaatttaaagtaaagactttgatcagtggcttttctttacctttaaatatctctgttcctattagttgcttcagatcttgcaaatgctgaaatttaaaatggctaactttccccagtgtcctctctgcaaaatatgcttaccttctgtagaatgccttgcagtgtggcagtgggaagggttttataaatctccctggcttttgtaaatagaatatactactagcctgaaggttaactgaaagtttctccttgcatctctgaagccatttactctgtggttatttcctgtgttgcacttataacaaatgcattcagaaactgacatactcactcactcactctgtctcatccatgtaagcctacacactcagtaacccatacagaattaatcctcacatttagatgaagtagcaagagtttaaaattctctactcacagccttgctgttttttttcaatttaacaaagtaagcctactttcgtatcactagaatgtgattacagttaaaaggatccttttaata

SEQ ID NO: 46882 - DNA, 1044 bp, Homo sapiens
aaaccaacaacgttggtatgattcaaaaggagctctctcaaccggctgtctctggtaagacaggcccagtaatgcccacctgcaaggctgttgtgaagatgaactgagaccacctatgtcagatgtagcagacagcatatgccctcagaaggctggtagctttactgtgtttctccataacacttctcatttctcggagacaaggtcagggaatgttttgaaatgtttatttgaaaagtatttattgtgcatatattatttattcatttacttactatgtccttgaaatggagactgtattatacagatattcaggtcagctttaacatatcctttaggcctaatcacttttttctttcaacatgcctaatgtagcataatagttaatagcatagtagtttgacttttaaaattgatttctagggaagaatgtaaatataggaaagcttcctgatagagattatctaaacttaggcataaataataagtaaaactctgaatttaggtatgtaattgtagaatccctttgattataagcaagttgaaaaaaattgttttttacctagatgagtttattttaaaaagttattaagcatttataaaggagccttttttggggtggctcctaattattaccaagtttccaatattataaactctgtgcttgagttgaatattatagtttaggcttctatctcctagtagtgtttccaagcaaacagtttttccagtctctcagaagttcatttcagttaccatctcctcactattcctggagtgtatgttgcttatggtagcagctcaagggacagatgtatgaatgagagcaatccataaatgtttgaattcaaattatagtttttttaaaataaattctgctataaaaagaaatgaaatatttgtccatgctaaaacatggagaaaccttgaaaactttacttatttatttttattatactttaagttctgggatacatgtggagaatgtgcaggtttgttacattgatatacatgtgccatggtagtttgctgcacccatcaacc

SEQ ID NO: 46883 - DNA, 1070 bp, Homo sapiens
cttttgaaaaacaagtttgacaaaaaagcaagtgatagtggctctacaaaatgtacttctgaactttctatatgatgtatttctataatatatagaagtatatagaaatattctataatatagaaatatataatcatatagaaaattcaaaagtacattttggagggagtctggggatatttttcagccactttcatgtataatctttctttcctagcccttcttttttccccttttaattcactcaactgtcctagaggacagtgacattttagaggaaatttattcaaaccacaagggaatatttacgaagagtttctttgcttgaaaaaaaaattatttctttgctttgatattttaaagaaattgatacttttaaagtttcttttaattttaaaatgatgtcaaacttacataaaagttccacaggtagtgtgagatacttccatgtgtactctttaccttgattcaccagtgttcatcttttgcttcattgactttatcattagttctgtctccctcgtacacaaactattttttctctgaaccgtttaagagttcctgtagactaacccttaactgtttcaacgcatacctcctaagaataaggacattttcttatataaccatagtacagtgataagaaacaaaactttttatatccagtccacaatctgaacttaaattttgtcagttgtcccaataataacttttgtagcatttctctcctccactgggtccaggatccatccacttgtattgtgtttaattattatgtcttaagtttcttttaatcttgaatcattcttcatccttttttctttcgtgaccttgatgtttttgatgagtacaggcaaattattttgtagaatgtgtcttaacagatttgtctgctgtttcttcataatagtattcaggtgtttatttgcttatttattcattaacgtttattatgtcctcttggattctcatacagtgttataaactattactgtcaacatttattctgatgctcaaattgttacaaatctggccagtaagagccccgtcagcttaaagaatgatgtcat

SEQ ID NO: 46884 - DNA, 1031 bp, Homo sapiens
aattaggtgctctggcctagaagtgacacttgcttagaactcatggccatctctagtcacatgacctcatctacctacaaggggaccagaatgatgacaacactttaactacctcatttgggacttaagtactaagtgaacaggagattcagaactgatttactttatcttgaacaaaaatgaagactacctaatttgctttgtttcactgttgatcattagatcgtttgtctagatttgctggaacagggcatcatcgatccaaaggaagagaggactggacatgggtgagcagcaagaatgactatcacgagctccatgtctcttgctggttactctcccctgcagatctgcactctagctctgctgatattgtcattattgtgtcattcatgcccttactcatttcaccagatcccattattcaaccagttcttgcatgcagttcactcattcattcctttctctttctcctccccaatgttgcattaatattcaaaatattcttcctcttcttcccttcatcttcctatttcttcttctgtcttcctttacaactcaatgtttccatcatctctttcaggaggcttatctaactgtacccaaaaagctggcttgtcatccattctctggtctttatgtaaaaccttgtactcacttctaatagaaacctaaacactgcactggaaatgcttacttgcctatttgcctcacagcacagtgtaagtctcctgtcttattcactgctgtactctgagtaccttgcatagtgcctggtgcagggccaattaataggcatttagttactctttgctgtttcagtgacaagagattatttatggtgaagaacttagcataattttggataagagaaactactttttctctggttttcagacttgttaaaaatttatataatgagagatgtgttggtttgttttctggataagaacaatacagagaaggaattttggatattccagtagctgaaaatttaactagccacacaggctagaggcataggcattgga

SEQ ID NO: 46885 - DNA, 1028 bp, Homo sapiens
aggatcacagttcctcaccagcaacggaacaaagctggacggagaatgactttgatgagctgagagaagaaggcttcagacaatcaaattactccgagctatgggaggacattcaaaccaaaggcaaagaagttgaaaactttgaaaaaagatttagaagaatgtataactagaataaccaatacagagaagtgcttaaaggagctgatggagctgaaaaccaaggctccagaactacgtgaagaatgcagaagcctcaggagccgatgcgatcaactggaagaaagggtatcagcgatggaagatgaaatgaatgaaatgaagcgagaagggaagtttagagaagaaagaatcaaaagaaatgagcaaagcctccaagaaatatgggactatgtgaaaagaccaaatctatgtctgattggtgtacctgaaagtgacggggagaatggaaccaagttggaaaacactctgcaggatattatccaggagaacttccccaatttagcaaggcaggccaacattcagattcaggaaatacagagaacgccacaaagatactcctcgagaagaataactccaagacacataattgtcagattcaccaacattgaaatgaaggaaaaaatgttaagggcagccagagagaaaggtcgggttaccctcaaagggaagcccatcagactaacagcggatctctcggcagaaaccctacaagccagaagagagtgggggccaatattcaacattcttaaagaaaagaattttcaacccagaatttcatatccagccaaactaagcttcataaatgaagaagaaataaaatactttacagacaagcaaatgctgagagattttgtcaccaccaggcctgccctaaaagagctcctgaaggaagcgctaaacatggaaaggaacaaccggtaccagccgctgcaaaatcatgccaaaatgtaaagaccatcgagactgggaagaaactgcatcaactaatgagcaaaataaccagctaacatcataatgacaggatc

SEQ ID NO: 46886 - DNA, 1028 bp, Homo sapiens
tgctatggactgaagctagaccacctgagttagtattctggtcccttcacttactagctctgtgaacatgggcaaatacttaatttcattacacttgtttcctcattggtaaaatgtgggtcagaatactactttatagccagtcgtggtggctcacacctgtaattccagcactttggaaggctgaagtgggaggatcacctgagatcaggagttcgagaccagcctgggcaatatagagagaccctctctctacaaaaaaaaattttttttcattagctaggcgtagtggtgcgtgcctacagtcctagctgcttgggaggctgaggagagaggattgcttgagtccaggaggtagaggctgcagtgaggcataattgtgtcactggcctccagtttgggtgacaaagcaagaccctatctcaaaaacaacaataaaaaaccacttgataggatgtttaaaaggattaaattcaacatggtaagtatttaggaatggtgcctagcgcatagcatactctgttaactaccattactacctactgagccattcttccccaaattactggatatgaaacctatttgaatatttgatcccttactaaatgtcaggtgttcttaagcacttgtgcatttatcttactgaatcctcacaacctatgtggtaggttactttgatcgctattttagcagatgagcaaactatgatcttattaaggtcatacagctaaacccaggcaatctgactactgactctcctaatcattacaccccattacttccattgaaaagttaaccataagagtcatagctttttatttatttttggtttgtttgtttgagacggagtctcgctctgttgcccaggcttgagtgcaattgcgcgatctcactgcaacctccgcctcccaggttcaagccattctcctgcctcagcctcccaagtagctgggactacaggcatgtgccaccacgcccagctcatttttggtattttttagtagagacggggtttcaccactttggcc

SEQ ID NO: 46887 - DNA, 1891 bp, Homo sapiens
actctaagctcaagagccactggccttgctgttcctcaaagaccaagttacttactgctttaaggcttttattaattgacttttttcctgcctggaatgttcttcctttattgtcatatgatttgcttgctccttcatgccacttaggcccctgcttagatcttacttcttttttttttattttgagatggagtcttactcttgttgcccaggctggagtacaatggcacgatcttggctcaccgcaacctccgcctcctgggttcaagcgattctcctgcctcagccacctgagtagctgggattacaggcatgcgccgcctcgcctggctaatttttgtatttttagtaaagatggggtttctccatattggtcaggctggtctcgaactcccgacctcagatgatctgcccgcctcagcttccctaaatgctgggattacaggtgtgtgcctctgcgcctggctagatcttacttatttacttcttcagagaggtattccctggtgacaccataaaaataggcccctcccttccactttctctctgttttgatttacttttcttcatagcacctatggttttttttttttgagaccaagtcttgctcagtcacctaggctggagtgtagtggcacgatctcagctcactgcagcctccgcctcctggtgattctcgtgcctcagactccagagtagctgggattacaggcgtgagccactacggccagctaatttttgtatttttagtagagatggggtttcaccatgttggtcatgttggtcccgaacacctgaccttggttgatccacccttctcggtctcccaaagtgctgggattacaggtgtgagccaccatgcccggccacacagcatctatgtttttgaaaatataagtttactaattattttccaaccgtaatataagctccataaagacaagtatttggtattttcattgctttaattcccagcatttaaaacgatgtttgagaccctgtcataagttattaatataccagtagtaatttttgttttttttttttgagatgaagtctcgctcttatcccccaggctggagtgcaatggcacgatcttggctcactgcaacctccacctcctgggttcaaatgattctcctgcctcagcctcccgagtagctgggattacaggtgcctgccaccatgcccggctaattttttttgtatttttagtagagacagggtttcaccatgttggccaggctagtcttgagctcctgatctcaagtgatccacctgcctcggcctcccaaagtgctgggattataggtgtaagccatcgcgcctggccaccagtagtaattttttaacaaacacaagaactcctttccctttagccacaaaacagtaaaatagttatgaataatccaagcaaaaaagtgtgcaagacctgagtgaagaaaatcaacaaattcattttatgtgtgtgtgtttgtttttgacatggggccttgctgtttcacaggctataatgcagtggcacttacggctcaaacaatcctcttgcctcagcctcctgtgtagctgggatcacaggcatgtgccacaacacccagctaattttaaatttttttgtaggggctaggtctcactttgttgcccaggctggtctcaaactcctggggtcaaatgatcctcccacttcagcctcccaaattgctgggattgcaggcatgagccactgtgcctagccaggtcaagatttttttctcaactctttatgtcaaaatactgtcttcaaaagttatatgtggctgggcgctgtagctaatacctgtaatccagtgctttaggatgtcaaggtgggacgattgcatgaggccaggagtttgagatcagcctgggaaat

SEQ ID NO: 46888 - DNA, 1078 bp, Homo sapiens
tgctgggattacaggcgtcagccaccacgcctggctcgaatgccacattttctttatccatttgtctgttgttgaataacttagggttgctaagttgaagcaacttaggttccttccaaatcttggctattgtgaatagtgctgcaataaacatgggagtgtcagtatttctttgatgtactgatttcctttctttttggtatatatctatcataggggattgctggattgtatgatagttctgtttctaattttttgaggaacctctatactattctccatagttaccatactagtttgtgttcccactaacagtgtatgagggttcccttttcttcatatccttgccagcatttgttattgcctgtcttttggacctaagccattttaactggtgtgagatgatatctcattttagttttgatcaaagaaattttgatgcatttctctgatgaccagtgatgtagagcaccttttcgtatacctgtttgacattcatatgtcttcttttgagaaaaacctattcagatattttgcctgtttttaaaactggattattagatttttttcctgtagagttgtttgatgtccttatatgttctggttatgttatgttatgttatgttatgttatgttatgttatttttgagatggaatcttgctgtgtcacccaggctggaatggggtggcatgatctcggcttactgcaacctccacctcctgggttcaagcagttctcccacctcagcctcccgagtagctggatctacaggtgtgtgccatcacacccggctaatttttgtatttttagtagagacggggtttcattatgttggccaggctggtcttgaactcctcacctaggtgatccacccgccttggtctcccaaagtgctgtaattacaggtgtaagcaaccatgctcggcctatgttctggttattaataccttatcaaatggatagtttgcaaatattttctcccatctgtaggttgtctcttcactttgttgattgtttcctttgctgtgcagaagcattttaacttgatgtgatcctatttacctatttttgctttgg

SEQ ID NO: 46889 - DNA, 1022 bp, Homo sapiens
ggttaccatccatttttgtataagatacatagttgaatgtataaaattgcagtggaaaaaatcttgagggatttatatcaaaatctggttatctctgggacagaaatttgggtgagattttttttttcataatttatctgtataagtgtactccaagcaaatatttcttgtgtaataagaaaaaaagagaagttaattttttcaaacaaactcaaatcttataacagaattctgttactctttaggtatatggagctgccattcagttttatgaaccttactctcgggaacttctatcagagaaacagcttatgcacctgggcttgttgacgcctgtggagagaaaaatggtctccaaatccatcaatacaaacaaatgcatttgtttactctcacactggcctttttttgaagcttttaggaaatttcttatgtttatctacaaactttctgtgtctggaccacatcctcttcccattgaaaagtatgtataatgattagaaagatggctggtggaaaactgggtatataaatatatacatttgtttgtgtaatttttagcagcaaagttggaagggaaggaagcctgcatttaactgaacttttttttttttttttttgagatggagtattgctctgtcacccaggctggagtgcagtggtgtgatcttggttcactgcaacctccacctcctgggttcatgcagttctctgtgtcagcctcccgagtagctgggattacaggcacctgccaccacgcctggctaatttttgtagagacaaggtttcaccatcttggccaggctggtcttgaactcctgacctcatggtccacctgcctcagcctcccaaagtgctgggattacaggcatgagccaccaactttttacttactcccttcttcgcctgaatcattgactgtgagcttaaaattggatagtagtggtaaggttggccaaataataatcctttgagaattcagctgaagaagtaactcttataaattatattgtgagtgttct

SEQ ID NO: 46890 - DNA, 1065 bp, Homo sapiens
aagaactaatgtaacacttctgagtaaatacagctatcattttatattttagtacctgtttccaaaagtgtgtttgcatattaaattattaatgttttcaatattacctttgatctaaatatatagatttcaaaagtagttttgaaacttatctcttggtttggttaatttatctttggttaatttatcttttttttttttttaagctgtcagtccatgatgcattaatattatcacagccagtttctacacctttaccactaaggtaattactggtatttaaaatgatatatttattcagttggagcagaatgctttaaaatattttagtgattagtatattattaatatattagtgattgttattttacaattaactttattagttaaaactaggcaaaaatagccttaatgtttctgactttggtaactgggtggatggtggggctattttataaatgggaacaattaagagagttgcaagattggatgtagaggatacttcccttttcttctcatctccccttcccatatccagttcataactaaaggtttaaggtgagctgattttaaccttttaaatgtctcaaatccttttacttcttttcatctgcatcatagtaggcttccttgatgtcttaccagactatttcactattagcctcttaattggtacctttttacttatcttcctttagttctttatccaccctgtagccagtgtgtccttttgaaaacgcaaatataatagtatatttcaatttcagcctaatctgttgctgttttcaccctttcccttactatgctttagtcacaatagatttatttcaatttcttggctatgacaacagctttttcttgccccagggcccttgcatatattgtctgtcaccccttcactcccatccttgtctccattcttctgagctcaactcaaatggctgttcaggaaaatctttcttgataaatgccttttattaccagaggatgagtttaaatcaccccgttatctatcttattaaatttgctacttttcattgataaataagtaaagactagaaatta

SEQ ID NO: 46891 - DNA, 1034 bp, Homo sapiens
gctctttgttttacttgagagtaaaattctgctgcattctcttaggccagctgtcttgactggggtagctgaagctgttgtagctgtaagtatagaattttccttttagtacaaaattactgacataatttttactccaaagggaaattttcttcaaaaacagcaactttgtaaacaacaacaaatttaaaaaaaggaactttgaaaaatttccagcccagtaaaagttgaatataatctgctggcaaagagaagtaggaaatataaagaaaacaaaggtgatttctattttaggaaaaacgtcaatttccaatttttcatatttttgagttcttcccagagtaaaaactatatgattatataataaaacctgagaatgaagctggttgtattgagaggctctggccaatttcagctgttctaaaattatgcaaatgattacatggttaatttctccctattttaacttttaataattgtgaatcagtaatatacaggaaattctaagtgattgtgaaataggataatatacagaggcttagctcttgtgtaaagcgtaaataaaattaaattgttaaattgttaagaaattaaagttgttccctgcttaaaaccctttggcttcccattgcacttagaatgaagtctgattgacaggcatggtggcttacacctgtaatcccagcaatttgggaggctgaggtaggcggatcacctgaggtcaggagttcgagaccagcctgaccaatatggagaaaccctgctctactaaaaacacaaagttagccgggtgtggtggcacatgcctataatcccagctactcaggaggctgaggcaggagaattgcttgaacccaggaggcggaggttatggtgagctgagatcacaccattgcactccagcctgggcaactagagtgaaactccgtctcaaaaaaaaaaaaaagactgaagaatgaagtctgattgtatagggctttataggccattgtatagaactttagatggtccacttctccaaccctatcacccat

SEQ ID NO: 46892 - DNA, 1055 bp, Homo sapiens
aagtttcaattctgaagaagaaaaatgatacttttatgaggctccctgctccctttgggagtttcattttgaaacaaagactgtgaaattcttatgaattagtaatttaccaagaaaacttaaggtagagggccaggaatttattctttattaagataaaggataggatttggatgtgactcttttaagaaattagaatggattttgtagtttttttattgctataaatttaataaacttagaaaatcaaaccaaaatggaaaactaatacatcattctagcaccaatacttgtgtctcttaacaattgtaggtatgtatgtatcatgtggatgtgtgtgtgtatgtattgcatgtatgagttcatcaggtagattctctttgtaatctatgtttgcctttagtggtctgaacattttcccatgccattaaatatttttgtgccttatcatttgtaatgaccacattgtatgcatttattatgatttatttaactagcctcatggatttgtttgtagttctttgctatctatatctttgttattttcttaggctgcatttctaaaagaatttctaaaatagaaagtaaagtaagtacatcccaaaatagagaattaatgtataatatcaagaggactggatcagaatgaggaatgtatctgggattgaatggcttgattaaatactattttgatttcatgttaactatagaattcttttctgctttggcttaactacaagaaattggaatccagatattgacaaacaagataaaatcaaatatggaaaggcgctatattctggaagaaaattggccaaaagaaataagtagacaatttccaagaaatccaaagtcaataatataaaaatatgttatggttttttgcattcaaagaaatgcaaaccaaaatgatgaatagaaacctttgagattgagaataggttatgctagtagttagaatgtatgtttaagtataatcttttttgaaataatttgatattaattataataattttaattcttttgataaacatggacctagcaaattctattat

SEQ ID NO: 46893 - DNA, 1022 bp, Homo sapiens
acaacctaataatgtccagcagtgaaaaactgcttaaattgtggtacatccttaaaataaaaattttatggattttttttattttaaatacctatgcaaggtaattttatgaagaaaaacataaaattatgaagtatactaaaatttttttaaacataaattattgaatacatggattatcttgaaagagttatttctccctttaagtaagatatcagagttttctgtgttttagagattgattgaaaataacaaatagggtggggaagagacaaaattttcatgaaggtagtctctgtatgttatatcatttaaaaattttgaaaaagtattttttctatataagcatttaaaataatgttggatactatttgaagtttagaaatatttgcctaaacgctggaataatatgaagagttggtgtgttttaaatcagcagttctatttttttttttattttagttacaaatactttccaagactggaccttaagctttttgacagaccgcaggagttgaaactttgttttagtagacaccctactgggaatagcattacaaagagtccacctctcatggctaagagaactaaacaggtcagatattctttatctaatacatgttcatttaagatgtaaaatatgtatatgtgatatgcagctcatagtttagaatgatcacccacaacaaccatttgaagactcactttggttgttattgaatttaactagatttcttgcaagcctacttaaaatatcaagtctgggccaagcatggtggctcacgcctgtatcccagcactttcagaggctgaggtgagcagatcacttgaggtcaggagttagagaccagcctggccaacatggtgaaaccccatctccattaaaaatacaaaaattagctgggcgtggtgtcaggcgcctgtgatcccagctactcgggaggctaaggcaggagaatcgcttgaacctgggtgatgcaggttgcagtgagctgagattgtgccactgcactccagcctgg

SEQ ID NO: 46894 - DNA, 1038 bp, Homo sapiens
cctcctgattgctaggactccaggcgtgccccaccatgactgctaatattttattttttgtagagatagggtcttgctatgttgcccaagctggtcttggactcctgggctcaagtgttcctaggtctcccaaagtgctgggattacagccatgagccactgcacccggcctttgttttatttttgaaattttattgaggttggttatgaggactcatgcctgtaatcccagcactttcagaggttgaagtgggcatttgcttgagcccaggagtttgagcctagcatgggcaacatggtgaaaccccatctatacaaaaaaatacaaaaattagctgggcgtgatgtcatgtacctgtagtctcagctactccagaaggtgaggtgggaggatagcttgagcccaggaggcagaggtcgcagtgagccgagatcacaccactgcactccagcctgggtgatagagaccctttctcccttgcctccccaaaaattatctgttaaaaacagaagtacattacacagggatatgtggacttggaatatgtgacactgtaaattccaagtcactgtggatcttgtcttgtcttttcattgttacatccctggcaccagtaagcagtacctggcaaaaggcaaataggagatacctaataaatatttacacatgaaggaatgaatgaaaagtctataaaatgtttttaactttcatcccgagtttaaggaattaattagaggtatatgtaaaaatagaggaatttaccaatgtaatttatataagattgaagcattttgaatgtttaagcaacaggggagttagtaaatacataatagtatatcagtaaaacagattagttcacaggtgtttaaataattagaagaaaatttaatgacattaaaataattacataagaagtacaggtgaaaaacaatattctaatttgtaaagatttatatgattttatatgtatgttttaaatgactagaaagatgtatatcaagattttgattatattctctgactgttgatatcataag

SEQ ID NO: 46895 - DNA, 1050 bp, Homo sapiens
caaggcgggtggattgcctgagctcaggagttcaagaccagcctgggcaacacagtgaaaccgtctctactaaaatacaaaaaaaattagccaggcgtggcagcgtgcgcctgtaatcccagctacctgggaggcggaggcaggagaatcacttgaacctgggaggcagaggttgcagtgagccgagattgtaccactgcactctagcctgggcaacagagcgagactccatctaaaaaaaaaaaaaagaaaagaaaaaaaaatttcaaatgtcctgaaagttgaaagaatcgtataatgaacaatcatgtattttccacctagatttaattaactattgttaactttatctctttctatgtatgcatacatttttatactgagccacttgaaaaacagttgcagactttattctgtgtcccccctaaatactttggcatgcattttcaaaaaacaaggacattccttacttaaggtattacgatgtatattcctttgtaggtgaagttccatttccaagaggcatgaaagggcaagactttgaaaaatcagatcatggttcttctcaaaataccagcatgtctagcatctatcagaattgtgcaatggaggtaaaagttctatattcagttcatgataaagtagctgtaagcatatttttatttcagaatggcatttaacaggattctaagatacccttgtggacagtataataaaataagtcattttgttgaatttgcttgatgtcttatgtaagtaagacattgaactggtagtttacctgtgaaataaaagaactgttattaataattccaaatttgatcagtagaataaaaaaaatcccattatctcaagagaattcctgttaagattaatttttattaaacgttctcagtgtctgcatttttctgtttttaggttttgatgtccagttgttcacagtgtagagcttgtggagctttagtttatgatgaagaaattatggctggatggacagcagatgactcaaatttgaatacagcttgtccattctgtaaaagcaacttcttg

SEQ ID NO: 46896 - DNA, 1605 bp, Homo sapiens
atttattcttaagttctactctatttcccaatcattgcacatgttggtttatgtaaccaaacctgattttagtatatgctattaggacatacacgtggagaagaatggaggaaactttttattaaatgtttttaattgttgaaacacttaagtaaatgtgatttttaaagactcatagttattaaaggtattgtattcattattttttatttattccttcattcagcaaagacagcaactactttggtgctaggtccttaacttatctttaaggaacttacagtattgcatggacttcataaacaacaccaaaatacaatgggataaacattataattagtcgttcacatagtatagtgggggatagagaaaactgtgtgcaaggtttgaggagattcagagaaggctttatggaggaattttcatctgaattgaagtttgaaagtgagtaggaattagttggtgaggttagaggataaggcattctgggcacaagaaagcagtgaggacaaatagataggttagaaacgggacatagacccttaatgtgttaagatagagaatagatcaactttaaaaagtaaacaagggtaaataatgaaagttctcttccacaccgtgttagccattttgagctttaatctggaggctatgttgatccatgagtaatagattttaagtggaagaaagttaacatcagtttcatgaggcaatgtgaggaatgaattgtagtggggtaaggcagacatttgcattacatgtgacagaactccgaaaatgcagtgctgctggagagaagaggatgaattccagatatattaaggtgattgagttagtggccagatggatgtaggggatgaaggagtgatggagtcaaggatacctcctaggtttatgacttgccgagataggaatcacatgagcaatatcagatgtatggggagaataagatcagtagtcttggacatgggtttaggtcacacaattggtgctgttcagtgggtatttggctgctttggcctggagttaaagagaggattctaggctggagatagagattaggatgctatcaatttataggtagttaaaacaatgtgagaatggatgatgcctaagagagtttgtagaataagaaagaataaagcagaagggaaacgctgggaaacactaccctgtaggaaagatgacccagtgaaaaagacagaaggaacagcctaatgacagtggatgtctagaagataaggagggagagaatccaacaagaagagactggtcagatgccatagggaataggagaaagagctaactacagtttttggaaggtttcccagataggcctggatcattaatttgtaataatactagttcatatgattctgtgacttttggcagcaaaattcagtagaaccagagatgataaatagttggattgatacagtatttggattttgttacgtgcgtatggtaagattgcaaaggagttgaaactattggtgaaagaatggtcagagtgatggaatgtgaagtttagactggatagggatgacgatagagccaggaggagctgaaagattgagataacataattggttcaaaggattaaaa

SEQ ID NO: 46897 - DNA, 1028 bp, Homo sapiens
tggaggatactattcacagttttatttttctgtgcctggagtctctttgttaacatagataatcaagaaatgcccatacgtgttactgttaaattaggtgaaaaaaatatatatatatatttatattgtttagtgtaggatggctatttgaattctgttatagaacacttaagtagcaatgtaggctgatttatccttgggttttgtattttaaaaaatcagtttaggctagtatctctgatttgttagaagatgaagtgaaaagtatattagataaattcaacctggtggggaatggggaattaagcttctcttcttttatttctttttctagatatgaactatagctttttctttgtccctattgtgtttcatattagttttattaggttcttgtgattgtgtcctgtcctttgcaaatatttcttattgttcttctgtaaccactgctcgatgttagcaccatatttctttgattcacacacgttttttttcagattttaacatctttgaaattggattgcctctagtaattgatggcagcagttgagatacagttggtattgcctgcacatttgtgaacttgggcatgattttctacacgagtctaaaagaactcttgtgtgactataaaaccaaaattccgacttataagaagcactgtatatcatagactaattggcagccttttttctttcttagtggcacacagtataatggtgcaacttgcaattcctggtcagttccattcaatgaaatatggtatgttttgtaaaacaggagctcaacctatccatgggtgctcagttcttattactattccttttactaggagataagagacagtaagttggactaaacttaatattcatgtaaatgagtgacttatatcacaaaactagaccacaagcaccacggtcttaaatcagttccaatgtgtgaaatacaaagagaaaaatgaggaaggagtgggtgctgtgtttttatttgagctgttctggagactttgcaggactgacagttattca

SEQ ID NO: 46898 - DNA, 1025 bp, Homo sapiens
tttttaatgaaattattaactgtgacatgataatccagtaagaattagttatttaattcagcaggatatgcacacagtgattgtgggtgttgacctctcaggaagttagcgtttcaaagactcagaggattgagatagagttgacaagatgagtatcaccaatgtgggtttcagggttgctaatttggaattgaaatcttttacctaaaactcagattattctgtttactctagaatatgtaaccatcttcacagtattatgaaaatggaagacttcattgaacaaagatatttaaagcagggggggatttaggttaggcaggatggtaatctgccttactataaaaagcaataggagactgctatttccaagtgacttaggccaaggtcagtagttaggagtgttgatttgccttttctttgtcatctgtagaatgtaataaggtagaattgttttaaaaaaataaaatacacacagtagcaataatactacaatgcattggattttctgggggagttgtggtcaagggagggaatcatacttccttgtgaaggtgaccttacctattgccttgaaggacccaggaagccatctcttaagagaggggctctgagttagcagaggacccagaagatgcatgtgatcagtgtatgttgccctaggaactctgttcagtgaggcattcagaatgtgtctgcttcaaaagaatgacagcatggaaccataaagaagggcattgattcatgtggggaagatggcttacatgggctatggtgatcaaacagggaaaggaaatcaggtacttttgctgtgagccaccactgaattgatcttacagcacctgtagtcttcagtatttgacaacacaggtatcagaagtgtgagagagtctctcttcaaaatacagaggggtgtctatcacttacctgtatttatagtgctttctttttgataataagtaaacagtatctcatatactgtaaatgggatggtctgtgtcgtggtatatctcatataccatgat

SEQ ID NO: 46899 - DNA, 1045 bp, Homo sapiens
atggtctgggcagtattttcaaggtacagtttctttcctctgtgaattagctggaagcccaaagccttataaccttatattcaaaattcaaaaggaagagagaagtaaagaatgctcagattggccttgcttaggtcatgtgtttacattggactaaccatcatgatgggataatggggcactttacttggccatcctgggtagaatagaagtaggtgaagtatcaggtctaaaattgtttctgccaccaggttcatgtggaatggggtgagatggtcccccaaaggaaggatagatagtgtactcatcatagaagtggaaatgtgcaaaataggcaaaaaatgtaaagcagaacttctcagtttgtcttttgggggacactgaaatgctgtatatgtggtaggtgtgccgagatattatcctgtctcagcattctggcagccagttagttgtcttagctcaggctgcctgaagtctctgtctggtagcctctggccacctggtatgtagaagccttataggatgcttaacagtatcttataaatatttgtagagggaatacctaacaaaagattttattgttttggaaatcaaggctacttgtttgtggttttaagacctgagaaaatgtgttttcctcctatgtttctatccataaggtttaagggtttatggtaagattaaatacttaggtatctgaactgaacatcaaccacaaagatgagtaattttgagataggttgagttggtctaaaataaaagtgtaaatagtttaatatctcaccttcaatggaataactctaaatactatgtgtaaggtgtatcaatttctttttgactgatttataaaatagaatatgccaaagagcaaaaactcataaatttgattttagagaaccacaagttccttcctcaaaacgtatccccattgatgagtttgacaaattgagttttgcaaaactcagtgcctctttcaaattcttgttacttgcttttctcttgtttggaagtggcagtagagtcatgcttatttgttttgcttttc

SEQ ID NO: 46900 - DNA, 1083 bp, Homo sapiens
gcaatgaaatagtatgtacagtattcatatattcccccaaaaaatgtatacacagaaatgtacacaaaagcattacgttgcacatgtttctttgtagttttttcacttatcaagatgttatggccattttaccacatttatgcagatctaactcatggtttttggaggctgccggtgttcacagcatatcaacaatttaatgtatgtaactgtttccctattgatagacatttaagttttccaaggttttgttgttgttgcatgcatctgaggccttctcagtcatctcagccttttagaacagctttgtccaaaagaactttctgctatcatgtgaatgatctataatttgtgcagttttatgtggtaaccactagtcacatgtaactattaagcccttgaaatttggctagtgtgactgaggaacagaagttttaatcgtatttaattttagttaatttaaattcaaatttaaattaatcaaattgattaatttaattcaattgatcaatcaaattaaaatagccaaatgtggctagtggctactgtattgggcaacctagctctagaatctctctcttcttctgaacaatgaaaatcaatcattatctatgctgtttattttgtatacctcaaagactatcttaaaatgtttccttgttcttttgtcttactttttgtctatagaaacgatttttatacttttaatctttaaagttgagttcaagttattcagttaatagtgcttgagattatagttgtgagtttcttaactaggctgtgaaccacttgagatgggggactgtcttttgtcagttgtgtcatcaaagcttaacacaatctcagtgtagatttggccctcacatatttttgatggctggatatgtaactcataagagagttttctgtttattattgatgctggaatactctagaagttattctttttagaaatcctaaaaaccattgttttcttaattgccactttcttttaaagcaaaatgtggaatgatcctggtttgggggtcccaaagatgactaacacgtttagttattctctaaaagaactcacaagactcagca

SEQ ID NO: 46901 - DNA, 1082 bp, Homo sapiens
attaatgaattaatgtttaattgtcaatgtcttggtggtaaagttaagaggatattttttcctttttgaaattgaattaaaatagatgtcttcgaaggttagaaggaacaggctttctaagaatagaacagatagagaaaatgaacaaatacagtgggcccttgatattagctggtttttcatctgtggattcaccagctgcagacagagcatatttggggaagaaaataaaaataagaatttagcaataaagataatatgaataaacaatatagtacaacaactatttacatagcatttacattgttttaggcattataagtagtgtagaaatgatttaaagtgtatgaaaggatgtgcataggttgtatacaaatacctatgccattttatataagatgcttgagcatttctggattttgctatccatggaatgaggtgtgcgtatctgtgtgtctgaccatcctggaaccagtccctgtagatactgaggaatgactgctggacaataaacttttgaaatatagcatatggcaaataaaattttttggcattacagtttgtgctatcaagtaagtgctttgcttatagtagatatttaccaaataattttgaattgaatttaaaaaaccattaaaatataatttacatctcatgtaattcatccatttgaagtgtacaattcaatggcttttattatatttacagagttttgtaaacattactacaacgaatttgagaacatttcattacccccgaaggaaaccccatgcccataagacgtcactgcctgtttcacccttcctgaccaccccctgcttcttacttgccctatcctagacaaccactaatctaccttctatctctacatacagccttttgtggctgttttttttctcttaccataatgttttcaaggttcatccatgttgtagcatgtatcagtacttcctttatttttatggctgaataatatcctgttgtgtggttatattgtattttgtttatttattcgtcagttgatgggcattgggttgttctgggcattctgctcatataaatgagatcatataacatgaggc

SEQ ID NO: 46902 - DNA, 1055 bp, Homo sapiens
ttactgttttgttgtatttccttttcattattttttcctaacaggcatcaactaatttctgaaattaacattttttcttataataaatagtaatttagccttattgcttttatgattccattgttttctctgcccatcccctcctgttactataaggctgtacagtttatcaatgctttttaattcataagaaataccctgagtttggcactgactttcctcattccatttctctaagacatcatcattaactgtggttagtactgaagataaatttttaggcactagtgtacataatatatatcagttgttctatgtgtcctttgactaatttagttagcttctctgaaactttgttccttcaaatgaggataaaataagattatacacaaaaaagacctagtgtaatatctgctcacataggtattaataataaagcactaccactaattagttaagttcattttattagaaaaagaatgcttattttcttacctcttgtttttcgtctgttcattcttgtctagaaagtaaattattttatcgatgcttactaaagcaaactattttattgatgcttactaagtgttatataccagttttctttatagatattaccaatgtccagaattgtggaatttgttgaaaatgactgcattactattaattttggtgataatttttttttaatgtttggtaatgaatagctgtgtgtttaaataagtagatgtaatctattttcctttgaggcttgatgatggtagtaatatatctttctgttttgtttaaggcttttcaagctttgcgtgtgtgtgtgtgtgtgtgtgtgtgtgtgtgtgtgtgttcattatttgtgaagctgctgctatgtcctgtgatgtgtgttacagtcataaagtatacttggtattcaccagctcttgccaggccacatttactaactgggggctcatcttttgttttgtgtccagagtgctattcacagaggtcagctcgcattctgtgaagccagttattttgttttctaattgatatcatgtgtgaagcgtgatgta

SEQ ID NO: 46903 - DNA, 1053 bp, Homo sapiens
agtcacaaaccgagggcattctttaaaagatcaaacaagctggacactgggagggttttaatgatgccagttaacatcagaggagctgggctcagtggttgcaaattgtgctcatctgaataaatgccactgagctggaaataatgacatgactaaaatgatggtaattgtgtgctgttctaccattccagtgaataaaatatactggtttaagcttatataatgggtagggtttttttttgggaggggggttggtaaatggggacagggagtgtagagacagagtcactgaagtagggcagtagacaaaatgacgttaatgttttgaaaaggttttggaatttgaaatctgattggaagcattatgtttgtacaagaattattatatctgtttttaaaagtattttattcagcatgtactctcaaatgatctagaattaaacttttataaacaatggtgttatttgttgggcttaaactcgtttctgtgctatgtaaacatgtccataagaacaagaccatcccaccttctccatgcgtaggataaaataactaagagactcatttctaaaaactctagtgataccaaattagacttaaccttgattatatgaataaaataacatatactgaaattgttaatgaaagaagttaacttgcttaaaggaaatttggaattaagacagcgagactggtaagtcttttcatagttatataatttatcagaaagcctcactagcatgcatataagcccagaaattgtatttaaacaatgcaatgtataccttttcttttaaaggtgtttatttttaagtttagaaacgttatagttgaaggaataggatttcttagagtttgtggtctgtactattagttggaggtcattctaaagcctttttcatgttttgagtatacattagttatcttttgtgatttagatgacattataccacataggtctttttttttttaattttgagctttattaaaagctgggcttatttcttttcacaatagcctggtggaatgtattatgccttaggttctaaattc

SEQ ID NO: 46904 - DNA, 1050 bp, Homo sapiens
agttgttcttacttcccttcacagaccctttcacttttttttgcaatattttgttttgaaacgaggattaaatttctcgatctctcttttgaaattgctagtaaatatccttttagctaggcaaagctttaataccattttcaaagcactgactgtagaactttgggattggtgagggaaggtttctttccccctccagatttgatgtttaatgcatgttgtgtttttttgtttgcttgctttttttttttttttttttttttttttttaccctatctaggacccaattgtagcaaatgctgcatatagatccctggccaactttactgcaggagaacacaccattcttcatctgcctgaaaaggtaggcatatctgctttctcactggtatttcttaatttgctagggtttacaactttttctctctcatcttaggagatacttacctgatgaatatatacataaccctagatctgttgtccatgcaagatacaaattcatacccattatttgtttatatgtaaaagactgtagaggtttgaagcagatggaagacacctatgatgcaaatgaaatcttcttaaggtgactgggtatatggcttgctccagatctgagtcactcatagggatcactttgcctaattagtatgccatcctggactttaatccaagcatggccttcatagactaagattttatagcacctgtgcagccaaagatctctatttgtgataaacaatgggatgccatatgaaaaaatctgcttttttttagtatctgtgaatggtatataggtagctccagaaaactggatggagaaagtatcactatcttttaagagttaacacatagtgtgatattcagttaggaaaagaggaagtcaaattgtccctgtttgcagatgacatgattgtatattatcttagtttttagactaaactaaaaacatataacctcttctagtatctgcctattataatcagctttaaattagtagatcctattaaggggttaaatatctgatttcttatttagtgccactatgaa

SEQ ID NO: 46905 - DNA, 1049 bp, Homo sapiens
acatgcagtggttttcttttttcattttccgctacatatgatttgtttagctttaatgttttttgtttttttgtttgtttctgtattgggcaacctctagtggtccttaggaaaatcacatttgaatatgaacctatagtcttatcaaatattttgtttatacatcctgttgtcttctgacatcatatttctgttattatatagtaagtaaaatgtcaaatgataaagatcttgggcttaattagaaagaacacaagcaaagatagtggacaaatatctcattttaaaataattgtcctaatattgctaagtatagatagttatgaaagaggtttttctgaaaacacttaaatgataagaaggagccattctcatgaaaatgtgggactgatatgttccaggtggaagggatagcaaatgcagtggcactgacttaaatatcaactttgtgtttttgaggaatggaaagaggccatatgtaagtgtgacttcaacatagcaaggaggtagggtattagacattaactctgagggggagtcagggctagattataaaaggtcttgatcatggtcagaagttgtgattttattttatgcacagtgaaaagcaactggaaggtgttagggacaggaatgacaaaattctggcctctgggcagaggaaggtttatagaggatggtcaagaggaaaagaattcagtaaactagtttttacattagtttgtatgaggaggacaaaagataataagtagataaatagcagtgaaaaatggagagaaactgatggatttgggatagattttgaaggtggaatcagaaggacttgctaatggattacatgtaataagtgagggaaagagaggaattaagcttgagcaacttggtgccatgttctaatttggaggaagactaagaaagggataggtatcaagaggtctctttttaccatgtaaggtttggccagaaatgtagcttagttgtttgtatatgagttaagaacgcatgtttctcttctagcttattgtatttactctacttttggtctcctt

SEQ ID NO: 46906 - DNA, 1867 bp, Homo sapiens
acatatttgatatgaagtacaaggaataatgttagcatctgtgcaatatgaaacaattaggtgaacattgtgaataataatggggagaagtggtatctgtgcttattacacatttcccctagaaaatactgtgaaaagtatggtttgctgtattttagatactccataattaccatgtggatgtgagttgttatggtaactgggtttctccccttctattaaataacagaataaatggttgcttgagatgtgactgaattgtcagcttaattgtcagctttcaagctaatgttaccctgattggaaacagtggagaggtaggagagaaggagggaaagagggaaggaaggagaaaaggttggggagagaatgttaaatttccagaaaacacctaggaagagatgagtgtcattttactttaaaaagtgtcctcccttctcttcttctcactatctgtcagaggacaggtctaacaaaaaattattttgccccaacaagattactgttgatggaatactgaagcccattatttcttgtatataaacaataggatattgagtggcttttggggtctctaataccagttgcaaatggtttttttttctgggaatgtggaaacaatgtgtgtgtgtgtgtgtgtgtgtgtgtgtgtgtgtgtgtgtctcataaagctaaatgtagtggttcagtatgcatatgtgtgtctgggtagcagttgaagttaaatacatttattttgataataacatttacatgtggcaaacatgaaaaatgcctttgtaagattggggttttaaaattaacagcaaatacttagtttacttgtcaatttttacatgctactcttccaatcccattctagttcgacaatcaaagaatgccatcaaagtttgttacctgatttatagtatttaatgaagggctgttataatgagtattttcttgtagatggaataagcatatttgttaagatcactcaagaggtggaatgcaataacaaatttttgaacaaagtattctgaactgtaaattaactaactagatggatatgtagtcccttgtagtaaaacatgtatgaggaaacatgattaccttttcattttctctcccatcattcccctacaattgcgaattatgtttctaagcagaacatttcctgttgtgatagtatttcaaatatacttaattaaagcttacatcatacagatttaaaagtttacagaatttcaatatataaaaattataatatctgctttaaaattttactgtgtcattcaatatgtttttatctggaattaaacctttcctggctagaacattttagacttgcttttgtaaaatctgcaaaactgtcttctcaacaactctgtgcctatttaaaaaaagttttaaattttgtgtttccagaatgatcacaacttgaacaccataattttctacaaatacttgcttatgatagtatgattttcacacgataggaatttgtcttaaagaggatgctacatatttagttctgttaaactccgcaggtccttaattgaacacttatgtgcaagacactgttatgggtaccatgggagggattccagcatgaatagaacatgacctctgctccttaggattgtatgagattaagatctaaagacagaatctgtggagtgttgtgggagaggcacatatatactggaagtatggagatgagaaaaattatttcagtaagtagaaatgagaggaaaatcggtcattcaaggaagaggaagcagtgagtgcaaaggtcctgtgaagtataagacaagcttgggaatcggttcgtaatttgatgcagccagaatgtaggttatataaaagagaggagcaagacatcagg

SEQ ID NO: 46907 - DNA, 1080 bp, Homo sapiens
tgtggagattttctttgtgaaagcttgaagatattatcttctccctgctaaattccagtaaaataatgttgtcaattttgtgcgtgtgacttttgttttaaggcatgggggaaggtgccagaaccacttggtgacaatggcattatgatctattttccatgaatctccatgaggatattcattgactcagtgagttagacaaatttccttattgataaaacactctcttggaactgctatacacatttaaataataagcataacattgaatattagctaaatcagattcattaatggtgtctatcatttccttatgctttgttctcttgaatgcaagtgaaagttgtgattccaaatagcttcagccaaagattagttcacaaactaagaaatttaagagtagatctcatctgacacagctgcatccagtgaatcaagtgatgccgtcaggctttgttcctctcagaatcattcctcatagctggcaagatgtctgccagtgacctcaaagggaaagaaaggtgtctgcccacagatacagcagaagcaacatgaggaggactctggttcagactggatgcctaggcccagggaggtcggtcacatgtgagtctctgagcaagtatctgggcccagggaggtggggaatgctaactgtccaggcctgggtcatatgtccactcctaagtctctggatagagaggtgtcaaggcagacccacccaaaccacctgaactgggtttcctccagaagaaagatgatggggtgctgggctggcaaaaaaatgacagatatctcccctgaagatcaattttttaaataagtacaaatctctttcttaatcggggtgactactggactaaagtaaatgcaggtttgtgacgatattctcaagggttgcattttattcaatggcttgagactcagccagcatttaaatttggtctatttgctaatgactctcctcacagccagtatctgggctctgtgtttagccaatcatataaacgtactgatgcatacgtatatgggatcactggaagaaaaattatgccactgaaataatgtacctttgtgtct

SEQ ID NO: 46908 - DNA, 1043 bp, Homo sapiens
gagatggtttctccctccaccatgtgaacatatagcaagaaggcattcatctgcaaaccatgaagaagaatcagctagcaccttggaacctcatcaggaacttaattgtctagcacctttatcttggacttccctgcctccagaactgtgagaaatatatttgttgtctaagccacccagtttatggtattttgttatagcagccaagctaagacagcaattagtaccaagaagtgtggtgatgctataaccaatatataaagatgtggaagcagctttgacgttaggtaacagatagaagctggaagagttttgaggtactagagtacctggaagagtactggaagagttttgaggtactagtttttttgctagaaaaagccagtattgccatgaagggattgatagaggtgattttggtgagggctcaaagagaagagggtgggagagaaagcctccatcttcatagagaacacgtaaatcaccatgaagataatgttggtagacatggacaataaaggccattctgatgaagtctcaaatgaaaatgaggaacctgttatgggaaactggaagaaaggtgatctttgttataatatgccaaagaacttggatgattgtgttcatgttctagtgttttgtggaaagtaaaattgtgagccatgaaattagatattgaactgaagagatctccaaccagtgttgaaggagtgcctcggtttatcttgactgcttaaagtaaaatgtgacaaaaaatgaagacagaattcttaacaaaaacggaaccagaacttaaaagatgtgggaaattatcagtctgtctgcattacaaaaagataagaaaacacgtttggtagagaacactaagagtgtagcagacaagtcatccaattagatttatgtgggtgtgaaccacagacctaatcagccaccccagcaggaacactgctagtttgtattgaaaggaatggagatgggacagaatgagggaagactgttggacttcttgaatttgggaccatagagctattcagctgtgaatg

SEQ ID NO: 46909 - DNA, 1013 bp, Homo sapiens
aatgagataccatctcacaccagttagaatggcaatcattaaaaagtcaggaaacaacaggtgctggagaggatgtggagaaataggaacacttttacactgttggtgggactgtaaactagttcaaccgttgtggaagtcagtgtggcgattcctcaaggatctagaactagaaataccatttgacccagccatcccattactgggtatatacccaaaggactataaatcatgctgctataaagacacatgcacacgtatgtttattgcggcactattcacaatagcaaagacttggaaccaacccaaatgcccatcaatgatagactggattaagaaaatgtggcacatatacaccaccgaatactatgcagccataaaaaatgatgagttcatgtcctttgtagggacatggatgaagctggaaaccatcattctgagcaaactatcgcaaggacagaaaaacaaacaccacatgttctccctcacaggtgggaactgaacaatgagaacacttggacacaggaaggggaatatcacacacaggggcctgttgtggggtggggggaggggggaggaatagcattaggagatatacctaatataaatgacgagttaatgggtgcagcacaccaacatggcacatgtatacatatgtaacaaacctgcacactgtacacaggtaccctagaacttaaagtataatttaaaaaattaaaaaataaatgcacaagaaacagaaacacagcacaaaaacaaacctatcccctgtggacacaccaccactacttgatatgtgtaatgccaattgctcaactagctaatcagttcctactgttggttggaattatttctcttgatattgtggaggaccagttccccccaagaagaattcagttgtcacttaacaatcttttttttttttttttttgagacggagtcttgctccgtcacccaggctggagtgcagtggcctgatctctgctcactgtaatctctgcctccagggttca

SEQ ID NO: 46910 - DNA, 1019 bp, Homo sapiens
actaccatacttgcctacttttaggtttgattttctaccttgagttggttaaaatacctctctatgctgacttgtaattcagacagtcagaagtaaatgtgatgtagtccaaaaaggtgccctacgttttggttacttatagaatatagaaggccttcaaatgtttgttgatttttatggaaggctttgaaatatttgttgattgatgttcagtaattttcagatttcaaaaaaataactagggcttggcaggaatggagaagagcatatgaataaatgaatttgcttagaatcttatttctaataaaaattaccaaatacaataatcttctctgtctttttctctcttagattggaataattggtggaacaggcctggatgatccagaaattttagaaggaagaactgaaaaatatgtggatactccatttggcaaggttaatatccaacttgtggagacatgttttttagttttttcatttctccttgctggcttgatttttgaattaaaaaaaaaaaaaagaattgcttttgttttggcagcccagggctgtctgctcccagcagagagggccagaagttctgctgttgggttccatcagctgagaaggtgtctgatgggcgcctcacactttgatgttttgagaaaatggctacttagtatgtaaatcacttctcattctgttgctggaaatcagatactcatttcagaccacagactcatttcagactgtacttttcaaatctacattcaaatcttctaatttgtggccaataggtcacaccacactaattaggggacaggctgatgactaataggatgaattattgttacgaagcggcatttgagtggaaagaattgttttggggaattagaacatacctgatgttagttgaatgtgtaactgagctagaaataaaatgctcctccttttataggagaggttgcttgttctccaagcccatgtcactcagcctaggccggggtgagggtgtctgcattctcctaattccatat

SEQ ID NO: 46911 - DNA, 1041 bp, Homo sapiens
cttttgttgccattgcttttggtgttttagtcatgaagtccttccccatgcctatgtcctgaatggtattgcctaggttttcttctagggtttttatggttttaggtctaacatttaagtctttaatctatcttgaattaatttttgtataaggtgtaaagaaaggatccagtttcagctttctacacatggctagccagttttcccagcaccatttatgaaatagggaatcctttccccatttcttgtttttgtcaggtttgtcacagatcagatgcttgtagatgtgtggtattatttctgagggctctgttctgttccattggtctatatctgttttggtaccagtaccacgctgttttggtgactgtagccttgtagtgtagtttgaagtcaggtagtgagatgcctccagctttgttcttttggcttaggattgtcttggcaatgttcatggttccatatgaactttaaagtagtttttcccaattctgtgaagaaagccattggtagcttgatggggatggcactgaatctataaattacctatggccattttcatgatattgattctacctatccatgagcatggaatgttcttccatttgtttgtatcctcttttatttcattgagcagtggtttgtagttctccttgaagaggtccttcacaacccttgtaagttggattcctaggtattttattctctttgaagcaattgtgaatgtgagttcactcaagatttggctctctgtttgtctgttattggtgtataagaatgcttgtgatttttgcacattgattttgtgtcctgagactttgctgaagttgcttttcatcttaaggagattttgggctgagacgatggggttttctaaatatacagtcatgtcatctgcaaacaaggacaatttgattactcttttcctaattgaataccctttacatctttctcctgcctgattgccctggccagaacttccagcactgtgttgaataggagtggtgagagagggcatccctgtcttgtgccagttttcaa

SEQ ID NO: 46912 - DNA, 1028 bp, Homo sapiens
agttggaaaagcacagtattagggtggcagtgacccgattttccaggtgccgtctgtcaccccttccctttgctaggaaagggaattccttgaccccttacgcttcctaggtgaggcgatgcctcaccctgctttggctcacactcgatgggctgcacccgctctccggcacccactgtccgacaagccccagtgagatgaacccggtacctaagttggaaatacagaaatcacctgtcttctgcattgctcatgctgggagctgtagactggagctgttcctattaggccatcttggaaccgcctctcccacattttctttatctgttcatctgttgatggacgtttatgttgcttccatatcttggctattgtgaataatgctgcagggaccatggaagtgctgatgtctttcttgacgtaaaatttcatttccttatacactctgagatgggattcttggatcatgtggtagttgatattttcagttttttggggaattttagtaatggctgtattaatttatattcctaccagcagtatacaagggttctgtttttgtcacatcctcatcaacacttactttgttttgtcattttgataatggccattgtggcctggcacagtggttcacgcctgtaatcctagcactttgagaggttgaagcaagaggattgcttgagcccagaagtttgagaccagcttgggcaacatagtgagaccttgtctctgtaaaaaataaaacaaaaattagccatgtgtgttgatatacagccattgtcccagatacttaagagactgaggtgggagaatcgcttgagcctgggaggtcaaggctagaatgattcatgaatgcaccactacactccagcctgggtgacagcaaaaaagccattcaggtgtgaggtgatatcttattgtggtttttatttgcattttcttgatgattagtgatgttgagcatttttcatacagctgttgtccatttatgtgtcttcttttgaggaatgtctattcaagtcctttgc

SEQ ID NO: 46913 - DNA, 1055 bp, Homo sapiens
tcttcaactccatctggaattgctttggggttaacttagcatttcccctaaagcgcatatgacagtgggttgggaggagctcggatggggtttttgttcctccagagcgctgaggccttatttctgagtgaggtggccttggtgccagctaatgccactgtttagtgtgtgatgaactagaagtaacaggttaattttggccagtagacttgccagctgtgtaaacggaaccagtgaaactatttctcagtgctgcctcccacccctggaagaggacatcatgttatctacctgcccctgttggcttcccttgacccatctctcccatgctgtcccctcctccctgtgttactcatcagttcaaatttagaataattgaatgcacagagaaagtggcttgttctgaaaacttctgacaagaaatttccaggtgacttggtgctagattaattttagcctctcttatggattcaaaactgttttgtcagaagacttgaactaagacactttagaattaattacggctgggaaaaagaacaatctaaatgaggcagcgaacaaagattcctaaatatggagcaagacaagtggctctttatttcagtgggtcactggcatgaaaaaatatagttggggttacaggcaggaattactcttagagacatgggaattaaatgcaaggtaagtaccttgtttggaccctgaaactaacaaagcaactgtttaaaaacaaatttttttaagacattggggaaatttgcatctgctctgagtcaaagcctgggatttgtgtttgtgaaaaagctaatagaggaagcaagttggacacaatttaagaaattgttgaatctgggtgatgtgtatatggtgttaagtatatgattttccacgtctgtgatgatgaaacatttttgtattgacttcttaagtgtcttacctggcctttctgagcccacagttgagttgcacctgcaatccaaagtggttaccccgtcacggctgccagaccacagacactttaattcttgttgtgcggtgtgttgctgccagcccag

SEQ ID NO: 46914 - DNA, 1051 bp, Homo sapiens
tctttaggcaaaagctagcatgatgaatagaacagtacctcacatcccaatactgatgtcgaatgtaaatgacctaaatgccccacttaagaaaagatacgcaatggcagaatggataaaaatctaccaactaagtatctgcagtcttcaggagaatcacctagcacacatgaactcacaaaaacttaaggtaaaagggtggaaaaagatattccatgcaaatggaaaccaaaagcaattaggaggagctagttttatatcagaaaagaacagactttaaaacaacaacagttaaagcaaagagggacattatataatgataaaaggagtagtccaacaggaaagtatcacatttctaaatatatatgcacttaacacttgagctcccaaatatatcaaacaattactaataggcctaagaaatgacatagatggtaacacaataatagtggggcacttaagtactccactgacggcactagacaggtcctcaagacagaaagtcaacaaggaaacaatggacttaaactataacctagaacaaatggacttaacaaatatatatacccaacaactgcagaatatacattcttttcatcagcacatggaacattctccaaaatagaacatatgccacaaaacaagtctcaacaaatttgaaaatcaaaattatatcaagtactctctcagatcaaagtggaataaaattggaaattaactccaagaagaatcctcaaaactatacaaatacttggaaatgaaataatctgctcctgaatgatctttaggtcaacagtaaagtcaagatggaaattaaaatattctttgagctgaatgattatagtgacacaacttatcaaaacctctgggatacagaaaaagtggtgctaatgggaaagttcatagcattaaattcctacatcaaaaagtctgaaggaggacaaatcaacaatctaaggtcacacttcaaggaactagaaaaacaagaacaaagcaaacccaaacctagcagaagaaaagaaacagcagagatcagagcagaactaaatga

SEQ ID NO: 46915 - DNA, 1060 bp, Homo sapiens
tgaatatcactgcctcctttcttcctttcagaatatggcccagttttctgttttattaccaagacattaaagtagcatggctgcccaggagaaaagaagacattctaattccagtcattttgggaattcctgcttaacttgaaaaaaatatgggaaagacatgcagctttcatgcccttgcctatcaaagagtatgttgtaagaaagacaagacattgtgtgtattagagactcctgaatgatttagacaacttcaaaatacagaagaaaagcaaatgactagtaaacatgtgggaaaaaatattacattttaagggggaaaaaaaaacccaccattctcttctccccctattaaatttgcaacaataaagggtggagggtaatctctactttcctatactgccaaagaatgtgaggaagaaatgggactctttggttatttattgatgcgactgtaaattggtacagtatttctggagggcaatttggtaaaatgcatcaaaagacttaaaaatacggacgtactttgtgctgggaactctacatctagcaatttctctttaaaaccatatcagagatgcatacaaagaattatatataaagaagggtgtttaataatgatagttataataataaataattgaaacaatctgaatcccttgcaattggaggtaaattatgtcttagttataattagattgtgaatcagccaactgaaaatcctttttgcatatttcaatgtcctaaaaagacacggttgctctatatatgaagtgaaaaaaggatatggtagcattttatagtactagttttgctttaaaatgctatgtaaatatacaaaaaaactagaaagaaatatatataaccttgttattgtatttgggggagggatactgggataatttttattttctttgaatctttctgtgtcttcacatttttctacagtgaatttaatcaaatagtaaagttgttgtaaaaataaaagtggatttagaaagatccagttcttgaaaacactgtttctggtaatgaagcagaatttaagttggtaatatta

SEQ ID NO: 46916 - DNA, 1030 bp, Homo sapiens
ggtggtgggcacctgtagtcccagctactcaggaggctgaggcaggagaatggtgtgaacctgggaggtggagcttgcagtgagcagagcttgcagtgagacgagcttgtgccactgcactccagcctgggcaacagagtaagactcagtctcaaaaaaaaaaaaaagagtgaaatgctttttgtttgcttcagttttttatcatggggagatctttttcctcagaattgttttcttttcactgtaggctattacaggatacttcaggatcaagatacagaaccttttatttaaagagtttgtaaagtcaatgtgtttgtttgtgtctctgagattgacttcaagataataagctgctaattgtaaacaaaacagttaccctccagtattaatatgactcattagtgtgagccatttgggtcaagtatgattatgacccttggacttcctgatgtagtattaaatttcaactctggttatccattagcaatctgtagagaacttaatgaacctgaacccaggcttctctagctctggtaacgtgtgattgttttcactacaatatgatacatagatggtaccttacttttcctcattcttaataggtgtctaagaatgtcagggcaaaagtatgggcatttttcttgctatgttcagaaagtacagttctctccaacttgcagaggtacttttcttgattaaatagccttctctagcaacatcattttcagactaactaaatgaatgcagtatactcttttctttgttctcaatcattcactccttatgcaaagccaatataattttcctcataccttatgcttgaggatattgttgaagaacacttcctggaacacttctcacttgtgatgctgtactaattttttttttttaatttaagctagtatactaagtgaacaccatggtcagttgtgagcattttggtttccgcaaaggatggatggtgagcatcatgggaaagctgtagtttagtgacttagcccttagtgattaatagatttgcatgtac

SEQ ID NO: 46917 - DNA, 1052 bp, Homo sapiens
ttccatccttctagttcctcagactaaaaacttgaagtccttgactcttctcttcaaaacccacattaaaaccaggaaaaatttatttaccatccaaatatgtcaagatactgactattcctcattacagctactgcttccaacctagtctgagccactctcatctcacctggatactgtaataacccctaacaggtcctgtgtctacttttgttccctagagcaagcaacccaggaggcagaatgatctgtacaaaatgctatttcacttgtattaaaatcccacatttatgatagcctatgaatccccatgtgatttgcacttgccctcctatctctctgacttcctctcactactgtcctcttgctcactctgctccagcccttttccaagaacacaccaggccccctcctgcctttaacattagagtatttggtttgtgttccttctacctggaacactctcccagcagataaccacctggcctcactacagcagctccttcagatctttgctccaaaatcaccttagtgggtcaaccccaaacatcgtattttaacagatgataatgcccttcactccatgcccaaagtactcctaaggactcttacaagcacagcttttttgtttttcccatagctcttaacttctccctacttactctagtatttgtatatatttgtttattgttttgtaactcccaacacacacacttcctccaaaatgtacaacctctgtgacagcaggaaacttgtcatttactgatatcctaaatgaccagactagtgcttgggatttagtaggcttccagccaatactatcttgaatgtacagcttcccaatacatatggcttgcaaagccgtgtatgttctgacttactccagcctctttctcacctcccacacctcatggcactctaaatcagtgctgtctgatagaaatatgtgagccaatatgtaattttaaattttctaggagccacatttacaaagtaaaaaacagttgaaattatttataatatattttaatataatatatccaaaatgttat

SEQ ID NO: 46918 - DNA, 1118 bp, Homo sapiens
gaatgatggtttccagcttcatccatgtccctgcaaaggacatgaactcatccttttttatggctgcatggtattccatggtgtatatgtgccacattttctttatccagtctgtcattggatgggcatttgggctggttccaagtctttactcttgtgaatagtgccgcaataaacatagtgtgcatgtgtctttatagtagaatgatttataatcctttgggtatatgcccagtaatgggattgctgggtcaaatggtatttctagttctagatccttgaggaatcaccacactgtattgtttcctgactttttaatgatcgccattctaactggtgtgagatggtatctcatggtggttttgattagcatttctctaatgaccagtgatgttgagctttttttcatgtttgttgactgcataaatgtcttcttttgagaagtgtctgttcatatccttcgcccactttttgatggggtggtttgtttcttctaaatttgtttaagttccttgtagattctggatattagccctttgtcaggtgggtagattgcaaaaattggttattttctctgctcctcaccctcctcccacccttaaccctcaagttggccccagtgtcttctttgtgtctgtgagttcttatcatctagctcccacttataagtgaaaacgtgtggtatttggttttctgtttctgtgttactttactaaggataatggcatccagctccatctatgttccaacaaaagatatggtctccttcttttcagtggctgcatagtattccatggtacatatgtaccacattttctttgtccagtctgtcattggtgggcatttaggttgattccatgtctttgctgttgtgagtagtgctgtatgtgtctttatggtagattgatgtatgttcctctgggtatatacctagtaatgagattgctgggtcaaatggtagttctatttttagctctttgaggaatccccacaccgcttcccacaatggttaaactaatttccactcccaccagtatcagtgttcccttttctccacaacctcgtcagcatctgttatttttttactttttaataatagccattctgactgctgtgaa

SEQ ID NO: 46919 - DNA, 1094 bp, Homo sapiens
ggtgtttagtgccataaactgtcctgttaatgctgttttgtgtgttccagaaattttagcaagttgtatctctgttctcattagtttcaaggaacttcttgatttctgccttaatttcattatttacccaaaagtcattcaggagcaggttgtttaatttctatgtaattgcatggttttgagcaatttttaaaatcttgacttatatttttattgcgctatagtcctagagtatgtttcatattattttggttcttccgcatttgctgaggattgttttatgtccaattatgtggtcaattttagagtatttgccatgtggcagtgagaagaatgtatattctcttgggttagggtggagagttctgtagaggtctattagatccatttggtccaatgttgagttcaggtcctgaatatgtttgttaattttcttccttgatgttctaatactgtcagtggagtgctgaagtctctcgctagtattgtgtgggagtctaagtttatttgttggtctctaagaacttgctttatgaatctaggtgctcctgtgttgggtgcatatatatttagtatatttaggcttcttgttgaattgaaccctttaccattatataatgcccttctttatctttttctatctttattggtttaaagtctgttttgtctgaaattaggattgcaacccctgcttttttctgatttccatttgcttggtatattttccgccatccctttattttgagcttatgggtgtcattacatgtgagatggatctcttgaagacagcatgccactgaatcttgttttttttatccagcttgccactctgtgccttttaagtggggcatttagcttgtttacattcaaggttagtatcaatatgtgtggatttgatcctgtcattgtgttgttaactggttactatgctggcttgtgtgactgctttatagtgtcattggtacttaaatgtgtttttgtaatggtctttcttttctaaatatagtgctcctttcaagatctcttacaaggcagatctgttggtaacaaactccctcaacatttgcttatctgtaaagtatcttatttctcct

SEQ ID NO: 46920 - DNA, 1105 bp, Homo sapiens
tgctaaatgctgacattaaaattgccaatccaattacctccacctggtcctgcccttgacacatggggatcatggggattacaattcaaggtgaggtttgggtgggaacacagatccaaaccatatcagcactggtacaaaaacaaaaacacaaataatctcaaataaacaatctaacattataccaagaggatgtagaaaaacaagagcaaaccaacccaaaagatagaaggagaaaagaaataaccaaaatcagaacttaacaaagttaatgtgcaaaatacatacaattgttttcaaacatcaatgaaaccaaacgttggttttctgaaaaaataaataagattgaaagagtgcttgctagacttacaaaaaaagagagaagatctaaataaagacaatcggaaatgaccaaagggacattaccatcaaccccacagaaatataaaaaaccctcaaagactaaatgaacacttctgtgcacataaactagaaaacctagaaggaatggataaattctgggaaacgtacaacctctcaagattaaacctggaaaaaattgaaaccctgaacagaccattaatgagttccaaaattgaatcagtaacaaaaacctgtcaaacagaaaaagccttagattagatggattcacagctgaattctaccatatgtaaaaaacaaaaggtattaccaatcctactgaaactattcaaaaaaaaaaaaatcaaaggaggagggactcctctctaacttattctataaggctagcatcattctgatacacacacacacacacacacacacacagaaattctggccaacattcctggtgaacatgtatacaaaaatactcaacaaaatgctagcaaacgaaatccagcattgtatcaaaaagctaatccaccatgatcaagtagcctttattcttgttctgcaaggttggttcaatgtacacaaatcaataaatatgatttgtcacaaaagcaaagcaaaaaacaaataccacattatcatttcaataaatgcagaaaagacttttgataaaattcaacatcctttcatgttaaaaaaaaaaaaaaaaaaactaggtattgaagtagcatac

SEQ ID NO: 46921 - DNA, 1094 bp, Homo sapiens
gcatctacaagccaagaaatccctgatgtcactgacactagatgtaccagatctagaaaagaagaacctacatcgctcctggatccttcgtagagagcaaggcactgctaacacctttattttggacttctatcctccagaactgtgaaagaaaaaaaaatctgttgctaaaagtcccccaacttgcagtactttgttacggcagcccgaggaaatgaatacggaggatattgttgttatttaggtgagaaatagagttggcccagactagtgtgatagaagtcaaggtgaagaaaaaaggtcagaatctagaattattttgaaagtagagctataagatttaccaaaggattgaatgtaggttttgagggaataataaaggaaccaagaataatccaagacttttaatctaaactattggaaagatgttgccataaactgaatgaggaaggctttgggtggagcagcactcaggggaaatacaaagagtccagttgttaacttttagaagcctatttaatacccaagtggagatgtcaggtaggcagttgtacataaaagtcttgaattctggagagaggtctcagctaaagatataaatttctgagtggtccacataacagaggcattttcagccattagatggcacaaggttgaaagagatcactaaggaatgcagagcagagacgaaagcaaggcctaccctgggtactgcaatgttagtaggtcaaggaaaagagaagaaatcagcaaaggagactagaagggagcaactggtgaggaaaaaggaagactaagaaattgtgatgcttgtcactaatcatcagggaaatgcaaattaaaccacaaagagttaccagcttactcctgcaggaatggccataattaaaaagtcaaaaagcaatagatgttggcatggatgtggtgcaaagggaacatctttacattgctagtgggaatgtaaattagtaccaccactatagaaagtaatatgcagattccttaaagaactaaaagtagaactaccattcaatccagtaatcccactactgagtatctacccaaaggaaaagaagtcatataaaaaagacaca

SEQ ID NO: 46922 - DNA, 1102 bp, Homo sapiens
ctggaagacaaactgccgcagtgggacagatgggaaaaatccctacatggcttgccctttctgtcacaaactcaaccactggaaatggaactgccctgagggctgaagggcccctagaacagaatcccaattcctgatggccttaagctgaaaaggcccgccactccagcagctcctggactgaacattactattgaagggacagagctaagggctgctttggatgtggcaggtaggactataagttttctttgggaaatggccttcttggtgcttatgtcttcatgggcaattatcctccaaggtgatggggttaaattgggtgcccataacccaaaggttcactcctcatctttgctgcctgtgaggggagactgtcttttctcattcatttttaatgatagcagaatgtcctacactgcttttgggtagagatattttatttagactaggggcttagttaaccttttccaaatgcaatcttatgcctcaaggaagtcacacacaaggatgaacttcccagacttttccattaatccagaagtctggggctcaagaatatcaggaaaggtcataatgataatgcctatagtaactcagctcatggatccttctagctaaccttgtagaaggcagcttcctctttgacctctggccaaaagggacttcatcccctaattgaaaaatgtctaaaacatggattattaatatactataactcgctatgtaacacccctgtcttacctgttaaaaagagcaatggagcaatggacaatataggctagtccaggacctgcaaatcataaatgaggcagtagtcccaatacacccaatggtccccaacccatatattattctaggagaagtacccccagatgctcatttgttctcagtcttagagctcaaagatgctttcttttgtgtctccctagactcatcctcccaatttgtatttgcacttgaattggggaatgaaaaaggaaggagtctacagctaatctggatagtacttccgcaaggttccagagatggttccaatttgtttgggcaagtcttggctagagatttgcaggacctaactcttgagggttgagggtgtctc

SEQ ID NO: 46923 - DNA, 1115 bp, Homo sapiens
agacaatgtaactagttgttgcaataaagcatggtggggaaaggagaaaaggcacgtattaaacatcttttgaagtcgctatctatatcagtcagttctccagggaaacagaacccattgtgtgtgtgtgcgtgccagtaccacacatatgtatatgtatatacacaccgtcatggggttgcttaacaacagggatacattctcagacatgtatctttaggcgatttcattgttgtgcaaacatcatatacaaacctaggtggtatagtctattatacatctaggctgtatggtatgggctattgctcctaggctgcaaacctttacaacatgttactatactgaatactgtagataattgtaacaaaatgtagttttatatctaaacacatctaaacatagaaaaggtagtatgttgtgctacaactttaggacagctatgacatcactaggggataggaatttttcacatccattataatcttatgggacaccaccaatatgtgactgtggttgactgaagcatcgttatccagcacatgactctgtgtgtgtatacaattttatatatacgtacattatatgtctacacacacatatgtgggggagagaaagagagggagggagagagagagagagagagagagaaagagaaagagagaaaatacttattttaaggaattgtctcagaaaatggtgggggttgacaaattggagacccagggaagagttgttgttgcaagacttgaatccaaaggcaatctggaagcagaatttcttcttccttgagggacctcagtcatttctcttaagctcttcaactgcttggatgaggaccacccatattattgaggataatctgctttttcaagtctactgacttaaatgttaatcatatctaaaaaatacctccacagcaatatttagactggtgtttgactcaaacactgggtaccacagcctagccaagttgacataccaaattaactgtcacattatcccgtcatgcctgaggggttctctgaccctcagttttctgaggatcaaatttaaattgagggatctatctttgtttattggagccatatagctcaaagtataatcattttctctcc

SEQ ID NO: 46924 - DNA, 1083 bp, Homo sapiens
tttgaaagtttaccatgagcaagaattattaaataacaaccacaggaatattggggctcaaacctagagattctaattttgtagacctggagctgatcaacaagtctaaatgttaaaacatcctcacgggtgattctgacatggagccaggattgagaaacaattttctgaaatggaaggggttttaaacttgttgtcctcaaatgactactgaggcaaacaccattcttatagacataagacatacttgggagcaaatgtataataaagtggtatgcttccctagaaaggggacgaccttaaatctttctgtttatggtggtatttaaacatattaaaaactactaattttggaatagtcttactgtgataagtctaactatcaaaggcagtccagagattagcaaataatagaggatgatcaaatgtttttcagaaaatattataggtggcactttggcaggagattctgagaatggtgagagggtgcctctgtgccctaggaaaggtgatagagcttagaaactcagaactcagatggaatgaggagccatgccatatacatctttacaacagtcaccctctagaagaaaactctgtgttgacaataatctgctgacttgtctgtgggtttttgaacagaataaactgtttcttcttttatgtttgtgtattattgcttataaatatattctaaaatatataataacaaacaataacagtacttgcagcttaattaaagaaaaaatgcaagtatcttatttatactaagagaagagagaaacccgaagaacaatggattatccttacatatttggtttgggattacattgagagctacctaaataccagacactcattcttggtcctgactcctactctgttatccatagctcagtacctagtatctggcgcagaaagaagtggaatggaattatcagggagacccagtttttagccaagactaaaaggttttagccaaggggatggaagaatttgtgcatagatagacggcagatgggaattcgtttaaaatggaatggagacccagaggtcacataagacagggttcagaggaagtag

SEQ ID NO: 46925 - DNA, 1029 bp, Homo sapiens
aggggtaattatagaatcagcaaaaagaaaaaaaaaccctactgactattacatatcaatgcacacagtgtgttaatattttcaaaaaagggagggcaatctcagtgtaagtgtaaatgaaattagtttttgtatatatttgctgaagatcagttacctagcttcatatgataaattatttggtgctggtcacaatattgtgcttgccatattagggaaataaaatatcatgaaagtattcctaagtatacattttcccagaggcgtttggggttttatcagtctcgagctctcctcttgaaactgtttcattccttagttatgaaattactaattttaaccatttaaggcataggaaattttacatagattttgctttaacagcaaaacaccctttaaaaaattcatccacttaggtgaaaaataaaagataaaaatgaagccaaatgaatgttattaaatttataaatttatttaactttccagatcttcttggaataaatgtcaggtagtagaatttgtacaaaccttggtaatgtcttaggtttagatacgaacttaacaggtatatttaattttctgtattccacaatggagctagaagcaggactcatgaaaatagtaactatatgttttgcatgtatccttcaaagtgaaatccttaacaaatttaacagtatatattaggctgctgatgaaacagctaaacctgtctgccaggtggcttcgaaaatggaattaatttttacatggcattgataagttactatttcaatacaaccaggtggtaattgatacccaataatgtttgaggtttgctttaaataaaaaaaactaacaaaacaaacaaaaaaaacagtgtaatatagtactgtgggatccacaataacattttctttagtttcccttaatatcaggttgtcattaggaaagattccacaagttatttaaaccagaaatgaagtaacatgtttcatatctatttcaagggataatttttcatgacccagtataatgcaactagcaaat

SEQ ID NO: 46926 - DNA, 1057 bp, Homo sapiens
cctggattgcttctgggaaaaagcgcctagcgcggacgcagccgagctcaaagccgctctggccgcagggtgcggacgcgtcgcggagtcctcactgccccgcctcgctctggcagagtggggagccagccggcaaagaattccgttttcagctgggccaaggggccggcgtctccccacccccttaggctccgccccctgtccgctgtgatcgccgggaggccaggcccgggccgacgcgtcacgagggcggggaagcctgcccaaagatgctaggacgcatgcgccagagactgggccagggagccgccaggaatgctggctgcactgctcgctggatgtccagtaaagccaaggctaatattttgggaatgttcaccactgccctcagctcctaatccccagtaggcggagcagaggatttctgttccttcagccagccagttggtttcactgtggagacgttggtggctcccttgtgaccgagagaaagtcattcaaaataactccgtgtttcttaagatgtctgaaagcgacagctctgcacctgtcatacaagttaaattcatccccaggcagtacttgggcttcacaagtttcataacttgtatcaaacttagcaattttctcttggatgtgtctttctgtttgaattagtcaaccataaaaatagagaaaaatcccgagaatcatgttttgcgtgtgctttttaattctttccatttttgcattatggatacaacccttaaaagagaaaaaaactagttcgagattgagagtggcaacctggcacacataagacaaaaaaaaattatactttaagaatctgagatcccagtttcatcatatttgtacagtaaatctttgtttgcactcttacctatttaaacccactttgtcaggtatcttatttttatttatcatgagtaataaaggaaatttatgcagtaataatgaaacatcataagagaggggtgtggtgctgggcttgtcattaaacaggctgaacctgtcattaaattctcttctgaagatttaaatgccaagtgcttttttt

SEQ ID NO: 46927 - DNA, 1066 bp, Homo sapiens
tccacttctatattcccatgtatttttcaagattaattaaatggtggacttgttcatcattttagtatccgtattagtttgctagggctgccataacagaataccacagactgagtagcttaaacaacaaatatttattttctcagagttttaacttctcctgaggcttctcttcttgacttgcacatggccatcctactgctgcctcttcacatagtcatccctctgtgcacacgtgcccctggatctcttgtgtgtgtccaaatttcctcctcttttgaggacaccagtcagattggattagggcccaccccaatggccttattttaacttagtcacttctttaagggctctatttccaaatacggtcaaattgtgaggtattgggcttaggactttaatataaaaatttagaggtgacagaatttaacccataacaacagcatcttaatttttacacattttacttttcatttctttttaaactgttattaataatttattcatttgaataaggattaaaataaggctaggatattgaaattggttgaaattgctacagtctcttgtatctctctctctctcttttttttcttataagggacaggtttcattcaccttgtcgaccaggctggagtgcaatactgtgagcaagggtcactgctgcctcgaattcctgggcttaagggatgctcctgcctcatcctccagagtagatgggactacaggtgttggccaccatgactggctaatatttttacttttttgaagagatgaagtcttgccatctggcccaggctggtcccgaactcctgggctcacacaattctttcacctcggccccccaaagtgctggattgcaagtgtgaaccactgcacctggcgtcttgtttcctcttaatctacagtttcccccttttgccttctttttttttctttcaatttatctattgcagaaattggctttatctgtagttttctaaagcttggattttgctgaatgcttctttataatgacacttaacatttttctttgtcatttgtatttctcataacttattattta

SEQ ID NO: 46928 - DNA, 1099 bp, Homo sapiens
gggctcctgtaatcccagctactcgggaggctgagggaggagaatcgcttgaacctgggaggcagaggttgcctgtgcactcgggccactgccgtccagcctgggtgacagcgcaagacttcatctaaaaacaaacaaagaaaaacataatccatgtatgtgatgtaaagagcgccaacatgtttatatcctcctatttcaatctacttttacttcatctacatttttagcaataatgtgaacatgaaatcttgaataattagctatctgtaatatatttactcatccactcaaaatattgagcccccccaataaatatcatacactatattctaggtacaggtgataaacaattcagagagtattaatttcaaaacatggtaagtgcatagtgagagagctgatctggtctggtggttgagggaatcaagagatatttgagttgaggtctgcagtattatagaaaattaactaatcaaaagagaggcagtcattccaaggaaggggatgtgagtcagaagaaactgcatgtggcaagctctgaggtgggacaaagcaaggacatattgaaggaattgtgactggagcatagggatggaggaaaacattgtagctagctgagaaataagcatggaaaaatgttgtagagctgtataggccatgttaggacttttgtctttatcttaaggataagccattgatgtgtttataaagacacatgatgtgatcagattttcagttaaatttaaaaaatacttggaatgcattttggagaatggtttaggggagaggcaagagtggattctgtgggccagtagttcagaggataggttatggtagcttggactaaagtgcctgagccaagatggagagaagtagattgctttaagacatatttaaagaataacatcagcacttagcaatgaactggagatggaagatgagggaagggaaggtgttaggcaggtttttacaatgagagaggttggtgatcatggtcaccaaggtagggaatgctggatgaggatgcagtttaaggtgaagattatgagttcaggttcagcaaaactgaacttgagacatggtgaactatcaaggt

SEQ ID NO: 46929 - DNA, 1472 bp, Homo sapiens
ggaggttttgtttattcatttttattcttttttctctattcttgtctgcttgtctaattttggaaaggtagtcttcaagcttggaaattctctccttcacttagtctattctgttattaatacttgtgattgcattatgaaattttgggggttgggagtggtggctcacacctgtaattccagcactttgggaggctgaggtgggtggatcatttgaggtcaggagtttgagaccagcctggataatgtggtgaaaccccacctctactaaaaataccaaaaaaaaaaatcatagctgggcatgggggaacatgcttataatctcagctactggggagactgaggcaggagaattgcttgaacctgggagatgaaggttgcagtgagctgagatcgtgccactgcactccagcctgggtgagttgagagtccgtatcaaaagcaaacctacacatttttgtggcctgtttttagctctatcaagtcagttacattcttctgtattctagcttttttatctgtaagctcctgcaatgctttattagaatttttagttcctttgcattttgttacaacatactcctataactctgcgaacttcattcctatccatattctgaattctgcttctatcatttcagccatctcagcctcagcctggtactgaacgcttgccagagaggtgatgtggtcctttggaggaaagaaggtactcttgattattgagttttcagtgttcttgtgctgattatttcttatctttgtgggctcatctaccttcaatctttgaggttgctgacatttggattattttttcttttatcctatttgatgaccttgagggtttgattgtgttataaggtcaattcaaccaactagctttgtatctggaagactttagggggccatcgttcacctcccaactcctggactgcatgttctaactctggatgacttgtattgggccccaactttgttctctggttcctcgaggtttggagtctactttgttggaggaccaaggtgtggcagctccagctgggtgctagcggattcaggggtgcctgcctccctgcaggcattcaccatgctagtgaaggcaaggcatttttgtggggaacaggaggctcctgctatagactgtctgtgcttttgcactggtgatggtgttggtttggtgagaggcactgaccagtgcagatctgagtgccttcttggtcacctgcaagcaggagggattgctcagggtgtgggaggatcctctgttctccatgcagcattaccacaagagtgaggcactggcagctgcagggcttgctggctgtgtgctgctaaggttctgtctgcaatggtggttgacagaggtcaaggggcatacttccctcctgtatgctagtggggcaactaaagcaaattccacctgtgcagacatgtgcctgcaaagtgatgtggggagttgccatgggctcagg

SEQ ID NO: 46930 - DNA, 1052 bp, Homo sapiens
cgaatgcctcctttgtagctggatgtctaacatcatgatagccacactcacatgaatacagagatacacaatttacaaattaatgtaacataaaactcccatgcagtctgatttcatcttactgacatttctgtcagtcagtgttagcatcttaattatataaatgtggaaactgaaatactcaagaggttccctgacttcccaggccacacagtaagctttggtgccagaatgtatctctaggctttctcatctcaacccagcattcattatactattgctcactgcgtgtagaatcagatttgatttctctgacttttcttagtcacttctgtggttttgtaccactccctctctcactaaataactgcctgcaaaagtaaaaatttccatgaaaacagaaaacaaatgtaccagaaatgttgatggtgtaagagataaaactgggataaagagaaaatgtgttggaaagtggtgtcctttaatgcaacagaaaagtatattgggagaaaaagaaaagagagaaaaatagacaatctgaagtgatgagaagagcaaatgctacagatgtacctgaacctcttcagtaggtgtgatcctgaagagttgtgtataacaacaatgaacaaaaataaaatgtactgtggaaattgtctagctgttgagatcctcctgtgcgatatttttcaaagtgaaaactccaatcaaccctagcttatttatggagaagactttgccccacagtacccagaaagtttcttgacaatatcatatatgcataataaccctgagacaatttttgtttaccaggaaaacatataaaagggaacattaaactttgtctagttctactgcataaacatgtgataatgtgcatggtgaccttctgttgtaaatggaaagagttaagctctctgaatctactgctgaaaggtgaaaacactttcttagggctttgaacttcatttgaaatcttactgaaaaaacactacagactctattttctttatatttgaagatactttacataaaaatctaaagcattttgactt

SEQ ID NO: 46931 - DNA, 1069 bp, Homo sapiens
cttgtatgagcaactaaatctacacaccacaaagccccatgctgtcattttttctcatcctgcccctttattttgatgattccacattgtagttcatgaaaccaataccttctagagtgtggctgaactggcgccagcattaagaaaaggagtttccaaactttttagttttgtgagaaaatgttagaggaagagggaggttaggttgactatttatacttatgtaatcttctgtgaatttgcagtagttatcaccttgtactctcaaaagttttctagctctgagtatgtgaatctgaaagtgcaggaagtaggaatcttagcacaaaacaaccagtttggattatcacacaattaatatgggacggagctggaggatggacctgaacagaatgtatattctttatcactaggttatttatctatctacagatgtctagaaagacctgggcttttttagcaaacgtttgagaatctaggtttctaagtttccattgaccatgaaagagtgattagttttagaagacagttgggggcaacattgtgcaagtcagaagaggggatgaagaaaatcataaagctaaacatgtttgccataggcccaggctgtttttcagcatgtttcacctagcagcttggcagataattcccagtgatcattaggtctgtggaaattctgtttggtttataaagttttggccctgactatgtgtaccactgataacttgtttttctctctcttcccttttcctccaactcgtagccagagctaccttccagatgacttctttctaccactttctttcttcccagtgtaagagaatgcaagtatatgctgatgtttggagcaagaacattcaaaaattttcttattaacataacttctaatggaaatacagtatactactatggtgcatacaaagaagaaatagcaacatatatttgttttagacctgattgctgtattttattccttaggtcctccttgatgtcttgtagaccgtcactagctaattgttacagccatcgaaggaaaaaataaggatttttacttaggacatacgtaaca

SEQ ID NO: 46932 - DNA, 1049 bp, Homo sapiens
tttttattttataagcctttttatttttatttattttactttatttgttgttgctggtgtttttttcttgagacagagtctcactctgtctcagctcactgtaacttctgcctcccgggttcaagcaattctcctgcctctgcctcccaaggagctgggattacaggcacctgccaccatgcctggctcacttttgtatttttagtagagatggggtttcaccatgttggccaggctggtctcgaactcctgacctcaagtgatctgcctgccttggcctcccaaagtgctgggatttacaggcatgagccaccacgcccagcctgcctgatttttaaaattattaaattcatatttgttatttatcagatgcctctgccactttattttttaaaaatttatttttattaaggtatagttaacaaataaaaattctatatatttattgtgtacagtggaatgttttgatatatgtatacattgtgaaatggttaaatcaaactaagatatctgtcatctcatatgcatgccatatttttgtggtgagaacatttatgatctactctcttagcaatttttaatattctgctgtttgacttttaaaccaaggcttggattaggacagtctttgtagcttagttttaggttcagggataacaaaagttgttttatcctttgggcttttgcaacttgccattttcttaatgaagatctgggagaaaaattagtttaagtggtttttaaaatagccattagctcaggacatactcagccaaggcaggataagtagttttgccagcattcttctgtaggtaggttggttgttttttgtttttttgccacagtctttttaaaaaatataactttaaaaaaaccttggttttctgtgattgatctttttcactattttttatagagggccaggaatatgagtaaataattcttgggcttgggtgcagatgatccacgtgctggcagacagaaatctaaagggacaaaagaggctgtcctttgaagatacttttcctggcttgggttttatatttttg

SEQ ID NO: 46933 - DNA, 1111 bp, Homo sapiens
ccaccacagtaagtattttcaaaggaaaacaaagtaaaatttttctcttgtatgagtcacatctctgttggttgtaagtggctgaaactcatcttgaactaccaaggtaagagaagaaacatactggttaatggaattccagaaaggactgaacaatcaaaccattttgaaggacagcatagagctggactctagaacagccaaaacaaggggttaaaccactgcgagggatctctctccaactcttgctcaggcttttctccctggcttgactttcttctctttcactgtagattggcttctctcacatggcaagaaacattgctgctagcacttcccgagttctacgttctacaacatccaccactggtgagagattaacttatggtttttctgttgaaaagtcaaaaattacctgggaaaagtctgattgtctcagattggagatgttgcccatctctggaccaatacactattatgtgtggctgactatataaaaacatggatattttcttggaatcacttggtttgactgggagaagaccattctcaaaacaaaggaagtgcaatttatagaaggtagtagaataggcagataaaacaataattcttcactatattgctcaaataatccccatgacatttttagtatattataaagagagttctaaagtgtttccaaactattatagcaaaatttaatcttataataatttcttcttgaactatgtataatttacctgaaatattttccaaaaagcaatcaatgtgagaaaatgagagccctgtcttcttaaaaaaatgagtaaaagtccacaagttcagaacaaaagaaaatgaggtaaggcctaaaataaattgtgctaagaaagctaaaattctagacaaagtcacatcggcaaaactagaaggttggtactgtgcttcagtttactgcttgctgtttggttaagaggaggggtgatgtgataaaaatagtgacgaagtgagaaaactgacgtattagttttctattgcattataacaagtcaccacaaacttagaggtttgaaataacgcccatgtattatctcgcagttcctgtgtgtcagacctccaggcactgcgtggc

SEQ ID NO: 46934 - DNA, 1042 bp, Homo sapiens
atgtcagtttattactcttgaacaagcaaaaaagttaattcctacattgtgattttggcaaagaatatctctttaagaatttagtcactaagtgtagaaatttgcatttttttagccttaagagaaagtaatagaagatatatattaaattatcttgtttaatcttcacaaatatatactgaagaaaataccattttttccctattttaaagttgaggaagttgataactgaatagattaggcaacttgacagaagttccatcataaataatggagccaggaatgaaactcagttgtctcattacaatattgaaaaagaagggagtgtaaaacctcaaataacatcagtagctaagggacatggtgtagttacactgatgattaatatcaataatgccattactaagtattacactagtcaatggataaaatattactgctgcatgatagcggcaaaagtgataaaactgtcaagagataagatattcaaagcaaaaagtcactcacgactctgtacctatgtttagaggctttctcacctttcacagtggatactgtatttattatttttaatttctttcctaaatttcagtatggtattattaattttaagctaaactaacattatttttgtaaagtacattttaacaattgtattggaggctgcaataaatttgtcaggtcattctaattgttcattttgcctcggagatgtactctgaagtatgtggaagcaactggtatcacaaaataagagtcatatacataatgaaatacaaacataatgaagtatcatattgttccattacagaaaaaaggagaaacttttatcttttgtgactggtgtaaggaaaatggacatttttcataaacaaaccctagtggtttttattattattattattattatttttttttttaaaagcccaggcctccctcagcctcccaagcagctgggactacaggtacacgccaccacaccaggctaatttttgtatattttatagagacaaggttttgctatattggccaggctggtctc

SEQ ID NO: 46935 - DNA, 1053 bp, Homo sapiens
atggtctccttggttttagttgcatttgaagtcagtgaaatggtgaagagtacttacaataattaaaaatacattaagtaattatataaagaaatgaaaaccattatcgggagatattagtctctttataaatatgttaaatctggcatttgtcggtaactaaggttaaaaggattgatggaagggttaaagaacactgaagaacttgacagtcattatgcaataggtgtagcttgtatgccagtttgagctttcgtttttggtgggaaggaacactgtagggaaaactggagttttcgtgtgggcaagaacttgtgaaatcaggttttcttttattgaataattccatctgtattcatcgtctggggaaatctatgtaaaagttggtcaaagaaaggacatttctaatgtaattttggagacagtcttattctattaatattaataaattatagagagatgataaaagtagacttaaaatttagaaattaatacagaatttgggctgctgaataaatgatttataatgctagagaatgttgtatgagaaggtagagtaagaaatagcaaattgttttaattcaaattagcaaaagtattaaagatatttggttcattatgtaccaagagagttgatatatatgttaaaaaagaaataacacacaataaataatctacgacttcattagttttggccattattttttaatcttaggcacaagagagtattcacaatcatgttggaaggctgagactaagcacaacaaagagatttttttctctttaatattaccaaaattagaatgtaatctatcagttattaattgtagacaaagtgaattctgttttgaataataattatgtttccattcctggtactttagtattattcctaggagtttatttcttactttttttagacttttaaatttggactttctttttctgtgttttatttaacttttattcatgtctactgatctgatttaaggccatatggttttaaacagtcttccactttccaaatagttatttcttcaatttctatttctt

SEQ ID NO: 46936 - DNA, 1029 bp, Homo sapiens
ctctgcctcccgggttgacgccattctcctgcctcagcctcccaagtagctgggactacaggcgcccaccatcacgcccagctaatttttttgtatttttagtagagacggggtttcaccatgttagcaaggatggtctcgatctcctgacctcgtgatctgcccgcctcggcctcctaaagtgctgggattacaggcatgagccaccatgcccagcctgtttacttacttttatgacaccatcatcagtggttttactgccaagttataacaggagcaaagtactcaaagcatcaaaaagaccttacacctggacatcatatggcctttagaaagtcagttacttttcttatgctgtaatttctcctctgtaaaatggaatactttataacattagttctcatcttcctacattgaaagaagaaacactgttggtagtcagtaatcaaatttagaatgaattccttccaaaagattaattccactgggcttcagtatccttaatttatgaaaatagatactttcctttcaatttctttgagctcatatacctatacaaattgtagcagcaggaaacacatttgttttactgttgtaattgaagctccaagtgaagataccacttcttctccaacagtgaaacaaaaataaattgaaattccaggttgctttactatgttcatcttttatttggttattttgagattttttttggtagggaaatttctgagtttaggttgtttattctagtagtaggatatgaatgtgtagaaggtgtgtaggggatatgtggatccacaagcttagctggtgattgtgaaaactatagaagttggtatctatgagcgaaagagagtaaatagtgataggttaatcagattttgaaactcaaaatagaaattaatgatcttgggagtgaaaatgtgtgttcaatccagctttttataaaatgtaaatcttgaaagtatttagataagtggcatcttacctattcttttttcagagtttttctctaccctatcaataatt

SEQ ID NO: 46937 - DNA, 1030 bp, Homo sapiens
ccaatcatattgtttgttccacatattcaagttacatgcatatgtctacttgaaaagtctctataagtcattgtaaaagaatttcacctaatcgaacacgtcgaatagtcaatgactaatggcatagagagaaccaaagagagatttttaatttagagccctgtatgtgcaatttttgaaattcatgttgtattttatatctctcataggtgaaatgaaccagaaatacaaggagctaaagaaaagggaggaacatatggacagtaagtgatattcttgtagatataaaaatataatattttcagattgctgttcatttataccaaatcagagacctcattttgggcagatataatggctaataaatgcagaagtgtggacattcaaagcattttgccttgaagaatagtttctagcataatttagagatgggtagaaaattctaaaaagatatgtgatgagtgtctatacgttggggctagattctaaagctagtacttacattcgtagtctgtacagaggaaacctatagaccaggggtccccaatccccaggctgcagaccggtaggaaccaggccgcacaccaggaggtgagccactggcaagcgagcattaccgtctgagctctgcctcctgttagatcagcagcagcattagattctcatatgagtgtgaaccctatcgcgtatgagggatctaggttgtactcttgttatgagaatctaacccctgatgatctcaggtagaacagtttcatcccaaaaccatcacccgcatctgcccccagccctggtccatagaaaaattgtcttccatggtccctggtgccaaaatggttggggactgctgctatagatcatttattgattgaatgttctcttttacatgcttcactatattcacctttagtatctttcacttttatatttagctttccataatacttatctcattgtttattagccctcacatcagatattgtcacttttttctatcaccagctataattttagttgccttttgttagtt

SEQ ID NO: 46938 - DNA, 1032 bp, Homo sapiens
tctgaggtagtaagaagcacaagggaataagcctgcgatgcaataatttaatctgcctaaaattgtctcctagcttgccaacacttcgaagatcagggaactgggtaaatcaggacttgatttcatctgcagctgtatgtgaactggaatgtggaaaaaaaaaaaaaagctaattggagcaagcatgttgtgctgcagtggagtgtattttcattgatatgtttaacctttcatccccttcatctgtgaaaaaatgaaaattgctgacctttgaggttttatgtttttaattaagcaaaatttttttctttcaaataaaatcttatatgaagcccccccgccgcaaaaaaataaaataaaataaagttgagtagctcactgggagtgggtgagggtgtgggtctagagtccattctgttgatttcacctcttccactctcagaaacttctggagcacctttttagaacatgagaaattacagtttctttaaacacagtttaacatggctctgtctctaatttctaatgtaattaaattctataatatgggtgttgattcaggcccacaataatttccataactatttttaaataaaaatattcccatgtcttagttaatggctcattattcatagcaatattgaatacaagaaaatgtaaatataaaaactagagttaaacaacattttgagttcaccataataagatttagtgagaagacgctactaagaaagattagatactgttcaatatagaacacagaaaatacagtgagcaaaacattttagaggattgttatgcttcacttgtgatgcttggttgttaacttggtagacgtcatgccacaatgccaagtagttccttataaacaaggacacacttttatgcaaacattgaaaaagtgtttgaggctgggcgcatggctcacacatgtaatcccagcactttgggaggccgaggcgggtggatcacgacgtcaggagttcaagaccagcctggccaacatggtgaaaccccgcctctactaaaaat

SEQ ID NO: 46939 - DNA, 1136 bp, Homo sapiens
cagagaaggggcaaatcatcctgacctggggagtctgtgggtttttcaaggagcgtcacctgatctggatcctgagcctgtttaccaaggagagaagagctgaaaaagaccttccactcagagcaaatagagcatgcaaaggcacgaggaaagtgggggtgggaagagcatgctggctacagtgtagctgaagctgagagcttggactggaggctaggagagggcttataaaggatggctgaggtcaggttgaaggacttaggtttttaagacaaggaatttttactttataagaaaatgggaagccattggtagattcagactggtgcatgatgatttatattttagaaatgattgaggtgaccataccaaaggtagattgaatggcctcacagggcagctggttgggaggctatttctggaataaatatcttgatagctataggtactaagtggtgggaaaagagctcattagatatggacagacagggaagaggaacagatttaggaaagaaagcccagcatcagggtttgacccattgagttgatggtgcctgaagtattcttggtgcgcatgcccgaaacacactggaaacatagatctggacgtagagacaggtgggaactggagtgatggagccctcagcatactattaagaaggtcgagatgagtaccttgaggagcagctgtgtctcgtccagagggtccacagagtctgctgatgccggtgtcggtgcaggtgtcctgccttgttctgctatcccggggtccctcctttctctccctcttttgctcttctcgaacatgtacacacacaaatagacactcattcactcaggcagggatcagcagactttttctagaaagggccaatagcaaatactttaggctttgctggccacatgctgtctctgtcacatattcttccccccaacaccccagcctttaaaaatgtaaaaatcatccttcatttgagggccaagcatatatgggcattgggtcacatttggcccatgggctgggttgtagaccccagcccatgttaggcagtctcaggaattgatcctacctattaaagcaaccaacacttgtcttggagaatattcatatcaagagaaaaaaaatctgtgtggta

SEQ ID NO: 46940 - DNA, 1025 bp, Homo sapiens
acagagaattcctgttatctttctcccagcttcccataatgttaacatcttaaataaccatggcacatttatcgaaactaagaagttaacattggtgtggtactcttaactacagactttaccagttttttcagtaatgtcccagaattctgctccagaatccaatccaggataccatgttgcatttagttggcattgttttttaagttttgaaagtgatcacaaatgtgttgggctgatttactatttgggtttactgacaagactagtttataagaagtgcaagatggtagttctgcattttgaatgtgggccatcagatctcaaacttttctgttgtttctgctgcttagcacctccgccaggttggggtagtgggcaaatttgtcgagttcttcgggcctggagtagcccagttgtccattgctgaccgagctacgattgctaacatgtgtccagagtacggagcaactgctgcctttttcccagttgatgaagttagtatcacgtacctggtgcaaacaggtaagtgaagggccctgaaagcatcgggctttttgtaaaagttccatgaaacaccaagaatctgagcactgccttctgcctctacccaacagaaggcactgggttacagttacacaattatttttttctccatggagtcaaaatgggtttttgggatttaaggagttaatatgagatagagatggtatggccaatagaaagagctcagagattacagaagcctggatatttatactggtcctctactactagttttttgacattaaacaagtgatcttagtaatggttactgctgcctatggggtacttgctgtgtaccaggtacctagtatgtatttgctgtcaacctctttacagatctgtagggtagattgattgactagttaattaacattagagaaaactgaggagcagagaagtgttcatacccaaggctaataaacagcagagtcagaatccaaccctgcaactgcctggccccatacaggaacagcactctg

SEQ ID NO: 46941 - DNA, 1085 bp, Homo sapiens
aaaggattagagattgaggtaatacatttaaaatgtttaggacacagtgcccagaaagtgctcagtagccagtggtttcaggtggggttgggatgcgttttaattttaacggtaatcatgtggaatgctgaatctttgtggccagttgaaggcaaatgcataggtgtgctttcacaattagctcaggtgtaagattctcctaattaaaggctataccccaaaagaggcgggttatctatagatagaaccagaatctttttcagaaaacagtcactttgataggaacagcacattcattaatggcccctaataaaaagcagcatcagtgggagagtcaaaccattagcctggaagcctaaaaattgacagagctgttggtgtgtgtgtaagtgcagcgtatgttgcgtacttacataattgctaatggaagtatcagtttataaacttcaaccaggaaatactaacctatgttacttgttactccttaaaatgccttttaggtcgtgatgaagaaaaattaaagtatattaaaaaatatcttcaggctgtaggaatgtttcgagatttcaatgacccttctcaagacccagacttcacccaggtatgagagtgccttccactgtgcatgtatttcctcttcctcaaggctgcgattttagtggtggtttttcttgggggaatgcgctagtaggaaattagtcactgccaaggcattacaagagaacggagttttagaaggttgaaaaaccaaaaggataaggcaattgtaaacataacagaataatataacttcttacattcctactggcttaataattgtaggttaagtgtgcttccctatttgaactactgattcacacctcttaatgtggaagaccactgaaagactttgctaaaggaataagaatgatacaatggactttggggactcagggcaaagggtgggagggaggtgaaggataaaagattacaaatttgggtacagtgtacactgctcaggtgatggatgcaccaaaacctcagaaatcaccgctaaagaacttattcatgtaaccaaacaccacctgttccccaaaaatctattg

SEQ ID NO: 46942 - DNA, 1085 bp, Homo sapiens
ttgaaagacaattaacccaggagaatactgacttatgcctctcaccaccccttctcacctctctctcttctccgttgaagctttggggacagcttttctgccatggagaacaatgcttaggagacttagagaaatagccaggtctatgttttgttttgttttgtttttttcttttcttggtgtaagctaaggttaatctttgcttgcttcactaagccagctcctttcttgcttgccttcttagcctaactccacgagaattcaactcctatggctcccgccgaggtaatgacgccgtcatggcacggggaacatttgccaacattcgcttgttaaacagatttttgaacaagcaggcaccacagactatccatctgccttctggggaaatcgtgagtattgtcttctgcttcctgcagacactagcatttgtcagccttggtggaggttggatatttacagttactcgccttttggttttagtttttcttcacagctccatcctaccctaactacagtcctccttgccaggtgtccatatgcatagaatgtatcattgacaaattcaaaccttttcttcttgcttagagattctagaccgtggtttcactgagtctcttttcttaggaattgagctttgagtgacatttcatttaaagtattcgaaggggaaataccaggttaaattaaaggatatttatcaagaagtgctattgtatgactttattggcatgtaatttaattcatctaatccacatgaaaagaaggagtagagaggtgcttggaggcatgttttggttctaatgggagcactgtggtcagtatgttgcagcagggactgtttgttcccagctccacgttatactagctgtggagccttaaagttatttccatctctgagccttgcttttctcacctgtgaagtaaaaatactacttaccttggaagaacgctctgaggcttaaaatgaaatggaatgaaatataaaacctagcatagagtctggtacatgtcataggtccttagtgtcacttcccttcccagtgagtgctgtgaaattgcctgtaaactgtttaacttacttg

SEQ ID NO: 46943 - DNA, 1101 bp, Homo sapiens
tctctaagaacttgctttatgtattgggtgcatatatatttaggatagttagctcttcttgttgcattgatccctttaccattatgtaatggccttgtctcttttgatctttgttggtttaaagtctgttttatcagagactaggattgcaacccctgctttttttttgctttccatttagttggtaaatcttcctccatccctttattttgagcctatgtgtgtctttgcacctgagatgggtcttctgaatgcagcacactgatgggtcttgactctatccaatttgccagtctgtgtcttttaattggggcatttagcccatttacatttaaggttaatactgttatgtgtgaattggatcctgtcattatgctgttagctggttattttgcccattagttgatgcagtttttcatagcatcgatggtctttacaatttggtatgtttctgcagtgactggtatcggtttttcctttccatgttcattgctttcctcaggagctcttgtaaggcagacctggtggtgacagaatctctcagcatttgcttgtctgtaaaggattttatgtctccttaacatatgaagcttagttcggctggatatgaaattttcggttgaaaattctttaagaatgttgaatattggcccccattctcctctggcttgtagggtgtctgtagagagatccattgttagtctgatgggcttccctttgtgggtaacccgacctttctctctggctgcccttaacatttttttcttttgtttcagccttggtgaatctgacaattatgggtcttgttgagtatctttgtggtgttccatgtatttcctgaatttgaatgttggcctgccttgctaggttggggaagttctcctggataatatcctgaagaatgttttccaacttggtttcattctccctgtcactttcaagtacaccattcaaacgtaatttggtcttttcacatagtctcatgtttcttggaggctttctctgtttcttttcactcttttttctctaatcttttcttattgctttatttcattgagttgatcttcaatctctgatatcttttcttccacttgatcaatt

SEQ ID NO: 46944 - DNA, 1056 bp, Homo sapiens
tagaaccagtacataattgtgatttaaaaaaaaaaaaaagaaaaccccacaataatctgaggcaaagaacaggtgggtctcacttattttacaattggaggaaaaaaaaaaatagattcacccaaagtccagaggatccatgcacctgactcccctctacaggcagggtggggttgcaagtgaggacactgggcacctcataaagaagaagattaagaaggttccaggtaacccagcttctgaaggtagatactcattattcaaaaacagaagcgatgtttgctgaaaatttgtgaagctgaagttcaccagtggccctggcaggcacaatccaaaggatacagggaaaacgaccaaggtcaagatgcaattgaagaaggtcagggactaatgtgtccacaggccccacctagagtcaactttagagtaaacagctcagaaacaaatgcagatccaacatactagtccctcaggaaaacatagggtctaaaagggccatttttagtagaacaatcacccaaattggagctgaaaggaccttttacagctaaagaagcagacttagaaaggtaagggaacttagcaatatgactcctaataggctttttgcccaaacagctgagctgatgagagatttctgctttctgaagacgaacggaacatcctgaagtaataactcctcatctgagccagcccagcccctccactgtgccccccatgcaagagttataccccatatttctctttggagatttttctaaccctttctctgaaagttttaagaaagaaatataaggctgcaatagaaggctaatctgcagatgtcacattttacaaataaggagatattttgttttcattataaaagtgatccatagcccaaaaggaatgtttggaaaacataaggtagtaggaaaagagaaaaaaagtcatggaatctcaccaccaaaatattaatacattttggtatagttcccctagcctttgtttttctgtagcaaggtaggttttttgactttttctcttgacaatgacaatgaatgtatttgctgctgt

SEQ ID NO: 46945 - DNA, 1031 bp, Homo sapiens
ttgcgtaacatcgtaaataatgccactgaattgcacaattgtttaggaaaatttgttacatgttttacaattaaaaatcctaagaacactaaaagaaagtcatattaggtcggttggtgcaaaagtaatgtgccattacttttaatggcaaaaaccgcaattacttttgcactaacctaatagttatatcctgaagaggcagaaactgataggtttgtctgtgtagtttttcagcttgtattattactaccactaacagcctctgttgaacccttcattactatgtaagcagccatatttaattctcagaacaatgtaatgagggagagcctatgaaaaaacaaagcctatgaaacagagcctatgaaaaaacattaaccaaggtcatcatccacaaaaatacaagttccagcactaactctgctttctctgtgatgcttctcctgcccattcatacttgtagggaataggagtagaggccaattatgtcgcttgagagtgctcttggaacagtggcaaattttctgtacgtgaaattagcttctcaacttttttgtacgtacggtactggttcttaaccttggctaccattggaattacccgggaaacattaaaacactcatcaggtcccaccctccagggattctgtataactcggctgggtgtagcctaagcatcaaaatgattatgcgcagccaaggttgaaagccaccaacactgacacatggatttaatattaaccacttggaacagaataccactgttaaaattgccgtggaaggttaaataatgggcagcccttgctattccaagtttggtttttttgttttttgtttttgagaccaagtcttgctctgtcacccaggctggagtgcagtggcacagtctcagctcactgcaacctctgcctcccgggttccagctattctcctgcctcagcctcctaggtagctgggactacaggcgtgtgccaccatgcccggctaattttgtatccttagtagagacagggtgtcaccatgttggccagg

SEQ ID NO: 46946 - DNA, 1035 bp, Homo sapiens
gtgagcatttttactcgacaacacttagctgtcattggctattggtgtttggtttttggacatggaataatgattgattagtcctccacaagcaccttgaacccatcaccttcactggaaacatagttcttacttaacagcatgttttatacaaagttctaaggaaagtaatttttagatttggcttggagtctatgagtttcatggatgaagtttaatctctttactggcatgtctattttttatgtcctaggtacttttaaattcaatacagatgctgctgaattcattcctcaggagaaaaaaaattctggtctaaattgtgggactcaaaggagactagactctaataggattggtagaagaaattacagttcaccacctccctgtcacctttccaggcaggtcccttatgatgaaatctctgctgttcatcagcatagttatcatccgtcaggaagcaaacctaagagtcagcagacgtctttccagtcctctccttgtaataaatcgcccaagagccatggccttcagaatcaaccttggcagaaattgaggaatgagaagcaccatatcagagtcaagaaagcacagagtcttgctgagcagacctcagatacagctggattagagagctcgaccagatcagagagtgggacagacctcagagagcatagtccttctgagagtgagaaggaagttgtgggtgcagatcccaggggagcaaaacccaaaaaagcaacacagtttgtatacagctatggtagaggaccaaaagtcaaggggaaactcaaatgtgaatggagtaaccgaacaactccaaaaccggaggatgctggacccgaaagtaccaaacctgtgggggttttccaccctgactcttcagaggcatcctctagaaaaggagtattggatgggtatggagccagacgaaatgagcagagaagatacccacagaaaaggcctccctgggaagtggagggggccaggccacgaccaggcagaaatccaccaaaacaggagggccaccgacat

SEQ ID NO: 46947 - DNA, 1070 bp, Homo sapiens
cttttggaagaaaatttatttggcctactcccatttttcctgacagatggccagagtggttggaggtgccctgcctgtcagaatgtttctgcacatgttcctaatacctacacttgtttctgtggtaagtttgtttatatacactggagtctcttttactacatacattgtacctcagttcaggaaaggtggtctgcggggcatgttttagaagttactaatgagacttcaaagctctaggagtctataagactgtaattatgtggtccatcacacagctagagccacagcctttgtgctcctggcaagctgttctggagatggccaaccaggctcatgctgcttctgggctgtagtgcttgtctccttggtcttgagaccaggcctgaccatgtagcagagataggtgtggacgtgggcttcatctcacccccagcagttacagctttgatagtccagatttgagcagtatgagtaaataatagtgtttattttaatcctggaaataagtcattggtatttataatcagattttttataaaccagcattataaactctatcctggcatcttccctctttatggaatacttctttctgtttttgaatatctcagttcccccaagtattaggggaaaacttcttgtaacccagatgctcattcttgctgctagcccatttctgcatgttttttttcctttcctgccttttaatgactaacttccctctagttgttgatttttcagattttgtttctttactgtctgtctccctccctgaagcattgcatttttgcttctgtcttgttgcctcactgaaaccgtattcagaaattaccaatgggccgggcttagtggctcacgcctgtaatcccagcactttgggaggccaaggtaggtggatcacctgagatcaggagttcgacaccagcctggccaacatggtgaaaccccgtctctactaaaataagttagctgggcatagtgttgcatgtctgtaatcccagctacttgggaggctgaggcaggagaatcgcttgaacctgggaggcagaggttgcaatgatccaaga

SEQ ID NO: 46948 - DNA, 1034 bp, Homo sapiens
ggtgttcagccacggccttatggaccagatagtgttctcttaatttagaggttgcttcactctgatgctgttcttggaatgtgctgcagaggcactatgagatattaatagtttaacaaggcttttttaatttcttcctatggtaaagctcttaggcgggtcttagagctgctgtatgaactatactcatttctgcataggtctgatcagtactctatttggcctcccagattacaggcatgagcgactgtgccaggcccgcattttgtattttcttatagattatttgtgacattttaagaacccatacatgttactaacgttttgtttttgaaattttctcttcaagtatgctattgcggcagcacctcccgagatgtgttatgtggaaccgatgtaggaaagtctgatggatttggggatttcagctgtttaaagatatgtggcaagtaaggttttacgttttcttcagttgaactaaagctgcactttatgcaacaattatgtaatagtgtgttttcttaacagggacttgaaatgcggtaaccatacatgttcgcaagtgtgccaccctcagccctgccagcaatgcccacggctcccccagctggtgcgctgttgcccctgtggccaaactcctctcagccaattgctagaacttggaagtagtagtcggaaaacatgcatggaccctgtgccttcatgtggaaaagtgtgcggcaagcctctgccttgtggttccttaggtaactagtaagcgtaaagttggctttaaaaatattattgtaaatggttggcagcagtgagtgtttaagcaatgtagaagtaagtgctagttacaatatcagaggtttctaaatattatgatcatatttatgtaggtacgttttctttcctcctcaacatatacttgtgaaaacccatacatttgcccaaatgatctctctgattcaggtattttattgttaactctggacaactgtggtgagttactgttccataggggttatgatttctcttaggagcctgtactg

SEQ ID NO: 46949 - DNA, 1021 bp, Homo sapiens
atgctgtgtctatgtcttcataaagcatgctatatttaagtctttatggtaattcatgtgcaggaatttatgggagttctgcctttcctgacaattgtagataaccactcctgcatatcatttcttccatataatccagtgttcactgatgggagcattaactcagtttcatgagtcacttttgctttatatctgtagagagcatatagggaactttttcatatcatcaatcccagacacctcattttttatctgaaatgtatattttccagccaagaaccttttattgcttagacttcttcacatctgttatcaacttcagtagctgctttttttttttttttcaggataatttttacgaagaggggacttttaaagtcatttttctcatttctgagtacatggcaacctgtaaatgacatcaaagccaaaatcagatgtagaagccgggcagctagccagactcattctaccccaagtgactgacttccttcccacacaccatcatcactacacacgatttttaggatcatgccttagcaaaattacgtgatagaccttttagaccactcacatgtagtggaaaccaaactttagaggccaaaccaaagatcctgctttatttcactttgctgtagttttgtgatattatcaggtgtgctctgaagtgtgtagagccgtttgtccctgcattaaatggtacagattgtcatctgttttcaattcttatatctgctttttatggctttttctgtctgtacccttgtttggtgatgacttctctttcctttgcatgcctttagcagccctctttctatttagattttgtaattattagtctactgtgaatttggagaccagaccacaaaaattgttagaattgtattttcatgaaaagtctgtaagcctggagtcctcttgtgagtaaagctcattcatatagggattaggctcgctccagacatggcaagtgaagttggtgaataagtgactatcagagaagtatgggatatttgggata

SEQ ID NO: 46950 - DNA, 1088 bp, Homo sapiens
catgcttgtccttcaacactttaacataaagcaaggtactttttactttcctgtgaccgtttttcaaaagtactcccagtttctgaatttaaaagtttcatgccgtatgccacttatatgatgtataatggtttacatggctttatttagaaagtattcctaaagttacctttctctttctgcagtatatcattcttgtcatagtgaggagaagtgtcccccttgcactttcctaactcagaagtggtgcatgggcaagcatgaggtaagttttctctctcaagtgctcattgttccaggcagaggttcatgattttattacttaagaattgttagtctcatcgtctgtcaaagtaaatacactcagaagtagaagctttccattgcttaaaaattttttcttaagatataatttgcatacaacagaatttaccctttttattgtacagatccatgagttttagcaaaagcatacataccatcaaaccactaccacaatcaagatatagaacagttcagtcacccccaaatatccttcatgcccctgtatactcaatgtcccctacttccaacttctgaaaaccaatgttgtctgttccaatcattttactttaaaataccaaatttttttttaataacctccttattcctgcaagaatggcaataatcaaaaaataatagatgttggcgtggatgtggtgaaaagggaacacttttacactgctggtgggaatgtaaactagtacaaccactgtggaaaactgtggagattccttaaagaactaaaagtagatttaccgtttgatccagcagtcccactactgggcgtctacccagaagaaaagaagtcattatatgaaaaagatacctgcacacgcatgtttatagcagcacaattcacaattgcaaaaatgtggaaccagcccaactgcccatcagtcaacaagtggataaagaaattgtggtgtatctatacgtaccatggaatactactcagccaggaacgaaataatggcattcacagcaacctggatggatttggagaccattattctaagtgaagtaactcaggaatggaaaaccaaaca

SEQ ID NO: 46951 - DNA, 1033 bp, Homo sapiens
gtaacaaagggaacctgatagggtgggcctttgtaggccatgggaaggtttaaggcaaaggagtgaatgatgaagctagcttttgttgttactgttgctgttgtttttgagactagtctcgctctgtcccccagactggagtgcaatggtatgatctcagctcactgcaacctccgcctcctgggttccagcgattctcctgtgtcagcctcccgagtagctcagattacaggcctgcaccaccacgcccggctagttttgtatttttagtagaggcgaggtttcaccatgttggccattctggtctcaacctcatgacctcaggtaatccgcctgccttgtcttcccaaagtgctgggattacaggtttgagccaccgcacccagccccctagctcattttttaaagggtaatgccagctgctgtactgagactagaccacagggctgagtgggaacaagggaagaggctggaagaccagaaggcccctgctatagtctgaaagaggcagcactggctggaaccaaggtaacagtgctgtagcggtgaggagtggctggattctggatacatgttgcagattaacacctacagcttttgccgacagctgggacgtggggtgtgagagtgagcggagagtcagggatgactttaaagtttttggcctgagcaattggaagactgagtgcgctgtttactgagataggaaagcctgtgggaggagcaggcttggggatgaaaatctgtccagtaggcagttgtgcgtgggagtctgaagtctggaggcaggactgggctggaaatctaatttgtggagctgttaatggcgcctataatggtatttaaaggctggtgaaaccatgtagggaaggagggtgaaagagaagatatccaaagacaactgtgccccgggcacaccctcatcctgaaggcaggaagctgagaacagggaaagttagagatgtccaaagccagagacaggggctgaagctgcaggactcagtgctacaggaagtcctgtagggtgaggggc

SEQ ID NO: 46952 - DNA, 1075 bp, Homo sapiens
acagagtttcaccatgttggtcaggctggtcttgaactcctgacctagagatccacccgccttggcctcccaaaatgctgggattacaggcgtgagccaccgcgcccggccagctgcatgtttttaaaaatcaaagtaagaagtaatttgtttaaaaaatatgttgttatttcagtgctctttccccatggtacttttaggaattaaaatgtatttaagtgtcagttagatgcctagaacggccctagacctgctgtgtatacagtattctacttaatgtaaggcctcatggattgtgtgatatcctactattttctacattaatgagatgatttttaaatgctaccaattatagttataaaaaattatgaattgtaaataccgctccaatatgagatatgctaaaatgtgacctaatctttaaatcatcctgcaaaatagcaataattgtatcattttacttaattaaaatgtttttgttaaatagtagtaatataattataacgtctggctgggtgcgtggctcacacctgtcattctagaactttggaaggctgaggtgggaagttcccatgatgctaggagtttgagaccagcctgggcaacaaggtgacattcctactctacaaaaaaaatttaaaaattagctgatcatgctggtgcactcctgtggtcccagctattcaggaggctggggcaggaggtttgtttgagcctacaagtgccaggctgcagtgaggcataaatacaccattgcactccagcctgggcaagagagcaagaccctgtctcaacaaacaaaagtctaacagttattgagttgttgcttgttctggaaacagttctaaatgctttatgaagattttcatttaagcatcacagtggtgtcctgtgagctagctgctgttgtcatctttattaatgaggaaattcaggcacagaaaggctaagcaatagctggtaggtgaccgagttcaaagtagaactcaagccctagttaagctgaatccaaacaccaagctcattctatccaaataggctgctgtttcattaaggtagggagcagtaagagcta

SEQ ID NO: 46953 - DNA, 1093 bp, Homo sapiens
ctttaatctttttacatttgagttactgctggaatgagttaagacttttggaaacttctgaaaaggcttgtttgtattttactctgtgagaaggacatgagattcaggggtgtcagggtcagagtaatatggtttggtggtgttttcctacaaaagatcatgggaaattgtattcctgaatgttggaggtggggcctggtgggagctgattgaatcatggatgggagggggttgcgggtagaaggaaaaagaagtgggtagggtggggaggagtaggttggcagtaaactgtgagagggtggtgggtagtaggatgtgggagtagcctcctgcagaggcagagcctcatggaaaacctctactagggcggtgcacctgtggctttgcagggtttagtcccttggtggctctcatgggctgggctggtgttgagtgcctgtagctttttcatactgagggtgcaagctgttggtgggtctataaatctggggtctggaggatggtaacctcctgtgtgggggctccaagcccatattttccttctgcactgccctagtagaggttttccaagaggctctggctctgcaacaggcttctacctggaaacagtggtggggtgggggagttgggggggacagatctttcaccaatgattaagcatcatcttcttgatgctgattttgtcatagtgagttgtcatgagatctggttgtataacagggtgtgatacctctttcctccttctgtcttgctcctacttctaccatatgaaacatcccattgccacttgttcttctggtatgattgggaggcttcctgattcctcccagaagcagaggcctctatgattcctttaaagcctgcagaaccatgagccagttcaacctcttttctttatgatcttacagaaaattggtgcttggaagtggagctatgaaatgccttcaaagcctttttcttattgtcttggcaatcagcactcagcttctcttcatgcagatatcggatccctttgtgaatttttcccctgaaaatggacatttcttctttttaccgcattgataggctgcaataaggatggatgaaaatgtaa

SEQ ID NO: 46954 - DNA, 1049 bp, Homo sapiens
ttctgagtttgcctggccacagcccaggttccttcacggacacttcagcatcaggctctctcctcagctttctttctatcttctgtgccctctgctcataaaccccagctcatagaagctgaagtcacctagactccaagacacctgattgtagagacaggaaaggagttctcaggatatgtgccataatttcatactggtttctacaagaatcagggttggaattagagctgattcattattcagttaacattgacattgttgattagagacatatccctgttgaaaatatttcccggcaaaaaacagaagttccctttggctctgaaatctgcaaagccctttcagatgtccctgtgtccttgtgccgtcactccacagcactgcacaggcatgtgctcacctcacaaaatggcagtctcaaagggaggagtgtccaaccacaagaggcgccaccctatgctgagaaagaacctttcacaggaggagagaaaagacctttccagaatctttaacataagattttttgtgtgtgtgaagtctgacctgagcagcaaccttgcatcagacttcaaaaggcaatatttcctgtacctccttgtgctgtacaagtgagtacagaagtcgagaaaatgttcctaagtctatggccagttcaaattccatcattttctatttctgagattaaattatatgtattaagatccttactctgccctttcatgtttattgctcctcggacaagatatcccctcttcaggtcccaaacacattcattgcaatgcctttcctcatccttgtcccagtcctggctctctagcttcttgagacaataacccatcctaaggtatgtggtgacatgcatcttctgcctcactgggatccctaagtggtataagcattcactcaattgctttagctagagtccccagaatatcttcaccctctgctgtcacactcttcttccacattggtccataaccacatctttaacatttctgtttattaaaacctctcaaattcaaccactattttctatcccaaccaat

SEQ ID NO: 46955 - DNA, 2082 bp, Homo sapiens
ctgtccaaaagcaaagcttttaaagctttaaggctagttagaccatttttcaacataatgataaaatgttctgttccatctttccaacttaatggtcagttggagacacgtgagagaaaggagaccatccagcaaattaggctacctctgataatctagttatggaaaaataacagtgaggaaaaggtataaattcagagtttaggactacagatttccatcttgcttaaagattatattgaaaaggtttaattcttttatgtttctgaacttcttttgaactgcttcacatacgactacagagatatctgagttggttggatgcagtggctcatgcctgctcacacctgtaatcccagcacttttgggaggcggaggtgggcagatcacttgaggtcaggagttcaagaccagcatagccaatatggtgaaaccccatctctactaaaaatacaaaaagtagccgggtgtggtggcatgcgcctgtagtcccagctacttgggaggctgaggcaggagaatcgcttgaacccaggaggtgcaggtttgcggtgagccaaaatcttgtgccactgcactccagcctgagcaacagaatgggactctgtctcaaaaaaaaaaaaaaaaatcctacagagattcctgagtaaaatttaacctctttgattgtgttaatatcaactttattcagcaagaaattgttattcagagattatgcttatgtacctcaaaattagttgactctgaagtgaatggaatgatagatactaagttgaagaggtaaatttagttcacatcaccaaggtttgatgttacttaaatgatcttccacatgataattggaaaattcaggtgttggaatatgtatttaagatgcaaagtggctaggagtggtggctcacgcctgtaaccccagcactttgggaggccgaggcaggcggatcacgaggccaggagattgagaccattctggctaacacggtcaaaccccgtctctactaaaactacaaaaaattagcagggcatggtggcacgtgcctgtagttccagctacccgggaggctgaggcaggagaatggcttgaatccagaggcggagaggttgcagtgagctgagatcacgccattgcactccagtctgggcaacagagtgagactctgtcccctgccgccccctccaaaaaaaaagaaaagtgaatagtccactttaaacacctttatttgatttagtaacaaatacatataaaaatgttttggttattgggtgggtgcagtggctcacgattataatttttacccagcactttgggaggcagaggtgggcagatcacctgagctcggaagttcgagaccagcctggacagcgtggtgaaaccccacatctactgaaaatccaaaaattagccaggcatgatgtcgtgaacctgtagtcccagctatccgagaggctgaagcaggagaatctcttgaacccaggccaatcgcttgaacccaggaagcggaggctgcagtgagccgagatcgcgccactgcgctccagcctgggcgacagtgagactctgcctcaaaaaaaaataaaaaggttttggttattgtcttattattattattattttttgacgctgttcgaataaaaaaaaattagtcaagcatggcagtttgtgtctttggtcccagctacttagaaggttgagttgaggtgggaggatcacttgagcctgggaggtcgaggcttcagtgagccatgagcatgccattgtactctagctgggtaacagagcaagactcagtctcaaaaataaataagttaaattaaaaataaataggctgggcaccgtggctcacgcctgtaatcccagcactttgggatgccaaagcgggcgaatcacttgagattaggagttcggcaccagcctggtcaacatggcgaaacgctgtctcaactaaaaatacaaaaattagcctggtgtggtggcgcacgcctgaaatcccagctacttgggaggctcaggcaggagaattgtttgaatgcgggaggtggaatttgcagtaagctgagattgcgccattgcactccagcctg

SEQ ID NO: 46956 - DNA, 1028 bp, Homo sapiens
caaaaaaattagctgcgcttcgcggccagcacctgtagttccagctacttgggaggctgaggcaggagaatgacgtcaacctgggaggcggaggttgcggtgagagccgagattgtgccactgcactccagcctgggcaacaagagtgagactccgtctaaaaaaaaaaaaaagaaagaaagaaagaaattatttaatactctttggttgaactttaattaaattttttcaaggttttttttaatgctctcagaatcaaaactttaattaaattctattatagttttaagtagtcaggtttatggaggtataatttatacattaaaattaatctttttagttacatagttctatgaattttgataaatgtatagtcacattcagttttttaaagaaaaagatgaccacagcagggcagtttttataccaaatttgtctatgtgagaagaaaatgaagttactcttttttcttaaaatatgaggaaaatggctctgaggactcagagttattatttgtgtggtacaatgagtcctcactaatttggattctactaatttgaaaattatgaggtttttcttttttgagaaaggattttgctgtattgcccaggctggagtgcagtggcacgatctcagctcagtgaaacctccgcctcctgggttcaagtgattctcctgcctcagcctcccgagtagctgggattacaaacacatgccaccgtgcctggctaatttttttttatttttagtacagacggggtttcaccgtgttagccaggatggtcttgatctcctgacctcgtgatccgcctgccttggcctcccaaagtgctggcattacaggcgtgagccaccgcgcccgactaatttttgtgtttttagcagagacgtggtttcaccatgttggccaggttggtcccctgacctcaggtgatccacctgcctcggcctcccaaagtgctgggattacagacatgaaccactgtgcccggctgatatggtcgtttcttgtaagagcttcagcatta

SEQ ID NO: 46957 - DNA, 1043 bp, Homo sapiens
ctcaagtgatctcctgcttcagcctcccaaagtgctgggattagaggcgtgtgccactgcgcccggccctggcttgcttaatttcttttagtaatgctattattgctgcatttaaagtaatgtcttttttcttttggctgcttttaatatttactctttgtgtttgttttcaacagttaaactttgatgtgcatgggtgtggttttctttcctgcctttggttcactgagcttctttatctttcattagttttagaaaattcatagccattatcttttcaaatattgctgcttcattctctctctcttcttcattaacctacgtatagtagaatttttgactatgttctgtgtgtctccaacactgtgttctgtcctttttgcccttgttttctgtgcttcagtttggatttgacctgaaattttttttttttttttttttttgagacggagttttgctcttgttgcccaggctggagtgcaatgacgtgatcttggctcactgcaactctgcctcctgtgtttaatccattctgctactgcagcctcccaagtagctgggattacaggcatgtgccaccacactcggctagttttttttgtatttttagtagagacagggtttcaccatgttggtcaggctgttctcaaactcctgacctcaggtgatccacccgcctctgactcccaaagtgctgggattacatgcaggagccactgcgcctggcctgttgacctgaatttaagttaactaattctgttttatactgtctatccaatgagttacagattctaggtactgtatttcaggtttaaatttttaaaatagtttccagtattctgttaaaattcattccaaaaagtcatttcataaattcattttgtgcaattttttcttctattttcttttaatatactaatcatagtcattttaaagtccacgtttgccagctccaatatctgaatcatctgtggatttgtttctgtacttttttctcctcttatcagtcattctccctctttccatacttcttaattttttaa

SEQ ID NO: 46958 - DNA, 1030 bp, Homo sapiens
atatatgctatgaattgtggtttctgagcagtaatgcatatactttgaaatcattaaacctttataaaatttttgttttcaaaatgtaattgttactatactctgtgtattttatctttgatagattaaaaatactctgatatctgctcaaagctgacatattcagaaatttatgaaaactaagctaagctgggaagcatagtttatattgaaatttgcttaggctcattgcccaagtttagtttggaatccctaacctgcctgatagttttagatccttgagaatatccctgttttaacatagtaggtcatattttcaaaatgcctacaagaatggtttatgtagagtattaaaatcttaagactgggatggactctgagatactatttttcattacatctttattttggaaaacttactagaactagtatttcccccctaaatagctgaaaatttttacagaagcattgttgtgacgttaggagccttgagactttaaatttctttgttttgtttttcagaataattttggattcaagaaaatatgatttggttatttaaatgtaggtttaatgtttaacatacagtccttgtggttatctaagccttttgtgtgtgtgtgtgtgtgtgtgtgtgtgtgtgtgtgtgtgagagagagagagagagagagagacaggatctctctctatgaccaggctggagtgcagtggcagtggtgcaatcagggctcactacagcttcaacctcctgggctcaagcaatctttctacctcaccttcccaagtagctgagaccacaggcatgaaccaccatgtccagctaatttttaaaatttttataaagacaaggtctccctgtgttgcccggattggtcttgaactcctggcctcaagcagttctcctgccttggcctcccaatgtgctgagattacaggtgtgagccaccttgcctgccctttttttttttttaaaaaaatagcattttaggagggcacgtttctcaagtaattatgtaaaaggaagttcttt

SEQ ID NO: 46959 - DNA, 1287 bp, Homo sapiens
gatctgcctgccttggcctcccaaagtgctgggattacaggcgtgagccaccacgcctggccttctaaatattttaaatgccgtttttcatttttaaaatttctagtttgttgttaactatcatacttctactgtggaagatgaggatttctctcattactgtaacaccccatcccataaacgtattcattagctctccatatttccagtagttatagttttaatttagactaattttcagtgtttacattaatataactatgtaaataatagttccggttgaaccatgtcatacaccattattaccttttctttcacatgtagtgtagtgttttgttttttgtttttgctggaattcctcttcatccctccacatttagtttttttgtgtgtttttttttgtttttttttttttgagatggagtctcactcttgttgcccaggctagagtgcagtggagtgatgtcggctcactgtaacttccacgtcccaggttctagtgattgtcctgcctcagcctcctgagtagctaggattacgggtgcccaccaccacactcggctaatttttgaatttttagtacagatggggcttcaccatgttggccaggctagtctcgaactcctgacctcaggtgatccacccacctcagcctcccaaagtgctgagattacaggcgtgagtcactggtgcccggctcacatttagttttctaatgtgcttatcagtaattcatccctgaactctgacagagtataaaatctctttaaatacacatggttatcatacttaactgaaatgtaattaacttttttttttttttgagacagagtcttgctccctcacccaggctggagtgcagtggcatgatctcagctcactgcaacctccacctcccaggttcaagcagttctcctgtctcagcctcccgagtagctgggactacaggtgcctgccaccacgcctggctaatttttgtatttttagtagagacggagtttcaccttgttggtcaggctgatctcgaactcctgacttcaggcgatccacccgcctaggcttcccaaagtactgggattacaggcgtgagtcaccgcacccagccaacatttttaatttgatcaaaacatgtgaaggtagaaagttgtatgtgtcataaatatagcagttggtggattttcacacactggggcatctgtatatctagtcttcagatcatgaaaaaagaaaattgccagtactacaagaagccctttcttgtgttctcttacagaaccatcttcccat

SEQ ID NO: 46960 - DNA, 1050 bp, Homo sapiens
gtgtgcttttttgtttgtttgtttgtttgtttgtttgtttgtttgtttgtttttgagacagtctcgctctgtagcccaggctggagtgcagtggcgcaatctcgctcactgctacctctgctttccggctcccagttcaagcagttctcctgcttcagccttccgagtagctgggattacaggcatgcgccaccatgcccagctaatttttgtatttttagtagagatggggtttcaccatgttggccaggctgttcttgaattcctgacctcgtgatccacccacctcggcctcccaaagtgccgggattacaggcgtgagccaccgcgcctggcctactattctaaaagtgtgtttttaaatctccaaatgttttggggattttgcaggtatctttctgttaggaacttccagttaaattccgttgtgatctgaaagcagacattgtatgatttctatttttaaaaatttgtcagtatgtgccttatggcccagaatgtggtatatcttcatgaaagttccatgtgaactcaagaacaatgtgtaatctgcagttacgagtgtagtagtctataatgctcattatatacacttgaagaatggtgttgctgagtccagctatgtctttacttattttctgcctgccagctctgtccatttcaaaaaacaaaaaaacaaacaaaaaaaaattctgtaatcttttatttgcaatatggttttgcagtggtctcattttttcgtagcagcatcccaagcattgaaattgctttagagtcttgccatcttagtcatgcatcagttcttttttttggccctgtggatgttggaagtacctttgctccagaaactgagctaacatcacctttaaattacttttattttatttatttatttgttatttgagatggaatctctgtcacccaggctggagtgcagtggtgcgatttcagctaactgaacctccacctcctgggttcaagcgattctcctgtctcagcttcttgggtagctgggactacaggtgtgcacgaccacacctggctaatttt

SEQ ID NO: 46961 - DNA, 1060 bp, Homo sapiens
ggttgccttttcactttcttgataatgtcctttagatgcataaaagttttccattttaatgaagtgcagttatttccaagtctttgatctattttcagttaatttttgtatatgacatgaggtaggagttcagttgcatttttttgtttgtagaaatccagttgtcccactaccatttattgaagagtctgttttttccccattgaatggacttggcatccttgtcaaaatcaattggccatcaatgtattggattatttctggactctcaattgtaaattatattccattggtttatatgtctgtcattatgccagtactgaacaacatggttgtctttgtagtaatttttaaaattaggaagtgtgaatcctccaacttttgctttttccacattgttttggctctttgggtcccttaaattgctatataaattttaggattaccttgtcaataactgtaaaatgggaaggtaggatttgataaggattgtgttgaatgaacctgtagatcaaactggggaatagaaccatcttaacatcgtaactctacattttttaagatcttttaaaatttctttgagcaccgttttgtagttttcaacgtacaagtcttttcccttccatgactagatttattctctctctctctcttttttttttttttttttttttgagatggagtctcgctctgttgcctaggctggagtgcagtggctcgtactcagctcactgtaacctctgcctcccgggttcaagcgattctcctgcctcaacctgctgagcagctgggattacaggcatgagccaccatgtctggcaaattttttgtatttttgtagagacggggtttcaccatgttggccaggatggtctcgaactcctggcctcaagtgatctgccagccccggccccccaaagtgctgggattacaggtgtgagccaccccgcctggccagatctattcttttaaatgacaattatcaatggaattgttttcataatatcctattaggttatttttgctagtttataaaaataaaagtgactgagttttgatt

SEQ ID NO: 46962 - DNA, 1779 bp, Homo sapiens
tgcgtcattttgaagagctgtatttactaaacaataatgtatatgattctcatttccctatgttcacttaggaatagattttcaagcctgaatccctactcttaacttatcctagttctactctggttctttattaccacctaacattagtgtcattcattggttgcagttaataaacaatgttaattcattataagtaactgaagtccatacgctttcacatttcctttgtttttacctgtcgttgttttgctccaaaatatttcatacatataaatatatatctatatatgtacgtgtatacatatatgtatttaaattttttgtagagatggggtctcactaagttgcccagctggtctcaaactcctggcctcaagcagtcctccccacttggcctcccaaagcgctgggattataggcatgagccactgtgccctgctcatcacattatatttaatagtcatgtcttcatgggcaactcctctctctctctgtctctgtctctctctctctctctgtttctgtctgtgtctctgtctcttgtctttgagacagtgtcttcccgtcacccagactggtgtgcagcggtgtgatcacaggtcactgcagcctcgacctcctgggctcaagtgagcctttcacctcagcctcccaagtagctgtgactataggtgtatgccaccatacctagctattaagcaactcttgattataaattttcttgtttttgatgacaattttggggggtactgatcaggtattttgtgcaatgtcccccagttgagatttttcttatgtgttttctcatgattagtctagggttataggtttgggagagaaagaccagagaagtaatgtgccattttcattatgtcatatctgaagtatttactatcagtgtggcttatccctgttgatgggatacctttcatcacctgcctgaaataatatttttagcttttctccactgtaaagttgctctttcctgaacttttcattctgtactccttggaaggaatatgcatagcccacaactaaggagagggtggctatacctccttgaagccagggtatctatataaattattttgaattcttctgcatggattgatctattcttcccctttatttgtttattcaatcatttgttaaacatttttactgatacaaaaactaataacttgattagaatctccaggtttatcaaaagtgaagaattggaagcttcctgacttgtaatagaagctcttcaagatgtgtcaaatgactgttgattatgtttgttactcattcctttgggtaccttgttccatccaatttatttagaaagagttgagaaaatagatatattaaagatttcagcatatcttaccaatatattttttaagacaaaaaatgttactttctttctaaattcaaataaatgtgtttttacacctcaccttgacaaccatcatccctctgaatgtttttttctcatatttctttttttttttttttttttaagacaggatcttgctctgtcgcccaggctggaatgaagcggcgcggtcacggctcagcacagcctcaacctcccgggcttgagcaatccttccactttagtctcttgggtagctgggaccacaggcatgcatcacggtgtctgctcaagattttgtattttttttgtagagagatggggttttgctttgtttcccaggccagtctcaaactactgggctcaagcaatccacttggcctcccagaatgctcagattataggtgtgccccaaa

SEQ ID NO: 46963 - DNA, 1001 bp, Homo sapiens
gctcaccgcaatctccgcctcccgggttcaagtgattctcctgcctcagcctcccgagtgagtagctgggattacaggcatgcgccaccatgcctgcctaattttttgtagttttagtggagacgtggtttctccatgttggtcaggctggtctggaactcctgacctcaggtgatccaccagccttggcctcccaaagtgctgggattacaggtgtgagccatggcacccagccttgttttagttctttattttagaaagttccaaactcataaaagtagatttggctgggcatgactcatgcctgtaatcctagcactttgggagggtgaggtggccagatcacctgaagtcaggaagttcgagaccagtctggccaacatggtgaaaccccaactctactaaaaatacaaaaattaacgagtgtggtggtgtgtgcctataatcccagctacttgggatactgaggcaggagaatcacttgaaccccagaggcagaggttgcagtgagctgagatcgtgccactgcagtccagcctgggtggcagactgagactgtcacaacagcaacaacaacaacagcaacaacaaaaatgtagattaatcctgctttgtaaaaactcttatttttttctactcacacaccaccacagcaattatcaacacagaaaaagaattctgtggccaaatgtgtgggcagttttccccacacaccaagcagctgccaccagttgggtgttctccagttcaatgccgacactgtctacctggagatagtgtcagatcccactggttgaatgcgcagtctccaagattgccccctagcactcatcagtcacaagtctgggcctcaagtgcttctgaccaccagcttcactcatgtcagggttccctcggtcctctctttaggtttaatttgccagagtgtttcacagaactcagagaaactcttttatgtttactggtttattctaaaggcgattgcaaagtatacagatgaa

SEQ ID NO: 46964 - DNA, 1050 bp, Homo sapiens
ttctcaatttttttattgtgttttcctcatgtgtttggattgggactcaaataaggtctgtaagttagtgattgcttgagatgtattccttaagatctttttcagtctgtaggttctcttttcatcttgctttttttgtgttgaaggaaactgaatcactttttctaaaagtttgctacagtcaggattttgcagtttaattcactactattttaattaggatttgggtatgtatggataaaacataaataatcagctaggtgtggtggtacattcctatagtcccagatacttgggaggctgaggcaggaagatcttttgggctcaggagtttgaggctgcagtgagcaatgttcatgccacttcactccaacctgggctgttcagagcaagaccctgtctctaaaaacaaggatcaacaaaaattaaatatgctttcatttctggttcttttttctcttttctctgtcagtttttggtatcagtgttatgctgatctcatacgagaacttggaattcagcaacattcattcagcaggagttactgagcactactgtggccgggcactatgcttggtgtaatggtgaatgagacagaagtggtatttgtcctcgtagtgcataaaggcaagtggggaagacagacaataaacaaatcctgaataaattgataagctacaaatatatatttgtttccattttatgtgttggaatagattaaataaaataggaataatctgtttcttaaatatttaatagaactttaaagacatctgttctgacatttattttagcatacacatatttcataagcatgtgaaattacttaagaaccccttttctctccccataaatctttgacaccgtgtgaagttgttccatccttatattgtttttcctttaggcctacagtgttcccctggggatttgagttttcaagttttgtgaacaaggctgtattatttctgtgggaaaaatcattcaggtttcacatgatggaaacagaatgatacaatccactgagtttgaagactccaggaagaacaaaaa

SEQ ID NO: 46965 - DNA, 1048 bp, Homo sapiens
aaaattaaaaattagccaggtgtggtggagcttctctatagtcctagctgctcaggagcctgggacaggaggattgcttaagcctgggagttcaaggttatagtgagctatgatcacatatgcattaggttgtttggtattgttccagatatctcttaacactgttcaattttttttttccctttttctctctttgtatttcagtttggctaatttcttttgacctaacttcaagtcccaagtctttcttatgctgattattgtcttcggattagcatagcctggtttatgaaccatcaaaatttttcttttctgataatgcatttttcacttgtggcatttccatttgtctctttatatttccatctctctgctgaagttcccatctgctcacacatgtttagtttttccattagaccctttaacatatttattattgttattttaaagctccctgtctgatgtttacaatatcttggctctccctgaatttgggtctgatgactggttcctctcttaattctggatcacattttcttgcttctttctgtgtcttataatttttaattgaatgccagacaatgtatattaaaaagctgattttgtagattatatggcttgttttgttgttaggatatgagtaacattttcttgtgatttcacatcttacaacagatatctatgttattttgtatatttatgattttgccagtgttacctggcttgtggctttaagatagttttttttgttttatttatttatttatttatttttaagtcctttgctgcaggaggcgctgatggctttaagatggtgataaccagtcatggaattacagattttcacttaattttaagtttgatcttctttttaaaaaaacctcaatttgaatctcctcacaataatacctgaattaaatattatgcatttgctatcctctattggggatttctccccccacctggaattgtactttttttagaaaaaacgggcagattgcagaatcataggcatatcagcaatttagaaagaaacaaagcaaatgaa

SEQ ID NO: 46966 - DNA, 1031 bp, Homo sapiens
aaacacagagagtatgagttctacagtgtttctgaacatagttgtattttgagttggagcatagagaagttgggctccctgatcatagattcatctgcagattgtggcaggagtggaggagtgaggagatgggcagggccttcttagaccaggaggggatgggcagggccttcttagactgtaaagattatggagaccttgagattgcagcttgaccagctagctacctgtgccttgagtctatcactcagcactgagggtggagtcgggcaagtctccagtgggaagaacagtgaagactactggcctgaggccttaggccaggccaagatctgtttgtaagctggccagttttcatccaccagcactcctgacctcacctctaagagtaagaaagctgcagtcatttggtcctgaaagagaagccaggctgtgtggggagaaatgggaaaaaggagcccttcttggctgaggccattgggatggtttgagttgggagggacagactgtggctcaggtgcctgctggaatgaggaatagccctcagacagaaggaagcagggactttattttttaaattattttgttattattattactattttatagagacagggtcttactatattgcccaggctggtcttgaactcctgggctcaagtgatctgcccacttggtctcccaaagtgctgggattataggcatgagccaccacgcctggccagaagcggggactttaaaagggagtggggttagaagggatggacaaagatccaggattgaaggaaaacaaggaaatgggaacaggaaataaattttgcatgtttgagttgtactggggagaaacaaggtgaaaaaagaggcagaagcttcacaaatactatgaataggaatattcacacttgtctccggatcacatgagtcacactgccttgttcctctcactacctgatgtcagtggacctctcctaatcctttcctgcttcggcagaagctaccctgttaattaacactgatggacagaatactga

SEQ ID NO: 46967 - DNA, 1035 bp, Homo sapiens
agagcagagtccaacaaagaaatagcaccacccaggtgcacacacgggcatacacacagccagccagttggttgcccaactgctccagctcgggggaagaagagaaggagactagcaaacagtaattagcctcctcccagatgccagtgtctgtctctaagtccccagggacttccaaggagatgccggaaatactcaggtttttcacctcccccatgcaagaatgcaaggtgtggagcagaatttgatcctaaatgtcaatacacagctcctcccataggcacttcccacacggtgctagctcagggcctcattctcagtgccctctgcccccagctgcctaagcttgtcagccctagctggtctggaacagactcttattccctttctctcagtctacaatgacttagctttcctccccattcctatatagatacagcttagaaaacacctcctggaaaatgcagccagtggcctttaggtgatgccctcaagctgagcagaacccaaagaaggctttaggtggctcagatcacacctgtgagtttatattcattcattcaagataaccaaagccctattctgggcaccaaggaaataaggagagagagggtcagtatctgaagaggagagagacttcctcatcctcaaaactttcatatgaagtcagcctatctcatgagccctggaggcaggaagaggccaccaaggtggattcaaaagccctttccgacagttatgttttgagaatcttaattttctgggatctgaagttctttgatgaaagacagaagcccacaggcctgggcacccacccaccccaggcaccatgatagtgtcccaaatgtcaccacagcatccagttctatcaacaatgtggaacagcagacatagctgcagtgtccattttacaggtgaggaaacgtggcccaaacagaaaaaggaacttgtctgaagttagccaggtatcaaggctgcctggatctaaaatcccagcccagctctccacagtgtaagttttaggagatgggagat

SEQ ID NO: 46968 - DNA, 1032 bp, Homo sapiens
ctgatagatctttgaaaacaaaggtgccatgatgggctgttctaacccccacccccactgccaggtaagggtgtcaggggctccagtgggtttcttggctgagtctgagccagcactgtggacatgggaacaggattaatggatgggacagaggaaatatgccaatgatgtggaggcttggaggtaaaggacctgcctgttcttctctgcttttgccccttgacaggtatgggccagcagtttcctgccagatattgcccagcgtgaggagcgatctcagcaggcctataagagtcagcatggagagcccctgctaatggagtacagccgccaggagctactcaggaaggtgggagagagccaagccctgtgtccccaaggagtccctaactttcttatcccatgagagaggtgtgtaaaggagaaagctagaggtgaactagtagagagagacttgctaggaggccttagcaataatccagtaatctaaaggaaagatgatggtgacttagactcgggtggttagtggtagaggtggtgagaagacatcagatcctgggcacattcttttcttctgcttcccttgcctatttgctgaccacactccggctcctatgtcaccttgatgacttcctatccattctgtcttcctaggaacgtctggtcctaaccagtgagcactggttagtactggtccccttctgggcaacatggccctaccagacactgctgctgccccgtcggcatgtgcggcggctacctgagctgacccctgctgagcgtgatggtcagtctcccaagtaggatcctggggctaggcactggatggaggttgctcccagtagggtcagcatctggaccccaggctgagagtcaggctctgattccagatctagcctccatcatgaagaagctcttgaccaagtatgacaacctctttgagacgtcctttccctactccatgggctggcatggtgaggcttttcaagtacctatatttagccccaacaccatttctgggctcctggggct

SEQ ID NO: 46969 - DNA, 1032 bp, Homo sapiens
tgaatttcaccctggcaatgtaaactgatagcttatcttcacaggtgcaggacaatagacagaactcaaagtcatccctctgctcacctgagacaaatgtgtatctgattgctgcttctgccctattgtttatgcaaaaatgcagatccactgagccagactaaggcatcagtgtgactattcctttactccccactccatgtaaattgtgtattcagtgaaaggctgatcaaagaccccaaaaaatgcagccttttgtctcttatctacctatgacctggaagcccccacttcgagttgtcccgcctttccagactgaaccagtgtacaccttacacgtattgattgatgtctcatgtctccccaaaatgtataaaaccaagctgtgcaccgaccacctttagcatgtgttgtcagaacctcctgaggctgtatcatgtcatgagtgtgtgctcaaccttggcaaaataaactttctaaattgattgagacccatctcagatacttttggattcacaacatgaactcagcttcctttacagacccctgagacctgcacattgatccctgccatgcccctccgtaccgtttaacccctgccccattttactcactcatggcaagaaaaccaatatgctgagaagaggagtgttgccacacacacaagaggccatggaggatgagcagagatggacaaatgaggagagtccctgggagcagcaggtgtgcatgggtgtgcaggagtccttctgcttgtgtggagtctgtgagactgtgtgtgaggttggatggggagagcaagcaggagagggatcatgatcatgagggcgagggagtccttggaagactgagggtccatgagtgtgtgtggatctgtaggaggctgtggctgtctcctatttatggccccctaaaactttcattttctacgttcagaaacttccttccctaatggtgtgtaataaagaatttgactgccttttgtccctggctcctgagagggagactaaacctttggaatttcccaagtaa

SEQ ID NO: 46970 - DNA, 1102 bp, Homo sapiens
accgcctgggaacataggggagctgcaggagcctcgtgatggtggagcccccagagggccccctagaaaaggaggacctgagactgtgccctagaactgtgggaagcaacctctgactggggagggggatcctcccatgggatccatgagtgacttcccacggctccaaggactttggcctttatctccctataggcctacatgtgtcctcacttctgaccaccgtggcccagaggtggaggccttgtaggatctctttccattcccctctttccctattcggatttttcttctccatggtagcccagttgctccaggctgcattttagtggaggtagaaactgctgcgagagcacagggccccaagcgggggacgaggacaagtgaggcctctaaaggaaagataggagatttgagcccctgggtttgaccgtccagaaggaagcagtaagatcaagtggaataactgactttggcaggtcctggaacaaaagacctttgaacgaaagaataaaggatgtatagggttgttgagcaccagtgtgctaggcactatactaggtatgtttaaacatctcatgtaactcttaacaacagctttgtgaaattatccccttctaaaatgagatttagaaagattaagcaatttgaccaaggttacaaagattaaactcatgaaatctgtttttcacagattttatttggaaagaaatgtcaaggagaggaagaagcaagaatgtactcttgcttaagtttaagagctactatggtttgaatgtgtctcccaaagttcatgtgttggaaacttaattctcaatgcaaccgtgttgagaggtggggcctaataggtgattaggtcttgagagctctgccctcataaattaattgacattatctctggaatgggtaagtcatggcagggggtttgttataagagcgagtttggctgtcttgttctcctgctttctcacgtgctctcttgcccttccaccttctgccatgaaatgatgccacatgaaggccttcactgaaagtggaccctcaatcttgggcttcccagcctccagagatgtaagatataaatttcttgttctgttatagc

SEQ ID NO: 46971 - DNA, 1046 bp, Homo sapiens
ctcctacctagttattacacaccaaagctctctcataatgtgaagtaatttgatatccccaaaactcaaaactatcagataacacaatgcaaaacagaactgagcctttgattttgagagggaatgatctgcttttaattcctggggtttcatgaggaaaacagtttttttttcttccccccctcccccaaaacagggtctgtagtgcctcctctgtttttcccaaggagtccccggctaccggaagttatcttagggcctgtcatatgtgcattaagagtggcaagacaaaaaatggagaaaaataattcagtcgactaaaaagaaaaaagactttttccagaaaaacatgatccaagaagagaaaaacataatagccttttaagtatatctataactgggatatccacttttaattaagctgagcactctttcagaaaatccttttaaatcccttgttactaaactttagccacaccaagcagttaagattttcagcttttgaatgtcacaaaaagtaacctcacaggtgagaccaacaagccttaattagtttatgacttaacctccagtgtacaaggtattttcttttttctttttttttgagacagagtctcgctctgtcgcccaggctggagtgcagtggcgccatctcagctcaccgcaactcccatctcccgggttccaatgattctcctgcctcagcctcccaaatacctgggattacaggtgccagccaccacacccagctaatttttgtagttttagtacagatggggtttcaccatgttggtcaggctggtctcaaactcctgacctcaggtgatctctgcctcccaaagtgcagggattacaagcgtgagccaccgtgccctgccaggtatcaggtattttcaaaggggtgataagtaacttttgaaactctcattgcaaaattgtgactgagacagtgaaagagatcagacccaaccaactccattttgtttttagcccctaagctgtccttgctcatcactgggcataggctgaaccaactttgggaggtg

SEQ ID NO: 46972 - DNA, 1028 bp, Homo sapiens
tgaactcttagcctcaggtgatcgtcctgtctgggcctcctgcaatgccatgattactggtatgagccatcacactcggcttcaggggtatatatatattttaagacttctgtcaaacttcttaatttattttcagaaaagcttttccggtttgtactttcagtatttgagtgtgctgtaccaacattaagtattcttattttagaaaatttttgccaatttgacagaagaatggtataccattgtttaatttgcatttctttgattatctgtgatttgaatatatctcataagtttataggtcacttatacttcttcagctaatattacatcaaagagactttgagaatcatagaaacctagttacacttatgctattcctataagattgtcagtcacttgagggaagaggttatatagagtcatctctgtgtcttctgggctggctgagtacatggccatatgtacttaataagtgtttgatgacattgctattgctgatgaggcagtaatgttggtagtgtgggtgggagtggatatgaatctgtaccttatttggcttagctgcagaaaaatctgggggaggaggtgagactttagctctagaaacggagattgcggtggcagcgggtgggtgggtgttccaggtggaagggacagttcaggagaaggcatggagataggccaggaagaaggcttgacaggagctcttgggttgttgaagaaagctgaggaaggagagccttggtaagcagagacagaacagcaaatagatgagaaggcctgggtttaaatggagcagtctcaggagaggtaggattacagctgccagcctgagaggtagatcagcattttcttaggggcgatcattaagacagagaacgaatcgaaactcttctgcaaagttccgttctcacttgttactccctcccaagaaaagtgacttccttcttgttctataattgaagcctcaaaaatgggtccctaggggaaaaataatgaggcttaaggagagggcttttgagaac

SEQ ID NO: 46973 - DNA, 1040 bp, Homo sapiens
cttgcttgggtgggcatcagagaaggcttcccagaactatgccttggaggaagagttggattttcctctatggaaaggaggtgtgagatgctatttcaggctaatggaacagaatgagtaaataaaaatttggggttttgagtatgtgacgtctttgtgaaacaagacaattagattgtaggaatgtatatggggtcaagaaagagggcagaggagaggaatttggggatttgggccagatcatggagagccgtgacggctctgtcaatggattgatttgattttaatctttaggcattatggggaaacctgtggagaacagaaggacacaatcaactttgacatggttgtagaatatatttaagatagtgaagggggagaggtacatttccagtttgagtcatggggtcagttaaaggattgtttgcctaattttcttactcaaaaggaacacattatcctgggggggttgagatgtagatatggaagagatatgtccccattccagggagtgtctttctcatctttcccaccttcctggagctgcactgttttggaggattccttgtcacctagtccaggacaggtgacccattaagtaagcagaaatagcttgaaaaattgggaacctgtgaattcgattcttgaattctcccctctacttgtgatgtgacatcaatgggcctttaaaagagaaaagaaaatggaggggcactaatggaccaaggtgggtggactttccttacagaaggaagcctgtgggcctatccatgtatggcctagaaggcaatgtagtctctgatgaataggaaaggagtaatctctgggctttatttttatcctgttatggcttgatcgggcccttctggaagtgtcagtttcctttagagtattgtcctgggtttgataaataatcagatttgggattgcagtcatggttttatcatctagatcactgtgatttctattaggaaagcagccagtcgatgcccccaggcctgtagccattcagcatcctggtcctggacttaactccaggc

SEQ ID NO: 46974 - DNA, 1045 bp, Homo sapiens
aaaaattaccgggcatggtggtgtgcacatgtagtcccagcaactcaggaggctgaagtcccagcaactcaggaggctgaggcaggagaaccccttgaacctgggaggcagatgttgcagtgagctgagatcatgccactgcactccagcctgggtgacagagcaatgctctgtctcaaaataaagccttggatcatagaaacccagtgtggggaggggctcctgatctggatggattaagcaatacaatttttttttaacagtatctttttaatggccttttctactttttcctgtctaggcttcctgttaagacctcagttaccccagaacaccctgggttatttttctcctcacctccaatacttcagtgttgccagataaaacgcagagtgcccagttaaatttgaatttcaaataaacaacagggagtcctgtatttttacttgctaaatctggcaagttcatgggagggcttatgtgttctatttttctctctgggcttatctgcaaatttaggataataactcacccttttcttcctgttactcatacacaatgactatgcaccctgctaaaagtcacttgactgaagagatggttcacttcatgttagggtaagggcaggctatctagaaatggtcttgattgatcagtgttgaagttacccaggaaaaaaaaaaaacacccattcagacattggcatttaatataatttttgtcaaatgagtccgtcatacgaaacgagagcatcattttgagtagccagatgtcaacattgctctgatagagctaggtgatggggtagaagggaatcctaacaacaacaaaataactcagcagaacctgtgctgtaccatatttactctttatggtggtaatatatatatatataacatagaatttaccattgtaataattcttaagtggcattaaatatattcacattattgtacaaccattactgataacaatctccagaactttttttcatcttcccagactgaaactctgtaccagtaagatgctaactccccatttctcc

SEQ ID NO: 46975 - DNA, 1015 bp, Homo sapiens
cagccaagatcttagttttaagtgaaataagaaagtcacaggacaaatatggcatgattccacttgtattagttatcaaaaatagttaaaatcatagaagcaaaaatagaaggaatggtggtggccaaggcctggggtggggtttgggggcgaatggggatttgctccttcatgggtataaagtttcagttatacaagctgaataagttctagagatctgctgtacaatgctatgcttatagttagttaacaatatgtgctgtacacttaaacagttgttatgaagttagatcttatgtgttttcaccacaattttttttaaatcttagtctttagttattcacacaagttctttacacattaaagatatatgcctatatgccttttgttataacaaatatttgcttgccttttaattttgtttgtgatttttgacatacagaatttcataatatctatatggttaagtctttagttttcttttgtaatttcattactcctttcagcaaatgcactgggagtctatgtcttgagtctgggactgtggagctcagatctttctgaggaactctttgtatgcacatggttttctctaactgagatcccttccttagtccccgaccccaccacatatttctactcctcctctaacagttcagtcatttgaccctcctgaaacttttcttgattacctcatgcaaacttgggtatgatttccactatgccttcatttgaccttgtctggagctccattataacaattaacaaattattttatataaccataaactccatgaggacaagaatagagtctttgaatccagggtctctcagagatctagagagaaattgacctctttcatttaatatatgaaattcttcatatattgaaaatgattgaaatccaaaccactattataataattttagtatattttaaatatttgccttaacaaattaattttaatactgtaatgattgtacttaggacagaaacaacataatcatctcagtg

SEQ ID NO: 46976 - DNA, 1049 bp, Homo sapiens
ttcgagaccagcctgggcaacatggcgaaaccccatctctactaaaaaatacaaaaattagccaagcatagtggcgcatgcctgtaatcccagctactcgagaggctgaggcacgagaatcgcttgaacccaggaggcggaggttgcagtgagccgagatcgtgccactgcactccagcctgggtgacagagcgagactctgtctcaaaaaaaaaaaaaagaagaatttggtgttgaaaaaagaaagagaggactatctgacgtccttggattgacatgcagtgatagcctctgctttctggtaccctgatattccacctctcacccatacccccagttatggggttctcaaagacttcagtctctgtggagctgagcaacaccactcaagctcctacagcaactgccactgtttttaacagctttattgaaatataattgacataccatacattttgccatttaaagtatacaattcaattgttttagtatattcacagttgtgcaactatgactgtagtctaattttggaacatttcatcattcccaaaagaaaccccacacccattagcaggcactccccatctctctgcctctccagcctctggcagccactgatctactttttgtctctatagatttgccttgtctggacatatcatgtaaatggaatgaaacaatatgtgaccttctgtgtttcttctttcacctagcatgttttcaaggttcatccatgttggagcatttatcaggacttcattcccttttattgctcaataataattcattgtgtgtaccaccttttatttatcccttcttctgttgatgaacattttggttgctcctagtttttgactatcatgaataatgctactaggaatactcatatacaagcttctgtgtggatgttttttgtttctcgtaggtatatacctagaagcagaattgctggggtcaaatagtaactctttaactttttgagaaactgccagaactcttttccaaagtggttgcaccattttacagtgccctcagcaatgtgtgagggt

SEQ ID NO: 46977 - DNA, 1108 bp, Homo sapiens
cagatgaatccccaaggaaccctggatgctccggctcaggggaccagcactgccgctgcagtagcacatccagtcagtccgaggcagctgaccagtccatgggctatgtgagcgactcctcctgcaacagttcagatggtgtgctggtcaccttcagcaccctctacaacaagatgcatggcaccccccgtgccaatctcaactctgccccacagtcctgcagcgactcttccttctgcagccactcagaccctggcgccttctatctggatctgcagccctccccatttgagtctaagatgtcttatgagtcccatcaccctgaaagtggaggaagggaagggggctatggttgccctcatgcctcttctcctgagcttgatgccaactgcaactcctaccgcccacactgtgagccgtgcccagcagtggctgacctcacagcctgcttccaaagccaggcccgtcttgttgtggccacacaaaattactataaacttgtcacctgtgacctatcttcccaatcatccccaagccctgctggctcttccatcactagctgctctgaggaacacaccaagataagtcccccaccaggccctggcccagacccaggccccagccagccctctgagtattacctattccagaagccagaagtccagccagaggaacaagaagcagtgagttcctccacccaagcagcagctgctgtgggccccactgtgcttgagggacaagtatacacgaatacttcaccccccaacctcagcactggacgtcagcgctcccgcagctatgatcgcagcctgcagcgcagccctcctgtccgcctgggctcgctggaacgtatgttgagttgcccagtgcgcttgagtgagggccctgcagccatggccgggcctggctccccacccaggagggtcacctcctttgccgagctggccaagggccggaagaaaactggaggctctggctcgcccccacttcgtgtgagtgttggggactcctcccaggagttctcacccatccaagaagcccagcaagatcggggggccccactggatgagggcacttgctgtagccatagcctgccacccatgccttt

SEQ ID NO: 46978 - DNA, 1087 bp, Homo sapiens
tctcactacgggaagacctcaggggtggcaagatcaagctcttagacacacccagcaagccagtcctgcctcttgtgccaccatcaccattcccatccactcagctgcccttggtgaccactccggagaccctggtccagcctgggacacctgcccgccgctgccgctcactaccctcatcccccgagctcccccgccgtatggagacagcactgccaggtcctggccctcccgctgtgggcccctcggctgaagagaagatggagtgcgagggcagcagccctgagccggaacctccagggccagcgccccagctgcctctggctgtggccacagacaacttcatcagcacctgttcctcggcctcccaaccctggtcccctagatcaggacccgtcctcaataacaatcccccagctgtggtggtgaactccccacaaggctgggctggggagccctggaaccgggcccagcatagcctgccccgggcggcagccctggagcggacagaaccctcgccacccccttcagctccccgggagcccgatgaggggctgccctgtcctggctgctgcctcggccccttcagctttggcttcctgtccatgtgcccccgccccacaccagctgttgcccgctaccgcaacctgaactgtgaggcgggcagtctcctctgccaccgagggcaccacgccaagccacccacacccagcctgcagctgcctggggcacgctcttagcagtggagcccgtggtctcaggcctccaactttggccttcaggacaccctgtaagaacagagcacacttgctggacagtgccagttccagatgggctgaccggctcttctccccgtgtaggggagccccagcatggactcaagggacagagcacttccagtcgaccccccggctcgcgttcccgtggggatcactgaaccagacacagcattgctgacacatgagactaacacgtgcaattatttaaaaagatttcaataaaactgcctggctggctccgggccgcccctatccgctcagcccgtgcgccctcctcccccaccccattctaccatgggaagttcttg

SEQ ID NO: 46979 - DNA, 1027 bp, Homo sapiens
gtgtcacatgtgactcacgcccggcaccaggaatcctgcctacatacaactagaaccagcttctccctcccaatccctctcagctccaccccaggcttctgtacagccattggtgagaccctcactgttactggagaagggagagggggacagtaaaatgctgtgctaagggagggtgtaatggatcctgattccttatacacactcccagacatacccacgtctagcctctgacccggaacagtttctcagaccttcaacctcttcctgtttcttagatgcactgacccctaaactcctaacagcttgatagaactccttccccacacctacctactaggaccctgtgatacactgatttttgattacttcatgctacctagacttgactgcctcactcttaggttattaggtacttaatactgctatcttcagctcacatctgtggtagtacccattgcttcagaaaaacccttaatcacagctccctgccctgtgacttttccctgtcttcctgaacacagattgttttcttctcattcactaactatatcctgtcattggcttttactcctgctagcttctgatgcttctaccttaatctttttcttccatagtgtccttgaagtggagattgcattttgaatttgtaacgtcccgagaaccaggattggtactcctaccccctgtggaacagcccgaacctaccacctggacaggacctgagcaagtacctgtagacaccttcagctgggacctgcccatcaaggtgctgcctactagccccaccctggcctcatatgctgccccaggccccagcaccagcaccataaccatctgaaactggcccaccctggtgctagttccttccggatactgagaactcagcacctggactctaatgggacccactttttccacctggggtccaatgtcgtggacagtgagagtcgggctttcagctatagcattaatttatttgttcagaatacattggcagctgctagtggtttccctggaagtggca

SEQ ID NO: 46980 - DNA, 1031 bp, Homo sapiens
tctttgccaacatacaccactactgcttcactgattttttttttttaagcccacagtcctttctggctcttttccacctttaacactcttatgttgaaatcttccgtttttcctcctttctctttagtaagacctcaggtttttaaaaaagctaggcttgattgtttattctgcatggtccacttctgccttccttcctcttctattacccttttcttattctagactgtttttaaactcagttatgcttgctttcaccaaagccttaacctttcctgtgattagaaaaagatgcttatgtttccattacttttcctacaagaaaacgcattctcaaattcatatccacttcaaactctcccaacgttttgcatccagaagcataaagtggccattattgtgaagtccactgagtgaccatttaagcttggtgttatgccacacactgtatagtgaatttcataatcctggtgccagatttctaaattattacagacaatagatgatggactgggcacagtggctcacacctgtaatcccaacatttggggaggccgaggcaggcagattgcttgagaccaggagtttgagaccagcctggccaacatggtgaaaccctgtctctaaaaatacaaaaattagctgggtgtggtggcgcgttcctgtaatcccagctactctggaggctgggatgggagaatcactggaacctgggaggctgaggctccagtgagccgagattgcatcactgcactgcactccagcctgggtgacagagggagaccctgtctccaaaaaaaaaaaaaaaaaaaaaaaaaaaaaaaaagaattctttgctatgaaactgaaattgcttctccactttcccttccctctcatgatctctcctcagtaaaaccaaggtgcatttttctggacccacctatcttgggggtgattaggagtagagggttgtaaatacttaaaatttttttcctttctgatataattattgatctccttctagaagtcctgtcgtctttgctggagaa

SEQ ID NO: 46981 - DNA, 1034 bp, Homo sapiens
cgataaaattccttctcatggaatacacaatctaatggggcagaaagtacctactttaaaacaaatgtattaaattaaattgaaaagtggcctgagtaagcctcaaaaaagactaattagaactcaagggaagagaaaacatttcaggctgacagaaaacccatgggcatagaataacatgacccacttagaggactatagatagctctatatgtttagaaggcatatgtggctgcagaggaggctggagaggaagatggagccaggaccacctggtggactgagattcttgttctccatcctgcaggctagtggctctgaacagcagtagtacttttcctggaggggcattttggtccgtggtgggtgcgcaggagatagtgggggtggggggagggggtgggggggcaggcaggagggggtggaggggaaggggcattttcttggttgctatagtgatgagagtgggtgctactggcattgtagtagttggaggccgcagatgttagactctgcaatgtgaggacagttccacataattaagaatgtattccatgagagaaggaatttcaccttgttttggttgttaatccttgtaccttgacactggcaataccttttaggtgtcaaataaatgtcctgaattcggcatgatttagatatcctgagttctgcacagtcttcaaatattccaccaaacagttgtgtagggtgttatatataaatatatatataaatacatctgttctgttattgcttatcctaacactggtgtttaatccagtatctttctttatggagtggcttcagatctcttaaatcaaaatttattcattccctgtaattagatggaagcatctaattacaattagctgagtgcctcctttggtgttctatcacagttatatccaaccatttacatattgaaatacctgtttttaaaataagttattgtcttttatttctctcgtttttttttttttttttttttgagatagagtctcactctgttgcccaggctggagtgcagtggt

SEQ ID NO: 46982 - DNA, 1292 bp, Homo sapiens
tcctgatacttttagagcagggctgaaactcggaggctattttacagatggggaaactgaggctcagggagggagcaatttgtccaaagtcagagagcttgtgaatggcagtgtgctggggctagaaaaaaggtttcctaattcctatttcatactagtgtgtttttttttatccactgcaatgtatacttaatagaaaaatagacccaagtggggaaaggctcaaagcataacctcccttctccccggtctgcccacaagggtgctttatccacaaactgttccttatttgccaggcgtcagccaagggccaccctccggtggggaagtgacttggacagaagagagagaggtccaattttttaatggttggaatgtgggaggaggagggggtgtcctggtctaggggatgtgccatgaagatggctccatcatggagtgactgtagtcttcatggcccaagtctgtagccacctctggtgggtgtcactctagataggatggagatgtgcctgatggagtctttggaaataacagccaacagaacagctggggggtggagaatgggtatcagtgagctctgggggcctggttcagtgtacaaacttaaggagacgaatgcacgtgaaaggtcacaacccctgcagagatgtctggtcacttatgtgtatgtgtgtaactgagggattgtggggaggctggcagcatgtgtacatgcttgtgtgttgttaagtgtagacacgtgcatgtgtgtggggtgcatgtgagccagtgtatcttctgagcgcctgtgttatggtatgaaggggaggggacatgttgtggcccatgtacattcctcttcagctctgcctcctcctcatatggacagatcactgaagctgtgaatggggctggagaccctttctcagcagttccaagggtgagggcagtgttgcatgcctcccataacgaatataagttatccatccatccccagccagtgcctttgaaggaaggagctgtggaggcactctgtgttgattactgctgctggcaaattggacactgggcagaggcagtagccagtcaggttttcagttttggtaaggggaagtttatgctgttgggccaagttcctagcttccatcctctgccatcatggcttcttcatgtgcccattgagcaagcattgggctggtgaggggagcagggtgaccgacagccacagagcatatacagctgaaagttgtggataaaaacactgttgcccagaagcaggttcaggtgctttggggagaattgtaatgaag

SEQ ID NO: 46983 - DNA, 1026 bp, Homo sapiens
caccgcatattctcactcataggtgggaattgaacaatgagaacacatggacacaggaaggggaacatcacactctggggactgttgtggggtggggggaggggggagggatagcactgggagatatacctaatgctagatgacgagttagtgggtgcagcgcaccagcatggcacatgtatacatatgtaactaacctgcacattgtgcacatgtaccctaaaacttaaagtataataataattaataaataaataaataaataaataaaaatttaaaaataaataaataaaataaaaaggaagttggaaaatattctagacaactgataaatctagaggataataagttttacctcttcttatttcttatagaaaaatgccacaaaaacttttttttttttgtcaaatagattttctcctcaaaaagtgaatcccgactaaaacatctgttgcagcgagccccagattattgcccagagacaatggtaagtcttattgtaacttaactgtagaagcttctgtctaaatgaaactatccaatgaattactttcagagttagcaaatttttaaatgtgattggaatttgtggtcaaaataaaatgttaagtttaacttaaatacttaaaaaaaatcttcatataaattgctagatagaatattgtttttcttcttttattatcctatgatataaatctaaaaacaatcttaaatataaatgtgttcctatctttaaatttcattatagtattttatctggggtcgggcgtggtggctgatgcctgtaatcccagcactttgggagtctgaggcgggtggattacctgaggtcaggatttcgagaccagcctggccagcatagtgaaacccgtctctactaaaaatacaaaaattagccagacatggtggcacacgcctgtagtcccagctactccagaggctgaggcaggagaattgcttgaacccaggaggcggaggttgcagtgagctgagatagcatcactgcactccagtctgggcagcaga

SEQ ID NO: 46984 - DNA, 1048 bp, Homo sapiens
tatctggaacttagaattttatttattattatagtttgactaattttatgaaaactataataactaaatctgtttattttgattttggaaaattgaatttgggataagggaaaatatatgacttattatcttccaattttctgacatactgtagatatattgcttacctatctgaatcatgtaactttaagaccttttaaaggtctctaatacttgggctgtcctcagtgtttgggatgctcatgtgccagaccaagaaagtgtgagtttgtttgcaagagcctctttagatatggtggcttatattatgtgaaggggaaaataagttgatgattaaatagttctgactgacacattccctttagtcttcagttttgtctataggcttggaaacagtgattccagtaagtatcctgagtaactagactcatcgttaatgctctcagatgggaaaagaacaaggaatatttctgtatctcagctttgttccccccgaatagctgattgatgtgcctgtagttctagaacattgactgtgtagacatagccataatcaaattagctgttcataatttctgtagaaattaattgtcatatttaggaactggttatctacataaaagccttttgttgggtacacttttaggttgaaatttggaattgtatgaattcatctttgccaggtaagcaataaaagtgtaacatttagcacttaattttaaaaacttactgtgtgaatgtaaaattggtgtcattgtcctggaacctaatttatactctggagtttctatcctctccttcccttcaacacctaaattttttttttctaagacacagtcttactgtgttgcccaggctggtcttgaactcctggcctcaagtgatcatcctgccttggcctcccaaaatgctgagattacaggcatgacccaccatgtccagcccaaattttcaaatacataatttattctcattcactcagtccttaactttgttctcttgtctccacttctgccattctactgaaactagtctttgaaagattacc

SEQ ID NO: 46985 - DNA, 1065 bp, Homo sapiens
ttgaaatgacacattatttggaaggctgaagaaatttaataatcacttgtttagtgatatttccaagtcatgacattaaactccttacatattctagtcatctatactttttgacattcatggtatccacaaggaaaaaacaccttgtagaggtttaaaaacatttatgtttttaaagaacagttatatttaacctctcctacttagcatttcataagctggatttcttctatgaaatgtgaaactttaaactggaagaaatttcaacccatctgtgaaaaggaaacagatttttatttattgaggccttagaaacaaagtagcccctttacttttaagtaatagcatagttaagtagaaagtactgggcatataaaacattaacataacagttaataaaatgtgctcttttgggtctttgtccaaaagtaactaaatcatccaaaattcaaacctgtaatttttttttacaagattcatatgatcagtgttttgttgtcatcatctttatcattgatgaaaatgagagagagctggagtagtcagtagtaaaagggcagtggacagagaaaggattgaaacaagtggacaaatggaggaatgaaccatttttttcaaatccaaaagccaaatcaaattggacagccagatatacgtagcaagcaaagggcagagccagggctagaacccggactgccctaccagtgctcttccatgacactgcgttgtgagaatagtctggtctcactgtattgcaatggactatttggatttctctcttctgaatgcacccaaagcaaggttgaatgtttgttcatagattaatctatttaaccagtttcctattttaaaaatcaatagaaaagggtcactgaagtggcagaaaataaattgcagagcgaacttctgggctagaggttggaccagcagagtctacttcccaggtgcacccaaagggtcttccccaccaaaaggaaaaccagtgtggcatgaaggatcacatagggttccctcaactttgatttactctgtttttgtgccaggtttgcccacagttcatatgct

SEQ ID NO: 46986 - DNA, 1050 bp, Homo sapiens
tggaatcttttgtggagctttaaaaaaataccaggctgggcacagtagctcacgcctgcaatcccagcactttgggaggccgaggtgggtggatcacctgaggtcaggagtttgagaccagaatgaccaacatggagaaaccccatctgtactaaaaatagaaaaattagccaggcgtggtggcacatgcctgtgatcccagctactcgggaggctgaggcaggagaatcgcttgaacctgggaggtggaggttgccgtgagctgagatcgcgccattgcactgcagcttgggcaacaagagcgaaactccgtctcagaaaacaaaacaaaccaaacaaacaaacaaaaaatgcctgagtctctcctccagagacagacacagttggtctgaggaaggacccaggcattagtatttgttaaatgctctccaggtgaggctgatgtgtggaacatggatcagcagtagcatctggaagcagaaatgcagaatcctaggtccctctgtagacctactgaatcagaatctgcccattaacaagattcttgcacacatttgagactgactgctctgaggtccccgctcctggctctggcccggagagcagcagctcccagggaaacgcctgcccatatcaacacgtgtggggacagtggatgccccaggtgaggtccctcctgcccacagtggagatccgtggcttaccagcctgattgtctttccaaatatggatgtttcaagagctgcaaatggggtgagatgacagtatagtctcctagaaactcggagcatcatcagaaggcccttgcagtacattgcattcaaccttttcattgtacagaggcccagagagggaaggctttgcccaggattacacagcaagtcagtgtgtatgggttgtgggggataggtgcagattccctgaccccaggccagtgctcttcccagccccccagaaggcccactcttcagcctggccatgctcatgggcaggagtccctgagtctgcaaagcagcgtccaggatgtgtcagctgactggggctttctca

SEQ ID NO: 46987 - DNA, 1060 bp, Homo sapiens
ttttgagacagtcgctctgtcacccaggctggagtgcagtggtgcgatctcggttcactgcaacctccgcctcctgggttcaagcagttatcctgcctcagcctcccgagtagctgggattacaggcgcccaccaccgtgcccagctaactttttgtatttttagtagagacggggtttcaccatgttggccagactggtctgaaactcctgacctcaggtgagccacccgccttggcctcccaaagtgctggaattacaggtgtgaaccaccgcacccggtgacaagttatttcttgtaggagaagaaagagacatgggtgaattaaagggaagctttctggagaagtaattttattggtagcagtggtggagggaagtttagggaaatctcatgcatgatagttaattgtactgcacatttgctgtataccaggtacactttcagatcccagcagtagctccacaggttaagtggtagtgtcatatttcagatgagaatggatcggtgtggaagttgagcagtgtcactaaggtagcaaggtaataaatggctcaagtgcagcttcaaacgtaggtctgcttgacttcaaatgtttctggaatgtggaaagttgaaagtgggtttgggacagtctttcacttttgaaaactggccctttttctgtctggagttcctgaaaggccctagaaagtttccttctgaagcatcgtgttgcttagtttagttgttgtagtaagtcaaggccctacatgtcctttctgcatgtttccacagcaacagacgatcccttggcttgagccagttgattcttgtaagaatgttagtgcagtaatacagtaactaataaagaggaaagcagatgccagtgggtctggaggagccttcagacagcatgtgatttttaaggagatgtgggatgaggattgcttcttgttttgtatatggagtagtgatcaaagtctctcatattccagcccagggctggactatattagtggatagttggtatgtcaattgtactatattaaccataatgtaggcctggccagactagcca

SEQ ID NO: 46988 - DNA, 1035 bp, Homo sapiens
aagcgattctcctgcctcagcctccccagtaatccccagtagctgggattataggcatgcaccaccacatccagctaattttttgtatttttagtagagacgggattttaccatgttggccaggctggtctcgaactcctaacctcagatgatccacctgcctcggcctcccaaagtgttgggattacaggcgtgagccaccacaagcagccggcatgtatttctttatctctcactatctactgatgtatgtctcttcagcttagtgtcttagagaaaaccatatttagtcctcagaaacttcatgtttcatgtttgagaatccaatctagcaaacctgctaggtatgcattttcttgctgtcatttctagaacctttaggttaactgttagcaatgatcccatacctctaccccctgcacttctctccagtggagtttcttttgtagctctgccctggctctgccacaaacacactgcagaccaagtaggagtagatgctttgtggtcctctctagtgctaatattctgtgttctatcattctctggttcctgaatcatctctacctttggtaattgtcctaatagcaccctgcctcacagaagtgcttctaccatatttagttatgagagtgccaccttgtgttccacaaaaccattgtcaaacctggaatatggactagtttgggagaagaggtaaaagattaagatgaataccctactatgaactaatattggcagcattggtaaagaatcatctataattgtttctcccccaattggtgcccagaaggcttttttcctattaataatagaagtcagtatttccacatacacccttctcttttgctctgcccaaaacaagacaaaacaaaactaatgacccactaagatgtcagtggactgggataagaccaggaataggactgtgggaaagaccaggcaggaatagaagcactgaaatcagagttggttgtgcaaacagagaaaacagaagtttatcttcccctctctactcttctcccccaacaggca

SEQ ID NO: 46989 - DNA, 1029 bp, Homo sapiens
ctattgtttagccatcccaattgtagtgagcttagctctctgagagtttggttaatatgcataacctgtaatggtgtgattcagccaagggaaaagttactttccatggaaccctgaaacgaaagctgggtgtcatgaatacacccagatctagttactttggatatgattatagacttggtcatgttgagtctcctcaatatagccctgccccctgaaagccacttcatgaaggggtccgttggcaggaatatgtgctttgtaattaggcagccaaggatgttccaacatgattattttagaattgagggttctgtgggtacttatttgtgccttaaaaagtcttgaattgacttcttaaaaatgttctgtttgaaatagattttatttagttactgatggttaaggagttgtgaggagaaaaacgctttcattctcatatcactactcaccagcagctgggctttaatgccctacacttagagcccttcttggaagcagcaaagagaggatatgtggtgttgcttccctcagggcaggcaggttcagagcccaactttcactgaatagtcaatccattcacttcagtgtataaacgggccagaccgagcctggggatatttttaattttcagggtagagccttgggttctcgtatgcagaggcaggaagcaggttgggttaagtgcccttgtctctggcagctctgttagacagagatgtggcaggagagagagctaacggctttgccagccagccagtgctattgtgggtccagtatgacagagcagttggactctcttttatatgctagcagcccttcagctcattggattccggcttgagcctgtgtcctggtcactttcctctgggggcggtgtgctcaaggagtgcctgtcaggttccatgtggagtccacaggactccacagtcccagtcccacaggactgctctctggtgtgcaggctgggttgccagtggtgatggcttccatcagctacgtggggctgttgttgagcctgtggtcagt

SEQ ID NO: 46990 - DNA, 1074 bp, Homo sapiens
gctacagcctagaacagttaagtaaacctttctcactgcccctaactgtgtgtgccatgaagtcgcagtgttgtagtggctctgggcttcagcggtgtttgccacggccatccctgtgatagtgccacccctccgtccccacagaccagtcatctccattgcttttgctttgcccgtgatgcttgttggagtagatgaatatagtgtgtcttagcgctgtcctttccggctgtagctcccaccagttaattccgaactgggggtgggctgaccttgatgtgaaagaatgttggagcagcatcctgccaaaaagcaactcacgttggctctcctgccagtgtgccctgagtggccccaaggcacctggctggagggaaaatggcaaacttttggctgaactggagaatgtcctaacaaacccccttccagaatggctttagtctctagtgcttgctagcatgggagctttgtcttgaattccttttgatctgccccgtttctctccagccttaggaataaatctagaggctattgtgcaatgatctgtgggctttttagaagtctctaaatttccttgaaattcagtacagcccagcataaactactcaagttcttgatcagcctgctgctttgttcttattaataaaagcagtgtgtagctggctaaggacttgttttattaatgctccacaggagcagagacagacagagagacatagtgagccttgaaccaaacacctgtattccaacattttacacagcggtctgggcaccctgtgcctaggagagccagctacgtgtctacctgagtctgacctgggccaggggctgttatcttgggaaagccagaatgtcattaagaaagggacaaataggcagttgcttgtgtagcaaggcagccaccaggttgctcaaagggggttctgcataaaccaacatattttgttgttgcttccagggcagcagaagaagcctttgtaaatgacattgacgagtcgtccccaggcactgagtgggaacgggtggcccggctgtgtgactttaaccccaagtctagcaagcaggccaaagatg

SEQ ID NO: 46991 - DNA, 1062 bp, Homo sapiens
cagtagtgcctcccctggcagggttatttgaggaacggaatgagatcatggacataaagtatttagttaagtgctggccacagtaaatgctcagtaagcagcaggtatttctgtggttatctgtagtccttgtcttctgcccgtcaccaactcagatcaatctgcctcctactaatctgctagaatatctggaccctgaaggagaaaaatccccagctgtgcaaactgcaacctagacatcaactggtggtctcctgtctcccctgggccctcacagctctcacccattctctctgactgcgcttttctataccttcaccaccttcccagtccttctacccccactgccaacagacgagcatacttcttacctctctcatagggggcaccaccaggcagtgatcccctacctttttgcttcctgtcccatacacccatcatctcggctcgccatgccctctcgtggaccctctgcctggctttgcagctcatctcttcccacctcttcagaaccctactgtagggctctatacacttctctcctgcactctcggcctccactccccatctcttttccttcagcatatgctcacaaattggttttgggggccaaaaatctacactgtttttatgtatgaagcacagatatactacacatacagtgcatgtatgtgtgatatatacataacatgttttgtccatttatttcttcattaaaatgtgtattaagtaccctccctgtgatactggctgagaaaacaaaactgaaggaaatcttccctgctgtcttggaactctagacctctgtccaccaccacccctggggaggaagagtggcaatatgggtcagccaagaagactgtgcagttttagtgcgagggagccctgctctttccctaagaagtgaaaagggggaaacttctggcttcagtgttcagctgtctttggaatttccactttgaagtacttgtctactatttggttacttaattcctcgagagagggacaccaaccatcatggagcttttttgcctccctctgcaaggccattccagaggcgta

SEQ ID NO: 46992 - DNA, 1030 bp, Homo sapiens
gtatgctgtactcaataaagagcagaactgtaaaaatgcaaaatggaaaatccacacaactgatcacattctagagaagaggcagctcccttcaccatttgctgatacccctcacctgggcagtgatagtaatcagcatactccacactccaagctgttaccaagtatagaatttcaggtcttttgggtggcaaaagcccgatctgatgcctaaaggggtcttcccactgtcaagtctaccgtcttggattcccaaagaatttacttctttgaaatgttaatgatcagtaaaatagtgagacaaacattgtaaaggatccacaagtcaatactatcagcaaatgattacaagctcttgtgtatgtttctagtcttaccttccaactatatatacttaaaaaaaaaatcaatcgctcatatgggatataaagttaggagtttaggagttattttaccttcatgctgactattgcaactcggaggttcgtcccgccaagatcaacggccaaggcacttagagtttcaagaatatggtcaatatcttgagagatattctccttcacaggaggaaagcagaatttcttttgcagtggctcttgaagatcgatagatttgagaaacttcaaaatccttggaacagcatttccatccccatatatctttgaactgcaatatacaaaaagtcaattaaattatatgcttctgccatacatgttaagtggtagtgagggtataatgtaatggaaactgagacttcaggtaaaaataattcatgcttcttcctaaagtgacatcttcctgccgtgcacagtggctcacacctgtaatcccagcactttggggggctgaggcaggaagattgcttgagcccaagagtttgagaccagcctgggcaacacagacatagcaactctatctctacaaaaagtaattttaaaaatcatgtttaaagaaataaataggctgggtgcagtggctcatacctgtaatcctagcactttgggaggtcgaggctggcggatcacctgaa

SEQ ID NO: 46993 - DNA, 1057 bp, Homo sapiens
tcacctcggcctcccaaagtgctgggaatacaggtgtgagccaccatgctaaaataactcatttttttcttatatttttctttatttttttttcttcttgagacagtgtcttgctcttgtcgcccaggctggagtgcagtggcacaatctcagctcactacaacctttgcctccagggttcaagcaattctccagcctcagcctcccgagtagctgggattacaggtgtgtgccaccacgcccagctagtttttgtattttttagtagagacagggttttgccatgttggccaggctggtcttgaactgttgacctcaggtgatccacccgccttggcctcccagagtgctgggattacaggcatgagccaccactcctggcccttatatttttcaaatatgttaaaggtatacataaccctcaacaacattttttgttaaatctctgctctttgctctttcttcccatctgtttcctcacatccagtctgctcttttttctctcttaactaaaaactctgttaaaaaaaaaaaaaaaagttgtcttctccgcttcctccgtctttatagagaggcaggagagaacacttctaagtgtgccagggcaggaccttcttttttcaggcagataaaggagtggatccatggatagtattttttagaggtggggtcttgctgtattgtccaggctagacctggactcaagtgatcctcctgcctcagcctcccaagtagctggaactaaaagtgtgcaccacttggccagttttcatggatgattgttatgctttttcacttcctcttggttaatcttgacagacatcccctcctcccaataaaaatatccaggcatggtggctcacacctatagtcccagcactttggaaggccaaggcaggtggatcacttgaggccaggaattcaagaccagcctgggcaacatatttagatacccatctctacaaaaagaatttttttttaattagctggtcttggtggcacatgcttatagtcccagctgctcaggaggctgaactgggaggactgctttgagtcc

SEQ ID NO: 46994 - DNA, 1038 bp, Homo sapiens
cttactctgtcgcccaggctggagggcagtgacgcgttatcttggttcatcgcaacctccacctcctgggttcaagtgattctcctgcctcagcctcctgagtagctgggactacaggcacatgccaccgtgcccagctaatttttgtatttttagtagagatggagtttcaccatgttggccaggctggtcttaaactcctgacctcaagtgatgcgcctgcctcaacctcccaaagtgctgggattagaggcgtgagccaccatgcccagagacatttttatttttatttaattaattagcttattttaaaatacaaagatgaagtctcactgtgttgcccaggttggtctcaaactcctgggctcaagtgatcctcctgccctgacctcccaaagagctgggattacaggcgtgagctgccatgcccagcctgagctgttatttttattctgtccatttgataatctatttgaaagctatactccttgtgatccaatccctacattgagttgaagttaaataaacactggtcttgctctgagtcttaaagaaccatgttgatgtttactgtagatgtttactttaattgggctgcacaggagttttattcagagcatcatccagaaagcttctaaacatcttcacacagttctccttgtccctgtagtttcccaggtgttaaaaatctccttttctgtccctttgcacagggttctcaccccatcctgatgctcttctgaatcacctcctccttcatgcttctcctaaacagagactcattctgcagggattctggtgaatacaattctccattgagctacacatccttagaacaaatgtttaatgagcacctactgtaggctctgccatgaataatctttcacatttggttaggcttttttctgtctacagaattactttcatgtccattatttagaataggggtcatcaaatcttttctatagagggccagatatttttgcaggccatgtctctgtcacaacttctctgctctgcccttgtggtacaaaagca

SEQ ID NO: 46995 - DNA, 1053 bp, Homo sapiens
cgtgcgactcttcctttcacttgaacacttagaggctattgtaggattattagttggcttaacttcaatgttattgtgtctcagggagtagggaggcccacggaagaggggagagagatggggaaatagccggttggtcagttgagcaatcggaacatgcacacttattgattaagtttgctgtcttatatgggtgcgatttgtggcacctcaaaacaattacaatagtaacatcaaaggtcactgatcatgcctgtaaacctagcacttcgggaggctgaggttggaggatcacttgagtccaggaactcaagaccagcctggacaacataatgagaccctgtctctacaaaaaaattaaaaaaactagtggcatgcgtctgtagtcccagctactcaaggggctgaggtgggcggattgtttgagcccaggaggttgaggctacagtggtcgcaccacggcactccagcctgggcaacagagtgagaccctgtctcgaaataataatcacagtcataattataataatgaaaaagtttgaaatgctgtaagaatgatgaaaatgtgacacagacgtgaagtgagcacatgctgttggaaaaatggcaccgatagccttgctccaggcagggttgccataaaccttccatttgtaaaacgtgcagtatctgcaaggtgtgataaagcaaagcacaatagaatgagttattcttggactcacagagcataacacggggataaatacgcacaaatctatactgattaaacatcttgattattgaagtagattttacagtatgacttttttaagatgcaagatatggaatcagacctatcctcacattttctagtactgggttaacatttgtgtaaacttttagctactctagattagaaaatgtaacatcattgttccttatcttttcttatacaaataagactaggccttaggtctgtggctttaatgaaataataatttgtcattatttatgtcaaattcagcccctgctttactttcttttcttttcttttttttttttttttttctgaga

SEQ ID NO: 46996 - DNA, 1016 bp, Homo sapiens
gagcaaattcaagagttttctagaactgcattagcagtttttccagacacactgctgatctctaaaagtcaaccacgaggttattttccacaagtaagatggagatggtatgagtgtgactttgtatattaatgtgcataacagggccctacttagctctatggtttttaaaaaataaactacttaattttaaaactcagggagacaaaatcaataagatctacctaattttttttacaactaatttttatttattatttgatgtataattaacagtatatgtaacccacataagttgtgaagcataataataaaatacatatcatatacataataaaattgtgtatgactggggtcttagtttgggttttcctgatgactactgataattttttcatgtcttcttttttttttttttttttttttattttgagacagaatctcgctccgttgcccaggctggagtgcagtggcgtgatctcggctcactgcaacctctgcctcctgcctcagcctcccaagtaggtggaactacaggcgcgtgccaccacccctggctaattttttatagctttagcagagacagggttttatgatgttagccacaatggtctccatttcctgaccttgtgatccacccgcctcggcctcccaaagtgtgggggttacaggcgtgagccaccgcacccggcctttttttttgagacggagtttcactcttgttgcccgggctggagtgcaatggcacaatctcagcttactgcaacctccgcctcccaggttcaagtgattctcctgtctcaccctcccaagtagctgggattacaggctcctgccaccatgcctggctaatttgtgtatttttagtagagacgggtttcgtcatgttggtcaggctggtctcgaaccctgacctcaggtgatctaccctcctcagcctcccaaagtgctgggattacaggtgtgagccaccttgcccagcttcgtgtcttttttttttaaattattttttcttc

SEQ ID NO: 46997 - DNA, 1052 bp, Homo sapiens
agttgggattacaggtgcctgccaccatgcctggctaatttttgtatttttagtagagacgggattttaccattttggccaggcttgtcttgaactcctgacctcgtgatccgcctgcctcggcctcccaaagtgctgggattacaggcatgagccactgtagagcccccccgcctttttttttctgatacggagtttcgctcttgttgcccaggctggagtgcaatggcaacctccgcctcctgggttcaagcgattctcctgcctcagcctcctgagtagctgggattacaggcatgtgccaccacgcccagctaattttgtattttttttttttttaattttttcgatacagagtctcgctgtgtccccaggctggagtgcagtggcacgatctcggccactcccaggttcaagtgattctccttgcttcagcctttcaagtagctgggattacaggcacccgccaccatgcctggctaattttttcgtgtgtgtttttattagagatgggttttcaccatgttggccaggctgatcttgaactcctgacctcgcgatctgcccgcctcagcctctcaaaagtgctgcaattacaggtgtgagccaccacacccaatcagagtccttttttttttgagatggagttttgctcttgtttcccaggctggatcgatctcggctcaccgcaacttccacctccagggttcaagcaattctcctgcctcagcctccagagtagctgggattacagacatgcgccaccatgcccggctaattttgtatttttaattttgtgtttttagtagagacgggctttctccatgttggccaggatggtcctgaactcctgacctcagttgatctgcccaccttggcctcccaaagtgctgggattacaggcatgagccaccgcgcctggcccagagtccctcccttttttttttttttgagacggagtttcgctcttgttgcccaggctggagtgcagtggcatgatctcggctcaccgcaacctccacctcctgggttcaagcaattctcctgcctca

SEQ ID NO: 46998 - DNA, 1076 bp, Homo sapiens
gctgttagtattggagcttggaacaccacctgaataagtttattgctcattccatatgatgttttgtcacagagtgatttgccccggatcaaaacggagattgaggccttgaagaacctgagacatcagcatatatgtcaactctaccatgtgctagagacagccaacaaaatattcatggttcttgaggttagtagtatgttccagatacctgaaaacatttgatcactttatcaatagtaaaagagaaaagtacatttcacctgaaagattagaagagatgttaagcgacttacctgttttgttccatttgtaacaatttagattaaatagatgtatataataagttggagattcaatgtaaatgtcatttttctaatacacccctaatggggtagtatggtttactagatagaatatgttagaattttctcctagagggaaggactcattctagtttttttttttttttttttgagacggaatttcgctctgtcgctcaggctgaagtgcagtgatgccatctctgctcactgcaccctccacctcccgagttcacgccattctcctgcctcagcctcctgagtagctgggactacaggcgcccaccaccatgcccggctaattttttatatttttagtagagacggggtttcacgtgttagccaggatggtctcaatctcctgaccttgtgatctgccctcctcggcctcccagagtgctgggattacagacgtgagccaccgtgcccagcctcattctagttttatatggtatattaatttcctagggctgttggaacaaattactacagacttggtggcttaaagcaacagaaactcattgtctgacagttctggaggtttgaagtctgaaatcaaaatgttggcaaggctggttccttctggaggttctgagagggaatctgtttcctgcctctttgctagttgttggtagttgctggcagtccttggcactccttggtttatagatgcaccactcccatcttggcctccgtcttcaaatggtgttttcctctctgtgtagctgtgtctctgtccaaatgtctctcttc

SEQ ID NO: 46999 - DNA, 1031 bp, Homo sapiens
tttttttttggagatggagttttgctcttgttgcccaggctagagtgcaatggtgcgatcttggctcaccgcaacctctgcttcccaggttcaagcgattctcctgtctcagcctccctagtagctgggattacaggcatgtgccaccacgcccggctaattttttgtatttttagtagagtcggggtttctccatgttggtcaggctggtctcgaactcccgacctcaggtgatttgcctgcctcggcctcccaaagtgctgggattacaggcatgagccaccgcacccggcccaatatataaacttctatacatatacttcttcaatgaaaagcttaacaaaataaaaacagaatgctgtgtcaaatcacattttccttttgacttataaaataagaacctcctcttttctttttttggaagataaaattttggcttcaggttataataaaaccacaattgagatcacctactgtaagctttgttaaaatcctatatatcagagacagagagtagataagttgttgcttggggttaggggtggagagtgactgcctgtgagtatgggttttctttttgggatgatgaaaacattctggaattagaaagaggtgatgattacacaactttgtgaatatactaaaatctacactttaaaagggtaaatattatggtatgtgaattatgttcagttaaaaaatcaaaaaaatcacaggaaggaaaataggaaaattatttcaaagcaaactaacaaaagaagacatgtaaagaggaagaaagaacatcttgtgttccatagcaaactgaggtcagactagcagagcagcatctctgaatgcttcactctctttcttcttcttttttttttttttttttgagataaggtcttgctgtgtcacccaggctgaagtgcaggagtgcgatcatggctcactgtagccttgaccctctgggctcaagtggtcctcccacctcaacctccccactagctgggaccacaggcactgcaccactacatccggctaattaa

SEQ ID NO: 47000 - DNA, 1032 bp, Homo sapiens
ctcttccgcatcctggcagaagactggaggtcacaaggcattcttgtaccaaatacagctcagatgcggatgatgaacaattctgaaatggatgcgcaaagtcttcatattgaacagtgcaccaccatctcaaattcccttccctattcaactttgagaacgctgaaaccaggatttgtatcctatttgcagtgatggtggggaaaatattggaagatttatctccagggaaaagctaagataaatatcctactatattagtggttgggagttcaagttcctgtccgttcatcttagagaggagccttcaaggtattgagcagccccatcatacacatagaacctctcatcagctgtgtaacgtaattcttcacttttaagtagaaacagacaaccaaaaatcactagaaatttgaggaaaacttctaacatgaaagtcggagatcaaaacaaatggagtaaggtggggagaggaaagaagaaaaagtagatactgagaaaaaaaaaccccagatatgcagggagcgggagaaaatggctaaaaactgctaattaatattctcagataagagaagtgattttcattcttgacataggaataagatgaataaaaatgaacattccaagagatagctcttgaaaatctaaaatgtgaccacagaaattaaaagctcagtaaaagtgtttgaaaatgaaattcatttgaaatcttttaaaagtagaacctggtgggctaggtgcggcggctcacacctgtaatcccagcactttgggaggccagcgcgggcagatcatgaggtcaggagatcgagaccatcctggctagcacggtgaaaccctgtctctactaaaaatacaaaaaaaatagccgggtgtggtggcgggcgcctgtagtcccagctactcgggagtctgaggcaggagaagggcgtgaacctgggaggcagagcttgcagtgacccaagatcgcgccactgcactccagcctgggcgacagagcaaagtagaacagctaggcacggtggcttacgc

SEQ ID NO: 47001 - DNA, 1032 bp, Homo sapiens
gtaagatagaggtgaaaggaatccctagactgacaattgagtagctggctgagaagccggtccagagtggagcagaggatgcagacatcaggtggaatctctctaagtggggaagcagttagcagatgtgtgtgaacatgttgagaggaggtaaagtgttggaaagggtggagttcaatttgtaaggaataactgacttttatttttatcttcaggaaaaacaaaggtataaaaaaatggaaatgcaagaatagcaccctgtgtggtttagctgcagagctgatattcggccagcatgaccacattggttgttaaaatattagtgtatttatatactgactggtaaataaccactatcttcagtgccctccatgttgccctgttacttccctggacactactccctcccctcttctcacaattaaaagattaataattggaaaggcaggcgtctcccaggaccctactgacctcttggcctctattttgatggttgatgtcagggtaacaattaactattttgaacattatccctacttagttgtgaatgctatttacataatcataataatgcaaatattaacttagctaaacattgtgataaaattatagtaggaggatacagggaggagatgtgtgggaaagggagggagttgcagtagagttaaattcatatttctcatactaggaaatttatacatattatctgaagctgaaaaaaattttaagctatgtaagcatttagtttggaaatacagaattaatagcagaagaaatagctaaaagtgtttgaaagttgttccttagggggagtggaaattgtatgtgtgtggaggtgtggtgcactggttgctgtttttcatcatatgctgtgtaaacctattggcttttaaagttctgaatgttacactgaagaaaaaaattaattaaagatagaacatcatttccacaaacaagtaatcttctaaccaacttgattttcttttcctttagtggcagtatgatcacctcacggctacctatcttctgctt

SEQ ID NO: 47002 - DNA, 1025 bp, Homo sapiens
acaactctgcattagatttcatttcctatttgtataaaacctcaaggtcagcttgaggtgagatcttagatccttctaaagtgttttttgttttttatttttatttttttgagatggagttttgctcttgttgcccaggctggagtgcaatggcacgatctcagttcactgcgattttcgcctcctgggttcaagcaattctcctgcctcagcctcccatggagctgggattacaggcatgcgccaccacacctggctaattttgtatttttagtagagacgaggtttcaccatgttggtcaggctggtctcgaactgctgacctcaagtgatccacctgcctcagcctcccaaagtgctgggattacaggcgtgagccaccatgcccagccccttctaaagtctttcctgagcaaatgcacagccctgggtatgagcacatcctatacatgtacattgggcttgtagataccctggtatattttggagcttttccaattcactgtggacatcttattctctaacttttttttcagcatttttgttagtttattgtggtcaccagctattacttactgcttcggcagccacaatgtgcaacaattgcctgtaaatttttttttgtttttgagataggatctcattccgtcaaccaggctggagtccagtggtgtgatcatggctcactgcagcctcgacctcctgggcttaagcaattttcttgcctcagcctcccgagtatcggggactataggcatgcaccaccatgcccagctaatttttacaaaattattttgtagagacagggtctcaatattttgcccaggctggtctcaaactcctggactcaagagatccacccgcgttggcctcccaaagtgctgggattacaggcgtgagccactgcgcctggcacctctaaatctttttaacagatgctgctggggaaaaggctgttcatactgggcaggctctgagtaaggtcaaataaagacagctttcaggctgggtgcagtggctcacgc

SEQ ID NO: 47003 - DNA, 1054 bp, Homo sapiens
ttttttgttgttgttgttaattatgttttcgaaatcagttgggaacaaatacatatttaaaaatatttatccatgtgccacccagaattaccttgtctatcttgtatcacactatgagaagcactaccttaagaaatttgtatctcttctttgggccataggttcttattttgaaaagtaagatagttggatacttttcttcctaggcattttgttatttatacaatgaactcaaacctgaaagatatagaaactatggttttgtttgacagtgaaggtacttaccaggaagggagggatttttgtgtgtccaggacccactaaaacagtgcctaccacatagtaaacattcaaaagtagttgttgaatgaatgaaggataaatatcaattaggaatgaaattatctctgagaattaggctctcagtcaatgagaaaaaataatatgacatcacttttttaaaggaatacctgttacatttatttcctcatagaactgtcataaaatcagctcctggaactctataatattctttaaataatccagaaagagttaaggaaacatatccaactaggtacaaagcaaactttgtatggtgtttgtttatctttccgtggtatacatttcaggactgttaatgtctcttaaaatagtgtgggaaggggaaaataggcaaagctcaaacagttagatgggtgctctttaatatttatttctttaaaaggattggtaggagaggaagatgaaagtatgaaaaggaagctatgggtgtgtttactaataaccataacttctccaagctctcccagtgggccattaactcactaagagttgactgtaaattcctttgatattttttaggaaatagttccatttgaaacagtactatattgaggagttttggaactcttgatctggtgtgatggtctttgtgttgatgtaaaaatttacttctcatctcttctttttcttttcttagcttcactataacgtgactacaactagattagtgaatccagatcaactgttgaatgaaataatgtctattcttcca

SEQ ID NO: 47004 - DNA, 1003 bp, Homo sapiens
gagttgtagttttccttgcgggcgtagagggcacgaactcccggcttttgcccgataaatagcatctcttttgtacgagtcattcaaataatagacgcaatctaggtaacttcaagagaagatgggaaggggaaggggcaaagcatggaaggcaaatctaaagattatgggcggggcagagaaaggttcgcacttagtacgcatgcgcataccaggcgcgacaggtgggcggacacagaaggcgacgcctagggctgtgttgtcccggaagtgccttctctcctcccgggtctgcgcggacgcggcctccttacctcatttgtcctcgcccctccccgtccctctacgcgttttggtccctgtttggtgctttctgtttgcagctacggcagtgagtatgtatgtgacggaccccgagtcacccgcggcctgggacccctgcctaccctccgtctcgccagccgagctgtggaactagcgcgtgccccctcgccgacctcggcgtctccggtccgcccctcacttgtggtggggcgcagctcctggtccctcagctgcgcgccgccccacgcggccgggctgcgggtctagggggtccgcatctccctggctttccaagggctaaggtcgtgattctagggcggctgggcgtccagggcctcggtgggggtggcgtgtctgccctttttatctccccgcaaggcccccagtcttctagggaagccagtcagtgaagcgcggaggtccgggcgcgccgagagagagtccagtctttgaggaccgagtagtcctgggccacctcccgcctctgctgtcagaagcagcagctgccgccgtggaatccaaaatttcgggagctgtgaccctttcctcatgtaaaacgagtagtcttggacggtgagcggacagttgccttcaacttttgggaagagctgccggttcggtggaaaagctgtggctgggaatcaggaggcctgggttctagccgtggctcccccacgga

SEQ ID NO: 47005 - DNA, 1029 bp, Homo sapiens
gttactgactttttatgatgtttggtggctatgagactatagaagcatacgaagatgatctttatcgagatgagtcatctagtgaactgagtgttgatagtgaggtggaatttcaactctatagccaaattcattatgcccaagatcttgatgatgtcatcagggaggaagagcatgaagaaaagaactctgggaattcggaatcttcgagtagtaaaccaaatcagaagaagctaatcgtcctttcagatagtgaggtcatccagctgtcagatgggtcagaggtcatcactttgtctgatgaagacagtatttatagatgtaaaggaaagaatgttagagttcaagcacaagaaaatgcccatggtctttcttcttctcttcaatctaatgagctggttgataagaaatgcaagagtgatattgagaagcctaaatctgaagagagatcaggtgtaatccgagaggtcatgattatagaggtcagttcaagtgaagaggaagagagcaccatttcagaaggtgataatgtggaaagctggatgctactgggatgtgaagtagatgataaagatgatgatatccttctcaaccttgtgggatgtgaaaactctgttactgaaggttagtatcatattggccattttgaaagtagtatcatctttcataaggaggactgcttttcctagagaaaagaccaatagggtctactccgtttaattcctcactttttggtcttgttttttggtttgtttctcatgcgactctcttaccagtggctactctaatggtggtttgtctgaacgtcagaaagagtatgtcagaataccaaagacactctgcttctgctgtaagcagattcatagctgcttcttcctgtttggctagagccagttctggacctgaaatcttacttcccccctctctctctgcttggtaccacaggtgagtactccatccacctctggcattagccctgtgcactcattcagccaactctgttgggactgtctcttcctatgggatttg

SEQ ID NO: 47006 - DNA, 1034 bp, Homo sapiens
aaatctcaattttttttttttttttttgagacagagtctcgctctgtcgcccaggctggagtgcaatggcatgatctcggctcactgcaagctgcgcctcccgggttcacgccattctcctgcctcagcctcccaagtagctgggactacaggcacctgccaccacgcctggctaattttttgtatttttttttagtagagacggggtttcgcagtgttagccaggatggtcgcgatctcctgacctcgtgatccgcctgcctcggcctcccaaagtgctgggattacaggcgtgagccactgcgtctggccagaaatctcttaaccatgggagttaagtctcaaaattctggtgatacaagtggttgaaacttaaaactttgtttaaaaaataggattagtgaatttgagataattcataagtctgtgaaagacaataaatacatacatattttacatttactattactaaatttgtagtaaatttgagtacagcactacctctttatctgtgaaaacttcagactctcccctattactttaatttcagtgagacattattatattaaaaaaatggccaggcctggtggctcacgcctgtaatcccagcactttgggaggccgaggcaggtggatcacgaggtcgggagatcgagaccagcctggctaacacggtgaaaccccgtctctactaaaaatacaaaaaattagccgggtgtggtggcggacgcctgtagtcccagctactcaggaggctgaggcaggagaatggtgtgaacctgggaggcagagtttgcagtgagccgagatagcgccactgcactccagcctgggtgatagagcgagactctgtcaaaaaaaaaaagaaaaaaaaaatacaggccgggcatggtggctcacacctgtaatcccagcactttgggaggctgaggtgggtggatcacttgaggtcaggagttcgagaccagcctggccaacatggtgaaaccccgtctctactaaaaatgcaaaattagccgggcattctggcaagc

SEQ ID NO: 47007 - DNA, 1049 bp, Homo sapiens
cagcttcctgaatagctgcgaatgcaggtacctgccaccatgcttggctaatttttgtatttttattttttatttttttaaaatttaaaaattttaaaatttttatttattttctgagacggagtctcgctgtgtcacccagcctggagtgcggtggcgttatcttggctcactgcaacctccgcctcccaggttcaagtgattcttccacctcagccttccgagtagctgggattacaggcacgagccaccacgcccagctaatttttgtatttttagtagaaacggggtttcaccatgttggccaggctggtcttgaactcctgacctcaggtgatctgcccaccttggcctcccaaagtgccagaattataggcgtgagccaccgtgcctggccagttattgtatttttagtagagttggggtttcagcatgttggctagactggtcttgaactcctggcctcaagtgatccaccggccttggcctcccaaagtggtaggattacaggtgtgagccaccgtgcccgactgaaacgtactatatatatatatgtatatatttaatcatattaccataggtaaacaaattcccggtaattctttcatcatcacatacccagctagtgttcagatttcctacactggctcctaatttttttttcttacagattatttgaattcgatccaatccaggtattgtaattggctgttaaacttaagtatcctttaatgtataggttccccttaatctcttcctttttttaatttcttgtaatttgttgtaatacctagattctttgtcttctagaatttccaatggtctgaattttatagtattgcttaacatgttctactgtcctctgtctttcctgtgaattggtagttagatctagaagcttgattaaattcagattttctctctgttgttacatcatcagtttgacacacaggttcatttgtttcactttgcttttgatatgttattttttggaattatcttttaaaaatttggttttcttttataatcatgtaaaatgtgtataaggt

SEQ ID NO: 47008 - DNA, 1027 bp, Homo sapiens
ttacaggcatgagccaccacacccggccctctttcttaataaatagtggcatactatctactcttttctctaaccttatttttttctcttagccgtatatcctggcgatcaatccatagtcctatgtaaagatatttaatatttcttatttctaggactatgaactatttttgtatcttctacactaatctgagctgggcacattaggcatgtaataaatactttttgaaagtgaatgaatagtaatttaaaatagttgatgactaatgcacttgttacagtcttaaaatatattttaaacaaataaataattgtctaattccactttcagaagaaataagaagttcttattcctgtttgtaattttttttatcatttggtaattttgaaatatttaggtttagcaaaaaattaataggctcaggttttaaaaagaaaaatgccttctgcaaaaggaacaatatggtatttttaagagttgaagaaaccatattagttcctggtttatgactgttatggtatagaattttgtgtcaatgtagagctccttcagtatgtgtaatttggcacacaacccctttagttcgtcagcatttggcacatcggggatacctaacaaattgtaggtaaatttgtttatttatttattttttcccttaggtaaatttatttgcagttctgcctttgtgtatagagtagagctctttacatagtattatttaaagtgaaataattgcttgactaaggtaaatggcttttgaaactgaagtaaaattatggcttcaacacttatggcagaaagtgttttaactattttgtgttaaatccctttttctcccaaaactatacacacagaagttttggatataatttcaaaggatgaagaactcatctagaggccattgttgaattcctggcattcattaggcactcaaccaagactggatatctaattaaaatttgaatagagtgggttacctatttgaattttaggttttctagtaaatcattttgtttgatctaggtc

SEQ ID NO: 47009 - DNA, 1030 bp, Homo sapiens
aagaatggatgttaagtagcttaagaggtatttattaagggaaaatatttttattggcagttcccttaagtcatatttgttttgtaactaaatagtgcttgcaacagaattatctatcatagggagggaaagctccaactcttgaaaacttttcaatactttttctatattggtagttaatgagaattcttaagataggaaatagactggttatgactggtaatatgatattgctaatgtaatacaaattatgctttaaaaaagccaggtgaggaattcaggatttggaagaatatgacatacatatacatttaactaaagaaaggagattttctttaaagagaagatgtgcaaccacaatcaatcctgtaagttagtccttaatcctgtactagccagtttttagtattaaatggtctgatttaacacaaatgaacttttgtcaatggttttatttagaaatagcattacttcctacttttaaggaggattttaatagctaataaaaattcgttgttctgataagaacttgaaagacatccttactcccatataattgagtattttgctcttcattcaacacctcagcccttttggtttgcttaaaaaatgatacaaattttgtgggagaataaatataacttaaatattgctgtaaatgtgttgtataatcatattttagcctggtattattggttcttctgtgtatgaaatacttttaaacattcaaaatattcaatttaaaagtttctggataggtgagtggtagagatccatcaggtacttacttggttgtggaatatttgtgttcttgatgccatgacattttaaagttgtattaatccctttatttttctgtttgagatgattcagtttgggaggttttattatcagatctaacagaagaaacgtaagtgttgtaccacaggtcatctaattttcaaaccatgttggttagttaaactgactttggtgtataattatgtacccggtagtcagaggagttcaagtcgattgcaattcaactctg

SEQ ID NO: 47010 - DNA, 2944 bp, Homo sapiens
ctatggcaatttagttattgttagaagtcaaaagtagaggtctctgttcccaacatctccccaaaatattttttcattaatattcacaggctttaaaatatcaaattattgtgatcaaagctacttctgttttacagttgttttgtgaggctggtgtcatacagtaacatttaactgaattttgtatttgctaaattaacataaaataataaagagatcctttttaccatttaaaaaattctaataatttcctaatcaggaaaaatgatgttatgatatactgtaaataggctaaaaaaaaccttgtaatgttgatacatagggaaaagagtaattttgataattaataattttagatttttttcctttgattgtacctcatggttgtgaggtgtctaaaatgctctttctgcatatctgttaaggactttgggaattggggtaagggcaagccttctttctgtgtctgttaattacaggttttttcttgtggatgtagtgctcttagaatatgaaactgatttatagaatttgtaattaccaagaaataaatagcatcattgaattttgttttctttatttttgctattattttctagttactgtgcttcacattttgatttctatcaaatgacttctcaaaaagcaatttcttttaaatcagtgagtttcaaactaagaagaaaatgtatcctgatagtctaattagctgttgtttgtccatgccaattaaaataatcttttgaatttctagtctttgattatagttatataggcttcatgagtttgtaaaactattcctccttttaaagtattttaaaaggtgtattgtaattttataattgatattcatatgtaattattgagaaacttgaataacctaaaatatatttctagtattcagcacatcaaatcaaggtataacctgtgatataaaagtggtccaacagaagtatacagctttaaaaataacaaggaattaattctgttagcatgttttactagcaaatgttcgtggaaaatgttattaattcttaaagctcagtgcctgggttttattgtgtgtggccttactaggagaacactgtagagccgaacttgaaatttattaaggaaagaagaaactggtgaagtgcttttatgctgttaaaaaaacttcacagacaattgtcagacaattttttttttaaaggtcatgattgcttgatgccttttccagtctttatttgaaactctcgttttgtaggatttcttttttgttcttcctcttccttttttcttttggcagtgggtggaagattcttttaaaactgaatggctaaacctgtatggtaactattgaagtatgatcgaaatacttttattcatgatttttttaggccaaaaaatgctatgaaggtaagccaatgatggtaaaattacattgtgttgcgtggaaactgttttagctttagcgttttctgttcagaaaagtaggctctgcattagagttttaaattgggatttgtttgtgaaatattttgtaattctcatattgctgattgcctttatgtctcggtgttctagtagatagttcgtagttcctgaaaaataatattctgtgtatgaaagaaaataggaggtgagaacagaatgagaattgggaaagaaaaccccctacccaaaatgccgccacctaacaggtggaaatatctatgccattacagattttcaaaacgtagagtgcttgaactctttttttctaagagattacttcaaatttgacagatttcacaaaattttgttatgataaatattaaaattttaactcttatttttatcctaaatttaagcccttacaaattaagaaaagagtgcctcgaggctgattgctaatgttcaattaagttatgtgttcagtgaagtaattttttgattatgatattttgattttattaatatgtaaactaaaaattataaaaggattatgagtacagaaattaaattatgtgaaattaattttgatattttgcggcagacagtttagaattaaaatatccttggtgtgtaataattttatttcttgtaaggacatctgttggctttcagtattcagaaaatttagactttttaattttaaatgttgacgtaaattaacgggagccatactttaaattgaaagaacttaagggaaatacataaaatatgctagtgattggcttacttacattttcagtgattagactttgtgaaataagagtaaggcctagcattttattttatttaagaaaatatacttaatttaaaagtactaatacaagaatgagagaaatctggtcaagtatagtaaatccatatccataattattttcaatcactagttacagaggaaggtgtgaatgctaatatcttctttgttgaaaatcataagttgtattttgaaaagggatgaaagggaacaagtaactgctttcaggcagatttatatcatcctaacatcatatgttatttgtgggttcatgtcacaaaagcttgcaaaacttcacaaaataatttaatgtattttaatttagtaagcttgctgaaaactcttttgtgataaatctagaaaaatttatacatgatatttttcttttttaaagtttagtgatccatcttggtactttgtctcaatttcagtcttgttgatttagataatattcttattgttttataaatttcctttcaggaatgtgttactgccttgatacgttctcacctttccagttatatatgatccatctatgacattctatcatccaggtgttactattttattgttctttcttgtacttttgttgtaaggtacagacttcaagtctaaagtaagagctagtgtatattacagtgtatatgaccatttctaatttgacctgttactgtaaagaaggctaacaagtgtgtatgcctagcccaccccttctgg

SEQ ID NO: 47011 - DNA, 1044 bp, Homo sapiens
gtttctaggatagaaacatagattgagctattaaaagcagaacattagagttctgggataaagatagttgtcaggtgtaaacaagccttaattgaaaaggaggcagcctaaaagttgattctttatgctattataaataagtaaaaatgcaaacttgcttgagttcagaaaataggagcatacccaacttttaaaactacttattagattggtagttgctttagatccttaacttaaaaaaattcttattaaaatcagtgttcaattgagtaatattcctcgtttaatagattgagatgcctcagttaaattttgaacaaaaattgttcctataaattgaattggagatgctgatctgttaaaagcaaggaatataacccaaaattaaaataggaattattttgctagtggataattatcttggacagtaggtcttatatcttgttgaagtgtgtagaacacacattttcacattcattcatctttaagtgaatatacctgtaggctgattcagacttggtattttatttattttaaacattagaaatgataaatactaatttaagcaagtgcgattactattttaactcattcttcgagagttgcttcatttatctcagagtttttggtgtaccttatttaccttatttagattatatcattgtattaagtcctttgcttactgctgtagttttttggtacctagaataatttattatggaattgaatattaaaaatttgacgatcccaatagttatgaagcttacagattctgtatgtaggcttttttcctcctttggtttcaggcataatgaatggatggcccttgctttctgatatttgtgtatccaattttctgaggaaacacttttctacaaagtctgcatgtttgattgttctacatttttctttcattataatttgaaaaggacttagatcctccaaatgaaaaatggctgtcttggccatatggtaaattaggcctgctttattattgtctaataattaagcctccctttacttatcccaccctcgttttaaaaa

SEQ ID NO: 47012 - DNA, 1159 bp, Homo sapiens
aagatatttttccaggttagaaagttacagtttttctgagcaggtgttttctgtgaatctctgtagcattggaatttatagagatataacttttctatttctgtggggtttttttgttttttttttttttttgagacggagtcttgctctgttgctctggctggagtgcagtggagccatctcagctcactgcaagctccgcctcccgggtttacgccattctcctgcctaagcctcccgagtagctgggactacaggcgcctgccaccacgcccggctaattttttttgtatttttagcagagacggggtttcaccgtgttagccaggatagtctcgatctcctgacctcgtgatccacccgcctcggcctcccaaagtgctgggattacaggcgtgagccaccgtgcccgaccgatttatctatttcttttttccatttgaagtcagaaagaaattgctagaatccttcaagtctttctcagtgagagtaaaccttttctgtatataaaacgatcattctgtatacttcattttactttgagttttttagacattaaagctgacactggaaagggtagcttttattttactttttgacttagctacttaggttgtatgaacaattataaaatcatcttcatatgttaaatctgtaacaaattctttttctggctgggtgtggtggctcacgcctgtaattccagcactttgggagcctgaggcaggtggatcacctgaggtcaggagcttgagaccagcctggcaaacatggtgaaaccctgtttctactaaaaatacaaaaattagcctgacgtggtggtgcacacctgtaatctcagctacttgggagcctggggcaggagaatcacttgaacctgggaggcggaggttgcagtgagccgagattgtgccactgcactccagcctggacaacagggtgagactccatctcaaagaaaaaaaaaatcttttttcttcgactctaagatgatgttgaggcttttttgagctctgaatgtaaacttagatcctgtgggttgtttcttagtatactttctggtagctcagtgctacattagcagttctttattttggcattgtatttcctcacacaaagtaaaaagtctcataaatcttcctccttttaaaaaaatgaa

SEQ ID NO: 47013 - DNA, 2267 bp, Homo sapiens
cattcttatcacatcaagtataaaatgctatcagcatgatttgtcattgatgttagccttgattaccttgctgaggtcgtgtttgtctggtttctctactgtgaaggtattcttttttccccccttcttcccaaacagtattctttggaaggaagtcactatacacagcccatacttaaggaagagagtgttatgctctaccttcttgagggtgaaatatctataaaaattatttggaattcttcctatgggtgatttgtctgttcttgcccattcattcattcttatttgtatcaacttgtggatatttactttacattttgggttataatttaatagtactttattgtgttgcttaaattgttctagctttgacctttgggagtgctttcagttggctcctatgtttctttaatatactcctatcttttttccttaattttattttttaaaattttatttttatttactattattattgattgattgattgattgattgatttagagatggagtcttgctcttttgcccaggctggagtgcactggtgtgatctcggttcactgcaacctccgcctcccaggttcaagcaattctcctgcctcagcctcccaagtagctgggatcataggtgcccgccaccatgcctggctaattttggtatttttagtagacacagggtttcaccatgttggccaggctggtctcgaactcccaacctcaggtgatccgccagtctcagcctaccaaagtgctgggattacaggtgtgagccaccacaccctgcctgttgttattatttgtggttattttttagggtcagggttcactctgtttcccaggctggtctcgaactcctaagctcaagtgattctcctgcctcggcctcccaaaatgttgggattaaggtatgagccactgcacctggcctttctttctttctttcttttttttttaaacatcagatagtggagcaataatattggtcatcagtgtttcttttcttttttaaagcacttcgttacttcctggcactgcaagatgctaccgctcatcttgtttctttctttccccagacctagaatcagctatttctgaaaggagtcctggtttctttaattggagaatgatattagaaaccaaaatctgggtgctcagtgtttgtcttaatatagtttgactcaatggattgagtcaaatcataggtaatttttgtttgcttttggagacaaggtcttgctctgtcatccaggctagagtgcagtggtacaatcacggttcattgcagcctcaatcttcaagttctaagtgatcctcacacctcagcctcccaagtagatgagaccacaggcatgcaccatcatgcccaactaattttttgattttttgtagagatgaggtctcactctgttgcccaggctggtctagaactcctggcctcaagtgtcctcccgcctcagcctcccaaagtagctggaattacaggatgagccactccgcctggctctttggggatcttgattactcttgagagtggaggggtgtcaactcttctttccttctttattacctgtaatgaaaataacagtgcttaccttggggtttgtgagtatgaaatgaaataatgcatgtgatgaacttaaccaccatcttgcattgactgtattattgctaacccattttgagagatgaactgtttgaatatcaaggtgtcatgtaggcaagaatattgtataaatataagcttgtttagaattctgtgtcattaattgcatttactctatcagttaattagagattcttttttgttggctttttttgagacagtgtcacttcgtcacctaggttggagtgcaggggtgccatcacagctcactatagccccgacctcctgggcttaagaaatcctctcaccttatcccccaagaggctgggactaagggtgcacaccaccatgcctgggtgatttttctgttttttgttttttttttaaatagggacgaggttttgccatgttgcccaggcttgtcttgaactcctaggctcaagccatctatctgcctctgcctccccaatgctgggattacaggtgtgagccactgcacccggtcgttaattagagagtcctgatctcagttggattgtttaaaagtgaaagtgaatgatgataatatttagtaaaatcatcttaatgcattttgacttttaacttcttcagatttttattaaagtatagagaatttagatgttttagaaaatcagtgcaa

SEQ ID NO: 47014 - DNA, 1026 bp, Homo sapiens
gttatttttgaactcaaagtggtagaagcagagaggaggtgacaaactgagaaccttttgattttgttggggtggaacttggtctgctgttatagctgacattattactgtatctcaatgatttttgagattttgggaaaattgttttaatgtttcactcccaagcgctgaagatactccagaaatctttgccgttctgttcctataacatttgctcttccattttgaagctacaacagtgtaggatattttcagctttctagaattcctgtagaacctctgtattctaaaatctcccaggattaaggaggagaaaaataagcagaaagacatcagaaaaactaatcagtcattaggttctctggcaagtgaaaaatggaataaagataaagaatgtagtggttaatcaagagtaacctgtttataacatagactaggctcaaaacttaaacttgaaacttaacacaataaattaaaccatctttgtaaacagtagaatttaaagagattcccttaaacattaaacattaggaccttctgtggtgtcaccttattcaaactaccactgtgttacctctttttgactcttaaggctgccagacaccctacttgaaggatcctgttggaacctgtggaaataatacttacaagaacgttgcagctaagctggtccgggtgcagtggtgttacaactaatggatcacaaccagtcacggatttctttgttccatctccattcccacttcttcacttgactagccttaaaaaggctcatgcctgtaatcccagcactaagggaggctcagacagaaggatcatttgagcccaggagtttgagatcagcccaggcaacatagcgagacttcatctctactaaaaataaaataaaaaaattagccaggcgtggtggggtgtgcctgtattcccagctacttgggaggctgaggcaggagagtcacttgagtaataatggggtttgaggctgcattaagctaggattgcaccatggcactcaagcctgggcaa

SEQ ID NO: 47015 - DNA, 2052 bp, Homo sapiens
tttaaaactgcttattgggaagataagaattcactttacatttacgatctcatattttggcatattcggtatttcctccataacgcctactaaaattaaattatgtaaacaaagtacccaggccaggcgtgctggctcatgcctgtaatcccagtgcttttgagagccgaggcaggaggattgcttgagcccaggagttcaagactagccctagcaacataacaagaccccatctctacaaaaacaaagtacccagtacatatttgaggagtagaaaattagcatctactgaggtttatcaaatacccagccttgggccagatgctggagggacacagccaaatctgacagggacccgccctcaggagcccacattctagtaggggagacagagtcacagccgtaatgacagaaaccagtgcattagataagcaatactttatcttaagtctaattaataatttaattttaaaagttccaggacccttcctacatcccgagacattctaattctctgccgtttgtgtagcaattctttgaactgttgaaagatctcctgacaaattgttactgatattgtgttaagcaataatcttaaccttcccagtaaatgaactggaatgcccaattttaagtttctctatttatgaagaaacaaaatacaggggtcatagtcaggatactgcctatggtacattttaaaatttctgggtctactaggatataatctttcttaacctcttttgagatttgatgtcagttcaagggaagcattccattgatgtcaggaaggcagctatttgttgactgaaattctggtactctggcataagctcgttctaaaaatccacaaatatgttgttaatagaatgggaccatacttttcacttgggggcctacccgctagaggtgagatgtcatccttgagatgtttggaagactttgtgagatttttttttcttttgcaaactagacgtgcgccagcttctctgacctaaatgtagctccagtgggaatttcactatggatactttatcttaagtctaattcccctggtaacccaacattgctggttttagaatttaatagtcttcagaaattttttaagataaatttgctattttctttattatcttttaattacttttataacatggggtttttgttgtgtgtatatactagcattcctttggacacaaagtagactataaagaaaatttctaaattctgaatgcagtttctcattgattttaattattgctatgttccttttgaaaattttttggctggctctggcaacttatgcctgcagtcccacccagcacattttgaggccaaggcaagtggtttgcttgagcccagcagttcaagaccagcctgggtaacatggcgaaaccatgtctctacaaaaaatacaaaagatagggcttggtggcatgcatttgtagtcccagctactcaagaggctgaggctggagggatcgcttgagcccaggaagttgagactgtaatgagctatgattgtgccactgcaatccttggctgcaaagtgagatcctatctcttaaaaaaaaaaaaaattagaaaaagaataaaaaagtctaccctaaccattttatatttaaaacaagtttgttcttttcagtgtccttacttttaaaatagttgaactgatttttctgggaatctttctcaaatacaaccttaaacagaatatatggatgtgtttctgatgtcttagaattattctaatattaattatttggtgccatagacatattgtagttctcagaggctattcatatgtatgagaaatttttcttaattgaaattttccaaagattgctacactcaagagttttttgaattctgtttgtaagctacctaagagtagcaaataggtttcattctcacataccaattccaatcttttgaaacagagtgttgaggagagttctgagagcttttggacttaggaaggataactaagacaggatcagccaaaattgtctgtttgtttgggaaaaggggatagagtgatgggactggtac

SEQ ID NO: 47016 - DNA, 1033 bp, Homo sapiens
tcattttaaaaacaaagtgaagatcagaggcaaaattcataagggattatttgcaaattacatgttatttcgtttagattctttatgcacaccttgactaagttttaaaatttgctgggcaggttcaacagctaggaaaatctgttaaaattgtaaatttgttgcttttgttactctaaaattatcatttgtactgttttcttaaaatggtctttagcatcttttataccttcacttttgataattttctgaactttgccggatattttgacattacagactgacttttaaacattcactttccccccattgtcttacgcattaatagaagggaatgtcatctggtgttttgagtgtgcaaaataatatttatggaccattcatagataagttatttttaaaggcatttcttcttaaaaatttgaatatacacggtgtcttgcagtggttcataaagtacttccagcattggtattttaatttgagcaacagtttttgtgtgagcaacgacatgagtgagcaatatgggcattgcattatggacttgattgagcaatgtgggcattccaatagggacttgagtgaacaatgtgggcattccaatagagagacttcagtgagcatcgtgggcattccagttgttacttgagtgagcaatgtgggcattgcaatagggacttgagtgagcagtgtgggcattccagttgtgacttgagtgagcaatgtgggcattgcagtagggacttgagcgagcaacatgggcattgcaatagggacttgagtgagccatgtgggcattccaatagggacttgagtgagcaacgtgggcattccaatagggactttagtgagcaacgtgggcattccaattgtgacttgagtgagcaacgtgggcattccagtagggacttgagtgagcaacgtggccattccaatagggactcgagtgagcaacgtgggcattccaatagggacttgagtgagcaacgtggccattccaatagggactcgagtgaacaacgtgggcattcca

SEQ ID NO: 47017 - DNA, 1061 bp, Homo sapiens
aggccaggcgtggtggctcatgcctgtaatcccagcactttgggaggccgagataggcgggtcacttgagtccaggagtttgaggccagtctgaccaacatggtgatacccttcctccaaacccctccccgcacaccgcagcccatctctactaaaaatacaaaatattagctgggtgtggtggtgctcgcctgtaatcccatctactcaaggaggctgaggcacgagaatcgattaaacccccgaggaggctgacgctgcagtgagccaaaatcatgctactgtactccagcctggacaacagagtgagactctgtttcagtaaaattttttctcccattttatagtccattgcctcattccccacaaaatgattttgtctcttttattatggtagaattgtctgtcttgcagaccatatgatctgaccagcctttctctcacatactagtatttaagattaaataaattaaaataatttcttagttttgttttgtttaaatactgttgtggtaaaggctgttttttgtcttttatcaaaaatgtaagaggttgaacaacaagaaattagtgtaatggttgaatatggcaatttcatatgcttctgacaaatatttcttaagcctcatttgtttttgtttgtttgtttgtttgtttgttttgttttgtttttgagatggagtcttgctgtcacccaggctggagtccagtggctcgatcttggctcactgcaagtgccgcctcctgggttcatgccattctcctgcctcagcctcaaggagtagctgggactacaggcgcctgccaccatgcctggctaatttttgtatttttagtagagacggggtttcaccgtgttagccaggatggtctcgatctcctgacctcgtgatccgcctgcctcggcctcccaaagtgctgggattacaggcgtgagccaccgcgcccagtctagcctcatttgttaaatacgctttcattaaggtagcctaggaactcagccaccctatagattgttgcttcagtacagaaatgagtcccacatttaaaagaacatttta

SEQ ID NO: 47018 - DNA, 1042 bp, Homo sapiens
atatattaaaatatatgcataactgaattaaatatatacatttaatgtatatattttaaaaattagtaatgcttctaaatgtcagtgagtgccctcagcttctgacaatgcttaatctaccggtgtctaaacagcattgcagtgttcctgctgcttaaatcatataggattcattttagctaaggctaaattaggggaataactgaagatatatcggaaatggaaaccccaaagagtaatagctatgaattctgtaaatgggaagacagaccagcctttactgtagcagtcaatatatagagataaggtcttacactggtgtttttgtttgtttgtttgtttttttaaactactgatgcctcagtcctacccctggaaatatgagtaaaatggggccaggacaacagaaagttgagagcttctttttgtactggctttaaaagcaaggatctaggccgggtgtggtggcttacgcctgtaatcccagcactttgggaggccagggtgggcagatcacgaggtcaggagtttgagacgagcctggccaacgcagtgaaaccccgtctctactgaaaatacttagctgggtgtggtggcacacacctgtagtcccagctacttgagaggctgagacaggagaattgcttgaacctgggaggtggagtttgcagtgagctgagaccacgccagtgcattccagcctgggtgacagagtgagactcagtctcaataaataaataaataaataaaattaaaaaataaaagcatggagctaggtcagaaatagctacagactgagagtaatcactgtaagtagtgacacaaagactaatctttgtgcagtgtggaaagtacagctgggttgtttctttgattcctcctgccccattgagccatacctacagagagcagctgtgaaaaactatcactttcaacaatgaagaatagtaatatgtcataatggagattatgaagttcagaaaggggtaaatgcagttttggggagggctgagactaagagagaacacaataagacaggcaa

SEQ ID NO: 47019 - DNA, 1974 bp, Homo sapiens
ccacacaagagaatagtactaagccagaaaattgatgaaaccaatcttcagctttctttcccctccctctcttcccctcccggctttctccctcccttcccccttccccctctccctctccctcctcctccccacttctctctcattcctcttccctcccgccttcacctttcccgcttcgttttggcagggtctccctctgttgcccaggctggagtgtggtggcgcgatcttggctcagcgcaacctgctggactcaagcaatcctcccacctcagccccccgagtagctgggactacaagtatgtaccaccacatccagctaatttttgcattttttgtagagatgggttttgcccatgttgcccaggctggtctcaaactcccgggctcaagcgatccacttgcctcagcttcctaaagtgttgaggttacaggtgtgagccacgatgctgggcctagctttctatgtggccagtttctctggtatttttctctggaaattgcagcgactttgacctgtgtacattctgtgatctgtccttgacactcaattacgtagatggggtctggtttgactacctcctcccttacaaggtggccaggaaaccttctcaatgtaagattcaacttacctatttcctttctctccaggatcactattctgccatgtctgtgtgtctaaaagtgtttcaggcagaggcagggggatctcttgaggctaggagtttgatatcagcctggataacttagtgaaactgtagtctctccaaaaaaaaaaaaaatcgttggtcatggtggtgtgcaaccgtagtcccagctactggagaggctgagaagggaggatcgcttgaacccaggagtttgaggctacagtgagctatgatcttaccactgtactccagcctggatgacaaagccagactctgtctctaaatgaatgaatgaatacagttgtgtcttcttattgtttagagttgaagtatatgtagtccttgttactccatcataactgaaagtgtaattttgctttcattcttaaatgatatatttggagcatataatctcatttgaaagctttttttagcacttgcaatgtgtatttctactgtgttctggcatttattattttttatgatgtcagtagtcattttttttctatacgttaatgtgtcatttttctctgccttctttcaagattatttctgtatttaaactttctagtagtttgtgatgtgcctggttgtacattttttgtatttttcctggttggagatcaaacttttatttattatttctccagagtttttttttttttttttttgccttgtgttcaagactaaaacttttttcttgcttcattttttccttctggtcattcttgtattcctgtaatacatgtggtaatccgttgctgtgtcctacagtttatgatgctctgtttaaaacaaaaaaaaaatcgattttctgtttgtcggatcggataatttttactgatctatgttcatgcctactaacttttccttctgtcatatccaatctgctatttagcccattcagtgatttttaaaaatatttcagatactatattttctacttctaaattttccattgctttaaaaaaataatttctatttctctggtgtgatttcctatctgtttaatcattgccagcattttttttcaaattaataagttttatttttgatatttatgttcatcgttttatcactttttatgaccgaggtttagtgaatagttttaagtttttgttaagtaaattagtaggccctcctgtactctggccctcctttctgtgttagtggtgttcacatcagttttttaaatgaatgatttggtgctcctggtttctccagtgtattttttgttacggcttctgcttttgtttgtttgttttcagacaaggtcttactctgtcacccaggctggagtgcagtggcatgatcacacatc

SEQ ID NO: 47020 - DNA, 1027 bp, Homo sapiens
tttgtttcttgtgtgcattacatcattcatttccctcccattttgacatctgcaatggctccctgatatctactaaatataactatttaaccagcatctaaggcaattcataatatgccccaacctactttttaaaatcttatttcttagtcccctcacagattttctctaccctattccactggtttctaaacaggttttttttgaagcctcttaggcattcccttggaaaggtaggggtcaagtcaccagatttctatcctcaacctttaggctttaatctcttttgcatattttggtttctttaaaatagggctctataactaaaagaggtttgaaagtcactccatttgtctggtcagatgattagtctctatgtctttcagtctgtctctgcctctttctcctgtacacatactccctagggccttatacttaaacattttcttgtggctttacttttctgtgtagttccttctgccaggaatgctaatgtctccagttgatcattcatatagtgagttttgctggttagctggaacagtgtgacagttttaaacattttatttttatttctaaagaatttccagtaagctgggaattaagtgtttcgcatgatcaaaacgtttagggattaatatatgttttgttaccttatgacattgtatgaacgatggagaaagacagatttttacaaatgttagaaatgtaaagtcttgaattgggtcataattttttcaatgaaggtgtgaagtttaagtttagtgggagagagtgattcagcatacatatggttttacttgtagggttttttggtttgtttgttttggggttttggttttggttttggttttttaataacataagctgtatatgcagccaagatagattacattatacatattatttttcttccatctttatcatcaaatactgagttctctcacagtgctttgattcacactagagatttttttttatttataatgcagataagtagtatgttttgtaatgatagttctcattt

SEQ ID NO: 47021 - DNA, 1037 bp, Homo sapiens
aatcatatacttatttaatattgcatatttccatttccctggctcagtgcagagtaaatcaacaacattgaaaagctagttgggaatcggagatgatagatagctttttctaagtttttaggtccttaaccaatatttggtatgagattcgctcaatggtgtgtatgtgtgtgtgtgtgtgtgtatttgtgtgttagaattcatcagacaagaaaattaatttctattttagatattttacaaagaatcacttattcctaggattgttccccaagacatctgaaatcttaatttgcatatctatgtggcaaagctttaaatttaagttatccagtagtttaacataaaatcatactgaaacactcattaacacatttgagtatactatgtaagttcagaatataaattacttagtactgagccatgctgcattaagttaatctttatgttgttagattatttttatgttaaggaaacattatcccagattcggtttttctagatacatagaaagggacatactggatgtttttattatgttgaatgaagctgtgcattgaagctattatacttaagaaacatttttatgacagtttagctttttcagctgctttcattatgttgtgttttttagaagtctattcagggtatttttaatgtcttaactaacaatatgatttttgagctatgtttctgtcgtgttgtttctcatcactatatggatagaattagttatatagtaacaatgcctctgtgctcctttaccaccacaaaatacttattttattttaattcttatttattagttgaattatttattacattaatttaattcttattttctttgatgttttatgaagcagagtttattttcataattgtgtctcataattctgtacaataattgttggaggagtatgtttagtgaaaacaaattaaaggtggaagagatactattcttcctcagcattggtaataatgaagctcaatttcaagtcatatacttttttgttatttgggtattgaatatcagtttt

SEQ ID NO: 47022 - DNA, 1034 bp, Homo sapiens
ttgcactagttacgtatattaatttggcatctttcaattagaagtttaagacattagaatgaattatttagatattccatatctttcagtaaacttcatggctttttaaatatcagctggcgtattacttattaaatatatttctagatgttttaattttgttggtgttgctatcgagatctgatatactttgtgttttatatttgttcctggttaataggtaagctgttgttttgtatatttttttattaagccaccttcctgaaaattatacatagtatttaaaaaatttataactcaacattaagttgattaatgaaaaccaaacctttataccttaaacgatacataattttgtggtagaggaagtggctgtttttctccattttttttcaccctaattgttgaaagcttcctatcacaatggtcaagtatttatcatttaaaactgagcagactctcaatactttgggggcacatttcacctaccccaaggcattaggcagaaatgctgaggaagctggaagacttagtactctgttctttggtcagcaagtgatagttgacctataattaattaatagaagaaggaagtactctcagtgttttgggtcttttatcaaacaggtatgttattcttaggatcttttcactgttactccctttctgctattctaaaatataatcctggagtctcttctttttgttgctggttgtcacatttctgcaaacagcaatgtattgtgttaatagttatttcattacagacatttctgcgttttggtttacatgtgttcttgccttatttttcttaaattatttaaaggagaggagtatgttttgtgcagaattgtgttgatcagacgtgtactaagcagttactgtgtacagtgcagcagtgaaagggaatgataatactgagcacttatgtgccagttctgaacagtatcgatgcggaaaccaagaatctgaaagaataggtgtcttgtcaaaatttaggaagctatggaatgtccatttgattctaaattcta

SEQ ID NO: 47023 - DNA, 1033 bp, Homo sapiens
accagaacattaatgattggaatatttagcaaaacccattaatgatggtgtgagttaaggactatccctatatttcaggtatatggcagttatggtgagaacgtacaaccagaataatcacaatttatttgttacagtgaattccattttacgaagaactggcaggttttttaatctgaacaatattcataccaactaacatacttaagaggtactcagatgcttgctgaataaatgtagtttaagataatacttttgaaagttggctgacataagaaaaatggtaatctttaatgggaaattgcagcctttggtgtttatttacaaagagttgggaactttttaaatgctgttaaccctttatattggtttgaatctcatctgggataattgagaaggctcattgtcattttgaggatcccagactcccacaaaaaaaaagatgagagtggggtgttgactagagagctccaagtgataaaatctaggaaagaacactaaaaaaaggcgtcagaaggtttgggtttaagcccgctaatatgtgtttattacttacctataaaaagattacttatctataaaaaggtgatctctacctactttaagaattactacattcatgaaattagagtaagtatgtgaaagtacatacgagttgagtattccttatccaaaatgcttgggaccagaaatgttttagattttggattttttcaaattttgagatatttgtgttatatacttaaagtggagcataacatttcctttgagtgccatgttaatgctcaaaaagtttcttttttttttttttttggatttttgaattagggatactcaacctgttcttggaaatctgtaacatatggtatgcatgtaaattgatggttcaaataatcactaatactactcacattgctgccactgctgatgccttataactagtatcagaagagcctcttgggatgtttatactgtagtctacccttatctttagggaatacattccagcattcccagtggatgtctaaaactg

SEQ ID NO: 47024 - DNA, 1050 bp, Homo sapiens
taattgtttcactttcccactagacgataagttctatcaaggaaagcaatgtctattttgttcattgatatgtatatcccaagcatctagaatagtgcttgcaaatgatagtaactgagttaatatttgttgaataataaacgaatggtaaatattgggaataattgtaatgtttagtttaaccctgaatataccgtcaggtttattggacccaattttagtttgaaaatttttttttattttgagtgtttctaactatttgtaagaattgaggccaggtgcagtggctcatgcctgtaatcccagcacttttggagaccaaggcgggtgaatcacttaagcccaggagttcaagaccagcctgggcaacgtagcaaatccccatctgtacaaaaaatactaaagttagccaagtgtggtggcatgtcgcagtagtaccagctacttggagggctgagatgggaggattgtttgcacccgggaggcggatggaggttgcagtgagttgagatggggctgttgtactccagccagagcgacagagtgagactctgtctccaaaaaaaaggaattgatagtacatactttgattctttcttaaacgtcttccaaagactagagaagagttttacttttcttcacaataaaactaattctgtttcagaattactgtgtgggtacattggacccttttataaatctaagatacttcatggcctcctgccatatcttgaaaaactatactgtttcatcatcctaggaataattttatcattacttattcattatttccagttgtactgaaaaagactaaattattaattttttaaaaaaacagaagaatgatgaaattgcctagaaggataatgcaggagtgacatgaatcatcactgttacatcatccttcacttttattattgtgctgcctaaagtattgcattatctttcaagaatgtgcagtagaagtctggagacacactgtctttataatcttctttcactttcattgaacaaggctgagaattcacaattttatattttccacacaaa

SEQ ID NO: 47025 - DNA, 1045 bp, Homo sapiens
ttttctacattcagtttaccctaattcctaatgagtgtctcattaagagtctttcattttaggtcttaattgcgtttcttactacatagtaacatatgtttattttatattaacagctaatcagtacaaagtcatttttcatcctcatacctaagtggcaattctaattgatttaaggggtatttatgaaaggggtgtctctcattctcttttttaaagcattacttacctattttttaaaataataaaagtactttaatatgtacttccccaaagtcatgatacgaaagcagaaatatttttctaattttatttatattgaaatacacctatagtcttttttcttacagccctttttaatgcatgtctgaaatacacctataatcttttgctcaataaattagtatggctttctgttgaaatgaatttcagattaaaacagattagagtatgagtgtttggtatatatatgtatttctcatgtaaataacatgacaattatttattgtaattccaccagcaaatttatacttaaattgttacccattttttaaacaaacagtggtgcatttaataatgttttggtaagtcatattttataaatggaattgtgaaattaaaagacgtacacttatgtctggataagtattgtcaaattgctcttctaaaagattgtaccaatgtatctacctaccagcagtgttaagagaaatgagcactgcactcatcaacattaagtattatcagtctttaaaatttttggctggtcagaccaaaaaatgatattttattgttttaatttgtatttctttggttattaataaagtggtatatggttaattaatttgaatactctattctcaaggctatatagatagaagttgtcatttcattccaaagtactttagtcttattttttagtgtttaccaagtcttaaaaatgataaatcctgaattgtcctagcattatgttgttgtctgcattaagttgtcaattataattttcttagcaagattttctagtttggcagttatctttaatagc

SEQ ID NO: 47026 - DNA, 1051 bp, Homo sapiens
aatagatgtatactgtctatcttattgtagttttagtttgcattttctaatggctaataatgttgaatatcctttcatgcacgcacttatcatccttatttctttggtgaaatattaacatcccttcctaatttttaatgagtgttaattttcttcttattggctgttgatagttctgtctgtattttggatataagtcttcagttgggtatgtgatttcaaaatatttttttctagtccatagtttgtcttcttattttcttgacggttctcaggcagagcagaagtttttaaatttaatgaagtccaacttataaatttgaactctttacccaaccccagatcacacagttttttgtttttgttttttgagacagggtcttactctgtcccccaggctggagtgtagtggtgcaatctcggctcactgcaacctccacctcccaggctcaagtgatcctaccacctcagcctcctgagttgttgggacgacaggcacgtggcaccatgctcgtctgacttttgttttttgtagaaatgaggtttcattttgttgcccaggctggtcttgaactcctggactcaagcgatctgcctaccttggcctcaagtgctggtattacaggcatgagccaccatggccagccagaagattttctcctgtgtattctttcagatgtttctacttttatatttagatctgttatctattttgagttaaactttgtataatgtgaggtttagatcaaggttcattttgttttctttacatatggttgaccaattgttctaacaccatttgtcgaaaagactttccattctcaactgaattgattttgcatctttgtcaaaggtcaattggccatatttacatggattgattcctgtgctctattttgttgcactgatgtatgtatatgtcttgttgccaatgccatatggtcttgattactatagttttatagtaagtcttaaaatacatagtgagatttcttaaacttttgcttttgttttgtttttgagaccaagtctcactctgttgcccaggcta

SEQ ID NO: 47027 - DNA, 1047 bp, Homo sapiens
aaaaagtcagccagaatcttttcttttcctggttaattggatatatgttgggattcctaaatatctttctgagaggtccttggctacataagcagatctgtaaaaaccataataaccccatccacacagtagatatcaagtgataggtctgtttttctctgtgtgcgctttggtgtgtttaagaaaatagaactggttacatactgtcttgtaaaatgctatctaaacaccatttttattggtaccatttttgaggcctagcacataggttttcataagctaatacattataagttcattttggaagcttttgttttggtagttcaacttactttgcctacttcctcaagaaccagaaatactcttgtataaattatagtttttttcctctgtatctggtattgctgttttaatgttttgattgatcaggtgttgctattgagacattacatctctgccaaattgtcagaggtttagttttcatttaaaatgcccttagtactaaaatactactgaggtgaacgtgattgtgctctgatcattcagaaggcacatgactcttttgtagtgcttcagagccatctttccattatagtactataaaataaatcagactggtttatcttttgagttacttggtgtttgaataacaagattttttttttgaataagcattgatgacttgtaatagtccatctctgataacagagatggaaaatacatttggagaatgactaaaatttttaaagatttttcaaatgcaaaatttatatgaatagttttatgttatttaaatacttatcttgttcttaaagaatttgctgttaaaattatcatcataatttttacttcagtcttctcatattttgagtttagtaggaatgataattactacatttacagagtaagtcaactgatttttttttttaatctttatttcactggcatgtggaaccacattttgccagaacttatcattggaaaatgcaatttcaaagcaaatgaaacctggaattatcaatctcaataaatgagattcttttaaaa

SEQ ID NO: 47028 - DNA, 1049 bp, Homo sapiens
gtaataaagctactagataattttcattccatttttcaataatcatgtagaactgaatccattgggtaaattataagatcatctttataattttgtaatacatccattttacatagatatgtttctttacattgatttgtggattaccccacatttttgttcagttaggaaaactaagttttgggttgtgtcttaactttgtttatacaatatcaattttgttttcttggatctctcacatttcctttgtttacagttgtacatttcctccctgtttttaccaggccttagaaaactgtgctatacagttgggccagaagggcaagcaaatttctgaggaaattactaggtggcatttttttttatcataatagagaaaagaatgccagctttgggattggactgtggttcagagtctgagtctttcgtcatatactaaatgtgcaaacatagttaaaatatttaacttctaaagccctcagtttcttcatctgaaaaatggggataatgccttgtaggattttgttaagtatacgatgagatgataaatataaaatacaatacctgacagacagagcatgttaaacactatgcaggctgtactacagcaaacccaaaggcatctcacacctgtggagatggcctctggactgacgtcccaaactcaggttattataatgtcttctgcccaacattaggagattcctaaggacctctttactctgtctcctaacaatgtttccttcttatatttattgaagggaatcttttgttgacaaaattatttacctcagttttcattttctaattatttatacttgtcttattcttttccatttaggctacttcctttcctaatgaaaataactatataaaatgtgtatcataaaaatgcaatatcactttgaaaatacatattaataaatgtgtgagtcttaagtgataacttcagtaccatctgaatatagttctctatcataagcaaataaattatataaatatttgctctctatacaaatgatgagaataaaacgaaattgaaaaattca

SEQ ID NO: 47029 - DNA, 1066 bp, Homo sapiens
ctcaaggacttctcaatacagagaaggagggggtgacacagaatgtaaaaattaaaattatgaatttaatagagaccacaatataaggaatttggcaataaaaaagataaatgggttagaaggtattttctaaagaattcaaaaaatgttttaagtgatagaaacattgtcaaaataagtgtatcaccttctaaaatgacattttgaaaaagtaaaattgataatgttaataaattatagtatgtcagaccctgtcaaactgtcctccatgagaacacattaggcacagctatagagataattcacatattggaaaatagaagcaaagaaactaactagaatacagacctggaaaacacagagattgaaaatatgaaaaggagatttagtaacacagagcatagagagaaaaagcataccatatagttagccagagttcctaaagaaaatagtcccagtttcttcaggaactctggctaactatatggtacgcttataccatataagcatatcatatggtgtaagggggactatttgaagacataatagctgagaactttccagaattgaagaaaggcaccaagccatgatttaagaagcccaacaaacccaagcaagaattctttctagacatattgtagtgaaactgtgggacaataaatataaaatcttaaaagacagaggaaaaaggggccgggtacggtggctcacgcctgtaatcccagcactttcggaggctgaggtgggtggatcacctgaggttgggagttcgagaccagcctgaccaacatggagaaaccctgtctctactaaaaatacaaaactagccgagcgtggtggtgcatgcctgtaatcccagctactcaggaggctgaggcaggagaatcgcttgaacttgggaggtagagcttgcggtgagccaagaccgtaccactgcactccagcctgggcaacaagagcaaaactccatttaaaaaaaaaaaagtagagaaaaaaggcctcaaaggagcaactatgagagtgatagccaattagtcttcaaccataatataaatatagagacagt

SEQ ID NO: 47030 - DNA, 1048 bp, Homo sapiens
ctgtaccttggtgtatgctgttaactgctgtgttacgttacctctcacctggactgagggattaggtttaatataattaagtatatcaataaattatttttgtgacttagttattaatatatttaaacaaatattgactatatgaaactaacagcaagcatttgaagggctaaaaacattttaaaatatacttactgttacttcagcaaaagccaaaaagaggattcagctcccatgaacaattctgttgatgttaagagtgatttcttttttttaggccaggtatggcagctcatgcctataatcctagcactttgggaggctgaaggtggaggattgcttgagctcgagttcaagaccagctggggcaacatagggagaccttgtctctacaaaaaattttaaaaagtgtgattttttttaacgtatcatgactacaagttatttaatgactataaatttaatgtggacattcttagaagggctttatctagtttcctatgtcaattcatggttcagacaagggcatctgtgtcaaataaaagattatggctacaatttccaaaaattaataaatgattgaaaattactagaatgatttaatgaacaatttgagctacaatggttatcacctggtgagcatttttataatctatataggttaatttatttagaaaatgtttttaaattttatttatgttaatttatattaccactgaattttcttttcttttctttttttttttttttttttttgagacagagtttcactcttgttgtccaggctggactgcaatggcgcgatcttgcctgaatgcaacctccagctcccaggttcaagcaattctcctgcctcagcctcccaagtagccgggattacaggcatgcaccaccacgctcggctaattttgtatttttagtagagatgaggtttcaccatgttagtcaggctggtcttgaactcctgacctcaggtgatccacccacctcagcctcccaaagagctgggattataagtgtgaaccactgtgcctggcctgaattttta

SEQ ID NO: 47031 - DNA, 1057 bp, Homo sapiens
cccagccactcaggaggctgagacaggagaatcacttgaacctgggaggcggaggttgcagtgagctgagattgcgccactgcactccagcctgggcaacgagagcgaaactccatcttaaaaaaaaaaaaaagttggggggacaattttatatgcaagaggtagattgtttggaccaaacttccaactgagaataatcagaaaagctagagaaaatattaaatatttaatgtaagatatagaaagcttatgtgtgaggggattagagcattatcagggaaatgaagaaattgcagggtcaagttctaaaaaataggaaagccagtgatgtgagcccagcatttgagctcgcttctctgagagacatctgtcaatctcaaaagcagcagcagcaatgaggctgaatggtatttctttctttctttctttctttttttttttgagacagagtttcattcactgttgttgcccaggctggagcgcaatggcgcaatcttggctcattgcaacctctgcctcccgggttcaagcgattctcctgcctcagtctctggattagctaggattataggcgcctgccaccacgcccggctaatttttgtatttttagtagaaacgggctttctccatgttggtcaggctggtctcgacctcctgacctcaggtgatctgtctgcctcggcctcccaaagtgctgggattacaggcttgagccactgcgcctggcctctgaatggtatttctaatggactcatgggtgggatagatgagattacaagaattgcaatttaggatccgcaatttaggtttgggattgaaactcccctcccctcacccagtataccctaggactaaaggtgaatccagaatcgacagtactcatggggactaaaggccagcttcaaataatctcattccctacgtagattaagaagacctcagattgccggcacctctactctagcttacttgccataattaaagatgaatcttctatggaagaagaaaatatgcagctgagtgccgtggcttacacctttaatccaagttctttggg

SEQ ID NO: 47032 - DNA, 1048 bp, Homo sapiens
aaagtatagccaggttctgaaacaacataaacatctttgtgggccagaaatgaaacatggacacaaagttttaaacggggctgaaaccacagaccagctggctttcagtctagcactgacagctagtagttttgctcctgtcaggtaaaaggattaagaagtgcttaagtgtttcatgcgaggcaggaaccagagccagaatcactacatgaagtccggggtttggttaaaatatctgtcttatttatgaaaggctgaaaagagaaaagagctattcactacccgagactataagttttagctgataaaaacacagcctcatcaatagctattgaatgaagccacttgctgagtcagtaactgaatgtctatgtatgatatttccagtatcatgattaaaatggagccccgaaatgtcattataaggcctagttgtggactgggggcccagatggccaagtgggagcaactctgaaaccattaaataggaggagagagagaaattaaaaaccttttctattcaaaagaaacctataacccaaattctaaaatttataaagacatataatattaatataacaaaatcagccaccaaaacattcatttctctggatgaaattaattttatggagcagttcaacaaagactttattttaaaaaataaattatgtatttatttttgactagtaatagatgcatgtagtacaaaattcaaaggtacaaaaagggtaaacagtgaaaagtaagtctatctccacctctttcacctagccacccagtttccctccccaaaggcaaccactgttacccatttcttgctatcctttctaagataattgttgcatatacaaacatatatatatatatacacacacacacactcacacatatgtacatttttatataaatggtagcatttacacatattattatttaccttgcctttttcacttaataacatgtttagagatcatttgatattaatacccatgggattaccttattctttttaatagctgcatggtattccaatgattgggagaaactt

SEQ ID NO: 47033 - DNA, 1062 bp, Homo sapiens
tgatattacaggcaggcgtcaccacacctggctaattttcatatttttagtagagatggggttacatcatgttgcccaggctggtctcaaacttgagctctggtgatccgcccttgttgacctcccaaagtactggaattacgggagtgagacactgtgcccagccatctttttttaaatttatgttttactaaacagcaacttccaatatcaaagtttttaataagtaatattttgaggcaaaaatgagccaattaaagtcaaagtattgaatttctcattaaacttattcaattcaaaactattagcttttattccaactttatatttttctatatttttggtattaaaatatcctttcatgcaacaattatagttttttaaatgaccttattaagaaaaattaaaaagctaatccccctattttttatgaaagtccaacagtctggaaacctagccagttcagagatctttctgaaactctcattctaataatctctcttccttaaaactctcagaccactgtggcctacagcaatataaccccactggggttttaaatccatctgtgcattaagtattttctgtagaccgaataaaatatctttgttattttttaaaaacttttcaaatgtatgaatatgctcaatttattttaaaactttaactttccagtagctttttagaaaatattttttgtacgtatttttctcaatcacgtactttttttttttgagacagggtttcactcatgtcgcccaggctggagtgcagtggtgctatctcgactcactgcaacctccgcctccctggctcaagagattctcttgcctcagcctcctgagtagctgggactacaggctcgtgccacacctggctaattttggtatttttcatagagacgaggtctcatcatgttgcccaggctggtctcaaactcctgaattcaagagatcagctggcctcggcctcccatagtgctgggattatgggtgtgagccactgtgctcagtctcagtcacataatttctgtcaaatatggaagtcattgaactagtttta

SEQ ID NO: 47034 - DNA, 1047 bp, Homo sapiens
ataagaattaaaattttatataatgtgtctggttcatcagagattgttatcacaggtttggtgaaatcctttggaacatcaacgtgtaggtttgaaaactgtacccacttcatattggtactgagaagaaagccaccatttttggctatattgcccttagaactgtttacagaaaaattccccaatccctgccagaggcgccggcacacggccccaaacgccgtccgcgccgccacggtaaggctgtattggacagttatgaatattttgctgtgcttgatgctaaagaacttggtatctctattaaagtacacgaacctccaaggaaaatagagcgatttactcttctcatatcagtgcatatttataagaagcacggagttcagtatgaaatgagaacactttacagatgtttagagttagaacatctaactggaagcacagcagatgtctacgtggaatatattcagcgaaacttacctgaaagggttgccatggaagtaacaaagacacaattagaacagttaccagaacacatcaaggagccaatctgggaaacactatcagaagaaaaagaagaaagcaagtcttaaagcctcagggaggccatttttgcctgaatttgaaatgagggtgggccagatgagtatgtttaagtggagagtgcttccagctgagatgatttgagtctgccctaactgctctattgagttctcgtgccctcatcagctgagagcagggaatggaactttaatgcaagaaccacttttatctactcttttttgtacatgtcattgtttcagttctgatttcaacaaacatgagcaaaccactttgactcaaagcggaaagagtgaaaattctattttgttatgctactggtgttcaattattagtttgtaccatttttaatttatgtcagttgatgcatctgaaaataagtgcttgaagtgttcacacccttactttttttttttaagattcctagaaggaatctttggttaattcagattgagcagttaaagtttttgctatttacctttgtgc

SEQ ID NO: 47035 - DNA, 1061 bp, Homo sapiens
gcgaaagaacaagactccatctcaaaaaaaaaaaaaaaagaagaacatttgtcattgaattaaagacccgtgagtatatttcagaataagccccttcccttaaagtccttaacttaatcacaagcattgccatataaggtaatattcactgtttaacgtgtcattatattcaaagattccaaggattaacgcatcacatatcttttagaaaaaactattcggcctactaaactcgatgagtcttcatctactgagactcaggccgagtcagataaaaagctttacaatattccacacctctctctacacgtgttaaaaacaaggagaaagagtttctcttaaaattttaagttcactaaaaatagaacaaaagcagaaacaattgaggtttttgtggttgttgctgtttgtgtctttatttttaaagattctactttgtaccatatatacatggtaaattattcattatcatatctgcttcttttttttcatttgaagtaatcatatgccatggaaaatatttaaattcccaggcattgttagctgtagagctcataaaatgttcaatgcttcagtgagttgcaaattgaaaacagaaataaattcttggagaaacttgacagtattctacacactttgctcttgattgatgtcatgtggtgattccaataaatgacttttttcaaacaacttaagctataactgatttaagtaaatgggggtgcaatggttctttcttatagatctcatctgctgagatgctatacacagaatttcaatcatcttaccctatgatttttcaaaggtgtataagtatgaataataatattattattcattattatttattctaaaaataaaaataattatattcattattctaaaaataaatttttgtttattattaataaaataacatataaggatacatttatttattacaatcatgaagatatttagaatgtaccattttctaggtagtaaactagtgcttcacatatttttgttcatttaatctttatttttataagtcaacaactatagatattattttatattat

SEQ ID NO: 47036 - DNA, 1050 bp, Homo sapiens
gtaaggtcacagatcaacaggatcccaaggcagaggaatttttcttagtgcagaacaaaatgaaaagtctcccatgtctacttctttctacacagacacggcaaccatccgatttctcaatcttttccccacctttcccgcctttctattccacaaagccgccattgtcatcctggcccgttctcaatgagctgttgggcacacctcccagaccgggtggtggccgggcagaggggctcctcacttcccagtaggggcggccgggcagaggcgcccctcacctcccggacggggcggctggccgggcgggggtgctgaccccccccacctccctcccggacggggcggctggccgggcggggggctgacacccccacctccctcccggacggggcggctggccgggcagaggggctcctcacttcccagtaggggcggccgggcagaggcgcttgtttatctgctgaccttccctccactattgtcccatgaccctgccaaatccccctctgtgagaaacacccaagaattatcaataaaaaaataaaaaaaaaataaaaaaatgcagtctctaaattttgggggagactgatttcagtaataaaactctagtcttccaaaaaaaaaaaaaaaattcttttaaaacttctaattattaggtttttttttttatctcttcagtacatcaaaatgtctggtggtaggaaaatactggactcatatatgactgtctacgtgatttgcagggcccagtgcaaaatgaagtggatgttgtacctcgttcaaagtgttaagcgtttcaagatggcaacagcagagcattaggccaagtatgaggtcattatgtacatgggtccttgtgtgaccacagaggtcacaggaacatgaagctagacctgagtgtatattcagataggtaaatcttacagatttttaaaactcaataaaagaaaaactacatttcatgtgtgaacacaaaaattggaatttaattggcaatagcattgggatttgtgctcagagtcacagtttacatctgaccacaatttc

SEQ ID NO: 47037 - DNA, 1039 bp, Homo sapiens
tattctgcaattttcctaaatgcaactattagttctaacaggtattgttttcagtgtataggatttttttgtatataacatcatatcataagtaacaggtaattttacttcttcctttagaatgtggatcttttctttttttcattgcctagttgttttgccaggactttcactgctatttttgaatagatgtggcaaccgtgaatatcttgccttattattaatcttagaggataaactttccacacttcagaattcagtataatattagtgatgattgtttttgtttttttgtttttgttgttgtttttgtttttctgagataggatcttgctctgtcaaccaggctggagtgcagtggcatgatctgggctcactgcaacctccacctcccgagttcaagctattctcatgcctcagcctccctggtagctgggactacaggcacacaccacaacgtcaagctaatgttaatattttttgtagagacagggattcgccatgttggtcaggctggtctggaactcctgacctaaaatcatccacccacctcagccacccaaactgcttggactataggcataagctgttgaacccagttggtgatgagttatttacatatcttttgctatgttagtttccttttatttctagtttattgtttttttatcttgaaaagatgattaatactgtcagttgacttttctgcattatttgagatgattgtgtggtttatatcttttactctgttaatatgatatattaaattgattgatttaaactctcattccaatatggccaaataggaagagctctggtctgcagctcctagtgtgatcaatgcaagatgggtgatttctgcatttccaactgagctacctgattcatctcattgggactgattggacagtgagttcatcccatggagggtgagctgaagcagggcagggcatcaactcacccaggaagtgcaaggggttgggggattttcctttcctagccaagggaaggcatgacagactgtacctggaaaaacagg

SEQ ID NO: 47038 - DNA, 2104 bp, Homo sapiens
gactgggctcttgggccagccaggcgccactgccattgtctacggccataccacctggaaaacgagagagacccaagctgcggcccgtgggcacgttcagcgccactgcttctgccacagtgaggggcgcactctacaactttcagggcccacagcaccaagaggacagggaggagccaacaaaggaatgacgctacgaaaagcacccccaaagcaaccaacaaatccaagtaaaaacatgtctcagggctccgttggttttcccgagtgggaggccctgcccccctgttccagcccagcccaggcaccctccaccctaccctggccaaaggggcccctgtctaccagatagagcctccctctccaaggctctgttgctctccctctcaagctccctcaccctttccctttccctacttccctctccaccttgctctctctctctctctctcaatctccctggttcctctctgtgtctctctccatcgctgtttctctccttccgtttctatctctcatccctctgtcccttgctctccttcaagctgtctgtctttgtgtgtctgtgtgtgtgcttgtgttcccgcgtgtgcgcccgtgtgtgtctgtgtgtttgggagtcggtttgctagtgactgtggtggggtgtgtctggatgtccatcagtacctttgtcccaggatcaggctgccaactctattgccaacgcctgggtgtcacagttgccgtgatagtctcacacacgcaggtgtgttcatctcgttcattttcacgtagacaacgagagcgaaaccacagagaaaagaaacatcccgtgcatcacggcctgacaatggattcctgtttcctgtacaatgtggagtctccaatatagcctgtttgaaaactggaaaggagagcaccgacacgatgctggtcttccacgcattcctggaagtttctggggccccacagagctcgcgaaacaaacagtcaacatggtcacgctttcggggggcagaaacttgagcaacaggcacctttacagagggcaaagaaacgtggaatccagaatcacgcttcagttggcctgggtgtgactcctgtgtggatgggactatctgcctcgagctctgttgcagggctcaacgtggggatatgtcatctgtgaaccatgtggatgaaaaacagacaactacctgagtctcggctcattgctctctggggaattcgctcattccttcggaaacggaattggtctgaattgctccgggatgaagtaacccaggctggtgatccagagggccgctgagcgccccgccggccaacggggctgtgggcccagcactcagcctgtactgggcacccaacatattcccggagttctgggtcctgttggttctggaggcataagacattttttgtctctgccttctgttctctgtttcttgctccttttgtctctccgtccatccttccatctgttctaccctccctcccctggctttttcctccctttctccctccctccctctttctctcccttccggggtccctccttccacccatccttgcctagctccatccttccatctcactctgtctctgttcctgtcctcatctctgcctgccttccctcttgcctggaaagggcagcaccctggtttgcgcgaggtctcgggtctttatttagttgtaaggcgctctatggtgctggcgaggaggctggcgggacacgggttggcaagtgatggtgagcgaagaggcggaggagttgagccacagaaaggagaactggcctggattctgccccggcccagtgtttcgcggactgaggtctccgccaacccgattgaagaacgcgggggggaaagggaggagagctccgcctgggctagttagaagactaggctgctgcctggaaacccgcgcatgcgcagtagacagcccacctccctgtacctggaccggccctgggatccccgggatgctcaggaatgctttcttttcattgttgacagccctactctgtgtggagtctctcgctggacctggaactcagggatcctagggaggtcagctggaagggaagacacgcctctccataccaagcctgaggttcact

SEQ ID NO: 47039 - DNA, 1516 bp, Homo sapiens
caggtgcggtgtgtgacgcctgtaatcccagcactttgggaggccaaggcgggtgaatcacaaggtcaggagttcaagaccagcctggccaagatggtgaacgcagtctctactaaaaatacaaaaattagccaggcacagtggcgggcacctgtagttccagctactcgggaggccgaggcaggagactcgcttgaacccgggaggcggaggttgcagtaagccgagatcgtgccactgcactcctgccttgcgacagagcaagactccatcaaaaaaaaatgtaatttaaaagattaaaagttaagatagatttttacaaatgtatatatctaccattatagtatcatacagaatggttttactgccgtgaagattctctgtgctctgtgtatccatctcttccttccccttggtccatggcaaccactgatctttctactgatcccatagtttcaccgtttccagaacgtcatataattggaatcgaacagtacgtagacttttcggattggcttcttcttttagcaatatgcatttaagtttcctccatgtatttttttgtggcttgatagttcatctcctgttagcagtgaataatatcccgttgccattatacttttgtcaagactcagaacgtacaacgtgaagagtaaacgtgaatgtgcactgtaagctttgagtgataatgaaggatcaaggtaggttcctggttgtcacaggtgtgctcctgtgaggcaggaagctgtagtggggaggctgtgtgtggggaaagggacatatgagaagtctgtactctctgctacgtttagctgtgaacctgcacttctctaaaaaataaaattagttaaaattaaaagcaaaaaattagaaaaattaaaacattacaatgtgttatatagttttcaaatcacaagacagaaaaagacataataaaagaaactatagaaaacaacaaggataggaataaaacatcagtgatagaaggcagaagacagaaatgtggagccaaacacattaatttattttaatcattagttatactcatttatactaatttatattgatttaacatattaattctgactaaatggcattaaaggaggtctgaggaatttgcatgtcacattctggatgacaggactcaataatattaactctttagttggctgtaaatcatttaaaaatatgctcaaattccaataaaaattccaagaaaaatattttcgaacaagaacatgtgattttaaatccatatattgaacacacacatacaatgagagccattattataaaatttactataagatatttaagattattatcactatccaaaattaaacaaatttgaaatggcacaaaaataaacacattaatgaaagagaattaaaaacacagaaattgagtgtaattttatctagtaacagggtaacattttaaacccacaaaacagagcgattgttccatttgtggtattaaaatattgggtaatgatttcagaatataaaatgacaga

SEQ ID NO: 47040 - DNA, 1052 bp, Homo sapiens
ctggggtttgtataaagtggaatgggaggaatagggaagaagcccccacctaccctctccccttgtccacttgtcctccttcactagtggataaagtccacgggaacaggcaagttattttaaatctgtatcttctgttgtcaagatctgtaatcagttctgctcgctggactggggacaggaaccaagggaacatgagggtgaacgggttgacatggagtccaggaacacactgtgcctacatgcagaatgtttgtgccaggaaagccagtcagcaggcagatggtctcagataccaagctagtgttgggaagcaagattcagtctcttgaaggcggtgttcctcattctgtggtttgtatcacttgcttcagaatgacctggagtacttgttaaaatgcaaattttgagcccaatcctagacctcctaagcctacatctctacggatgggtctcagtagtcgatattggaaacgtgcgggtccctaggagatgcttatgcatatagatttgaactgttgtgtttaagggttagggagctggcaaaagcaaggaatagaccaagccctcgggtgggaaggctccataaccttggcactgttagcattctgggcggaacaggattctgccacatgcttcgcagcatccctagcctctactctctaacaccgtattccagttgtgaaaacaaaaatgtcccgtgggaggcaaaatagtcaccagttgggaactggaaccactgctttgtgagatcagagtggttactttgttcccaatccagggatcagaacacacgatgagagaaagtccagctattggaactggagtgccaagttggagctagacctacaacaaaagctccaaaagctcctttatagagcttgatcccatgcctcagctacctagcttgtacagatgccatgtaactctagatttggtgacagaaggaatttaaaggccagaactagacagggtctttcaggttaggccagcacacaacttggacttttgacatcatccagatgcttgaaccaacctcagttctgaggcag

SEQ ID NO: 47041 - DNA, 1043 bp, Homo sapiens
taaaaatgttggaccacgtgtacatgttatctattttaaaaattagattttaaaatacaagcaagaaaacaagaaaatgaaagcataaaaagagcatgtggaactaccagaaaaatatactaatccatggagataatgacaaggtagctcctagatgcactgatttctctaccacattgtataaacaagccatcaactatgggatttgtaattaaaaatgagtctatttgaaacaccacactataaaaagctattaagtaaatctttaaagtgacagtaaatgatgacttaacattttaaagagatacagtcacatcgcatgtgtgaatgcagtcatctgtataaaatgtcatcattaccttgatcatttcttcttctgctgttttactttttgcttctatgtcccctgcttcattgtatctaataaagcatctatttgaggccaacaaagccattttcccctaagtgaaacaaaataacaaaatagccatgaggatacttcttgtagaagaaacattaagtgtttagactgaatgaatttttcctccctgatttaaaaatcacagaaaagaacttagagaaaaacctgaaaaatataatacaagaacatatagaaaaggaaaccaaaatcacctttcattttgctattcaaagattgccacaataaatatttgtagtgtatcttcctagtaggactaaattctaattagatgaggtaggattacttcctttctaaaagatctactgaagataaaactgatttagttctgtttgaaaaattagctttaaagacaagaacataattatgaatgcatactttattcaaatattagcattttaagtaaaatttattttcttcacaattagaaaacatgaaaaggcatatacaatgcctttggtgttttgaatttaagaatcaatgtctgagggacttttgtgtgtgaaaataaatattcatatacatttttagttgtttaatgtttgatgtattacactgctttctattaaacaaaactttaaaaactgattttcttgtgtatcta

SEQ ID NO: 47042 - DNA, 1002 bp, Homo sapiens
tgtcttttagaggcatcatagttttagtttttacattaaatctgtcattaatctcaaattaatttttggcatggtgtgagtttggtttcaagatttacttttttttttttttaacatcttgatagccatttgtgccagcaccactggtgtttcctttttccattaatccagtttcgtatcttcataaaaagtcaattaactttctatgtattggtctatttctggactctgttctatcgattgtctgtttttcttttggtatatttctcttgattgctataatttcatgaagtcttgagatcaggtagtgtgtgtcctccaactttgtacttactattagtttattaatttctacagtgaagcctgttggattttctcagagaattgtattgagtccagatcatttgggggagaatcaacatcttaatattgggcctcaatatttcataattttcaatgtagcagtcttgcatgcctgtttaaaaatttattcttaagtattttataattttacattactgtcagtagaacttttgaatttgactttccagttgtttgctgtcagtatgtagatatacaattgatttttgtatagtgactttatagtctgataagtctgtttcacttattacttctagtggtttgtttatatagaaaactaagaaatttgcaattatgtttcctgtgactatcattttacttctttctttcgaatcttaatgtcttgtcttgctttttattggtttattatactgtccaggacttccatagtgttgaacagaagtcacgagaatgggcataattgcattgtttccaagcttaggcagaaaggtttcagtagtccaccatatggtatgatgtctgtacgatctacagagaaaacctttatcaaaatgaggacattccttttaaactttgtttctcggcagtttttatcataacgatgtttaatgctgtcaaatgtctccttctgtatctgttgagatgattatacaactttct

SEQ ID NO: 47043 - DNA, 1050 bp, Homo sapiens
taaactggagccctcatgcattgccagtggtgcaaatggaacaggcattttggaaaatgatttggccatttcttataaaggtaaacatacacgtatcatatgactcagcaatcccattcctagctgtttacccaagacaaatgaaaacatacagacttgttcatgaatgttcacagtatctttctttacaatagccaacaactagaagaaaaatctaattttcattaaccagtgaatagataaacaaatggtggtatatcgacaacacaataaaattgtactcagcagtaaaaggaacaactactgaactactgatacatgcaacaccaagaatgtatatcaaaattattatgctgagtgaaagaagcttgaagcaaaaggtgacatattgtatgcttccatttatataactttctggaaaatgcaaaactatgggagcagaaagcagatgagtggtttccaggggctggggataaggggagaggtttgactacaaagggctgcaaaaaactctttggggtgatggaaatattcaatcttgattgtgatagtggttacatggctgtatatattcgtcaaatcttatcaaactgtatatctactaggagtgagttttactgtgtataaattatacctcagtaaacctaagtttaaaaagatacggtatccatgaaacataactaggatgtatttttacaagagagaatctttggaaaatacaaacaaaagttttgggaaattaaaaatataatggtagaactaaaggactggaagataaagtcaaggaaatttcccagaaagtagaacaaaataaagagatgaaaaactggggaggagaaggggaaatagaataattaaaggatcaattcagtagtaaaaataaccagaatggttactaaatagtaattcaaaaacttttccagaattaaaggacacaagtgttcagactgaaagggtccatcaggtgtccgatataataaagatagagtcccacactaagatccattattgtaaaacagaggaacactgaagataagtcaaaggtcctaa

SEQ ID NO: 47044 - DNA, 1036 bp, Homo sapiens
ataactcaatcatctaaattgcttattagttttatttctttttaattgtctattttgattaattttctttttctccattggtttcgtgtgtttgtggaggtaaaatatacagaatatagaatttgccagtttttctatttttacgtgtacacttcagtggcatttaaatacatgcaccattttaccttcccaccagcattgcacagggtttcagtttctccacatcctgcccaacatttgtttttctggttttcttgatttctgttttttatttgttttgataatagcattctaatgggtgtgaagtggtattgcattatggttttgatttatatttccctagtgactagtgaagttgagcgtcttttcgagtgcttattggccatttgtatatcatctttggagcaatgtccgtatatatcctttgcccagttttgaattgtggtatttgtccttttggagttctctacatagtctggatattaattccttataatgtatgtagtttacacatattttctccattctctgggttgccttttattctgacagtggttcttgatgcacaaaagtttttaattctgatgaagtccagtttgtctgtgttttcttttgttgcctgtgcctttgatgttctatataagaaatcattgccaaattcattgtcgtgaagctttttccatcttattctaaaagttttctaactttagctcttacatttaggtctttggtctattttaagttactttttgtatttggtgttagataagggtccaacttcattttagctaaaattttatgtattttaaaattgattatgaaaagcatgaaatgtttagttgaatagaaaattttgtgcagtggaattaactgaatctttaaaacctttttattatggaaatatccaaactaatccatacatagaagaatataatgagtcccccatgtgcccaggccccagcattaattatcaatattttgccaatttcgtttcatttacatacacacccccacacacgttttttcctaaaaaatt

SEQ ID NO: 47045 - DNA, 1158 bp, Homo sapiens
ctttacagcctgaagacccatgagccaatgaatccccttttcattatgaccacacagaaaataagtactgcaaagtggagctatgaaatatcttcaatgacttttcccgattgtcttggctgttagcactgggtttctttttaatgcaaatatctgaagccttcttgaagtttcccctggtggagagtggaagttggatgtgtgggaaggggacagttggagggtattgggagggtggggagagtttcgggggattgtgtttggggttacaggtgaaaggcaggagtgccaggctgcaacaaagatagctgaaaatgtaaagcggttcagaagtcggtaacaccagaagttggagagtttggagagcttgaaaaaagacaggaagatgagggaaagttgggaccattgtagagacttgttaaatagttttgattaaaatgctgacagaaggaaggccagggaaggtcagggaaggccaggcttacaaggtctcagatgaaaatgaggaacttactgggaacaggagccacggttacttttgttttgctgtagcaaagaacgtggctgcagggcgaccttgcccttgagatctgtgaaactttgaacttgagggtgatgatttagtgcatatctggtgaaatgaacttctaggcaccataacacaagagggatcctgtctgcatcaaacagtctgtgctgttatgtgtgaccaaggaaatgacttcaagttggaacttatatttaaatgataagcagagctcaaaagtttggaacatttgcagcctggccaggtggtcaaagagaaaagctgattttcagggggaaaattcatgaagtctccagaaatttgcataaaatggaggccagtgctaatagccaagacaattgtggggaaaaggcttggaggcatttcagagatgtttgcaacagcccttgctgtcacgggccttgggacctaggagagaagaatggtttcctgggccagccccatggccctgctgctgtgtgtagcctcaggacactgctgcctgcatcccagcagccccagctcctgctccgaccttggctgaaagatgtacaggtacagcttgggtcactgcctcagaaggtgcaagctataggccttggttgcttctacatagtgttaagccagtgggt

SEQ ID NO: 47046 - DNA, 1018 bp, Homo sapiens
aaatcaaaggcaaagaatagtttgattgacaactaatttttctttatcaacactaaaaataaggagactgatggcttagaactcttaatctagtgaaactttccttctaaaatgaaagcgaaataaacacatcttcagataaacaaaagctgagagagtatctacacaaaaagaaattctcaaggatattcttcaggaagaaggaaaattatcccagatagatatttggaataaaatgcagcaaggaataaaagaaatgttaaaaataggagttggtataaatgaacattggctgtataaaatattaataattgctgaaatatgtatattaattaatatggagaattaaattatacaaccacagtaactaaacaccatgagcataattgtagttaaggtaagatccttgaatatattggaagaaaataaaggtatagataaatactagactttgataggtcaaggattcatgttgtagtttctaggtaacgattaaaaaaaatagaaggaaattacataacttcttaagagaggaaaacataggaactttaaaaaattgagaaagaaaaacagctaggtcaatttcatccatgtatacatatgtaactaacctgcacaatgtgcacatgtaccctaaaacttaaagtataataaaaaaaaattaaaaaaaaaaagaaaaacagctaggtcaagtaaaaagcacataaggtggtggatttaaacttgaatttactggttattactttaaatataagtgaactaactgctgtaggaaaaagacaatgtaatggtgattcatacctgtaatcccagcactttcagaggccaaggtggtaggattgcttaagcctgggagtttgagaccagcctgggcaacataaggagaccttgtctttacaataaataaataaataaataaataaataaataaataaataaaattagccaggtgtgatggtgtgcacttgtagtcctagctaattgggaggctgaggtgagaggattgctcaagcctggg

SEQ ID NO: 47047 - DNA, 1047 bp, Homo sapiens
tagcttcaatcctctcctcatctctgttccagtatacatctttccttcttattctgcaaacattagaccacttgatattctttaaatatgtcatgtacttttcttgtgtctgttctttgggataattcctatccttttcagggaggcaaattgcacgtgagtttaagtatgaaggcaatgtatacctgctgattgtaaaatatttaaacattgtacatatctgtgtggttttaaaagtctgcttttaattatgtaaaattcatcttccctttccacagataacttctgttaacaacttgatatctattgtacaagatgtgttactggcatttccatgtatatatgtatataaatgcaggaaaccaacatgtcattgacacctctcttctttacttttccccatatctaatcattcctcaagtcttactgatttttatcagctagaatctatctccttatttctacctctattgccactctgatccaggctaccagcatttccctcttaggcttctgaagcaacttcctaactcccacttgtgctcctcacactcactctggtcggctatccattcattctccatacagcaactagagtcattcttttaaaattgcggacctgatccttccatctcccagctgaacgcttttcatttgcttcctgttctcatgagtatgccaaaatgtattaattctgggctaggaggccctgaggaatttggtccttccctcctcccccctcgttttctgtgcttcgccctcactggcttgcctttcttttccttaaatacatcatgttctctcctattttagatccttttccccgaaggtatggaaacattatttctgtaagcttattcttctatatagatgggaagtttttaaatcagataaggttctaagggcatgtggacaatttacgttatcatagtattgttcataacgtccatcattattctgtagactgtaagggcttacttagctcgtgtaagaattatccttcaaaaagcatttttaaggtattagtattgctaatctataaacttt

SEQ ID NO: 47048 - DNA, 1029 bp, Homo sapiens
tccctgcagcagaaggaagcttgaaattggtaacgagcctcagaagggacagaggcaggccaccatgctaccctgagaggatcgcatgtggacacggggctatgacctggccctgctttgacccactagctgtgctgtagggccaggtggagcctggagtggcctgtgctaaggggctactatgagctctttccactcccccaaggcattgcataaataatgtcactttctgtttgcacagcaaaatcagggacacaattttctagaacatggggtgcctcccctccccccagcccaacagaagttctacaatgactgatgggcccttgtttttgtttgagacggaacaccccacagggttccgagtggtgatttgtggcccacaggccactggcaagtggaggcagagctgcagagccctcgggagccacagagggcctgctggccgccacgacatgccaactcagctgctgctggccctcctgtgggcggcagtgctagtgatgtgcagaatcttaggactagtgccaaggaacctataaataccctgggtgacccaggcgtgcactgctgtggtggccttcacagtcagaagatgacaagctgagaaggggagaatcggcccaaggtgagatccacagaaaggccagggccaagatgcggccagcacctcaggctggtggtggtcttacgttgaccatgccagaggccagtccttgattgctccaaaccctctgttcgagggttccaaatgaaatgagcaggtcctcgtgtcaggacctaggttagtttctgaaaaagcatgaaaagcaggcctcctgaacttccccgagtgactgatgcaaagtgcgtcctgcatgcttcacagcaccatggagaggatcttcaggggcaaactgcagactatctgaatgacggcactgaccatcagcaaaccgcagagctgcctgaccaagaaattgcgagacagaagcaatgcttgcaggcgaagaagaaggggccagacacagtggctcacgcctgtaatcc

SEQ ID NO: 47049 - DNA, 1027 bp, Homo sapiens
gataccaaggaacaacagcactgggtctccttttggggtgatgcagatgttttgaagctaggcagaggtagtggttgcacaacattgtaaatgtactaaatgccaccaaattattcatttttaaatggttaatgtgttatgtgaatttcaccttaacaactaataatattataggtaaggcacaagttacatctgtagcacaaaaatggccctaatttttaaaacactgctccagcatagcaggtatcacatgtgaggtagcaaaagctggagatcaaagtgtgatacctggagacttatcagtaagggtcaaatgttttttcaggttttgagaatcattcttggaattgttccagaagatatatcgtataactcttcttagatgctaagataagaaggcagatatacactagctcattttgtgttattttctagagctttactccagtcaatttcttgggggcagcatttgtggaatcagtggttcatctgaagggctgtgctgtggaattactatgcatttgttttgtcttccagtggacctaagcgttatgactggactgggaaaaactgggtgtactcccacgacggcgtgtccctccatgagctgctggccgcagagctcactaaagccttaaaaaccaaactggacttgtcttccttggcctattccggaaaagatgcttgatgcccagccccgttttaaggacattaaaagctatcaggccaagaccccagcttcattatgcagctgaggtctgttttttgttgttgttgttgtttattttttttattcctgcttttgaggacagttgggctatgtgtcacagctctgtagaaagaatgtgttgcctcctaccttgcccccaagttctgatttttaatttctatggaagattttttggattgtcggatttcctccctcacatgataccccttatcttttataatgtcttatgcctatacctgaatataacaacctttaaaaaagcaaaataataagaaggaaaaattccaggagggaaaa

SEQ ID NO: 47050 - DNA, 1043 bp, Homo sapiens
tttttgagacagagtttcactcttgttgcccaggctggagtgcaatggcatgatctcagctcactgcaacctccacctccggagttcaagcgattctcctgcctcagcctcccgagtaggtgggattacaggcacctgccaccatgcctggctaattttattattattattattattttagtagagatggggtttcatcatgttggtcaggctggtagcaaactcctgacctcaggtgatccacccgcctagcctatctttttcaatacttgtgtaagtattgttttttgagatagatgcttaagaatggagtgctgagtcaaagggtgaggagactgaagtgagactcggagaagttaaatgcataactcacatcacacaggcagcaggtggcaaagccaacagggctccttttggggctccacatcacccccattacaaagaaaacgatggttctggccgggcgcggtggctcacgcctgtaatctcagcactttgggaagctgagacgggcggatcacaaggtcaggagatcgagaccatcctggctaacacggtgaaaccccgtctctactacaaatacaaaaaaattagctgggcatggtggcgggtgcctgtagtcccagctactcgggaggctgaggtagaagaatggcgtgaacctgggaggcggagcttgcagtgagccgaggatcgcgccactgcactccagcctgggcgacagagcgtgagtccgtctaaaaaaaaaaagagaaaacactggtcctgcccagcacggtggtgcctgtagtcccagccactcaggatgctgaggtgggaggatcatttgatccctggagttcaagaccagcctgggcaacacagcaagaccccatttctaaggaaaagaaaatgaaaacattggtcctgtcaaaacgagtgctccactttccactttgatttgactctttcccattcttgtttgcccagactgcaggtgaagctcagtattgatttcaggacctcaggatacagaacacaagagctccctgtcacgagaggca

SEQ ID NO: 47051 - DNA, 1071 bp, Homo sapiens
ctgattttgaaaatgtttttttaacatggtttacaaatgtagcaattcttaagaatgaagaaaatatgccttattactataatgtttttcaacaatacaagtgtttttctgattaaagtgtatgtgcagactatgcttcggggaaatactttgcttgaaacagcagttttccttccacatctctttctgcagccccactgatttaccatgatgaagaaaggttgagaagttctttatgcatagctacaagccttagttctaactttcttctctgaagtcttcttttgtgcttcttacacattaaagacaaggtgaatttaaggtgcctttatggtagacgatatttttagggcctgaatttaattttcaaactgaatgagtcacacagtagcatgtactgatcaacttgcatctgtgtagcaaatatttctttttaacaattagatagttactagcttatttttatcatatgagcaatgtacattcattatagaagatttagaaaatacagaaaaataagggggaaaattacccattgtcctatctccccaagagaactactagaatcgtttaggtcagtggttgtcaacggggaggtggaaatagggaattttgctccccaggggacaattgtcaatgtctggggcattttttttgttgttatagcccaggggttgctattggcatctagttggtagagtctggggatactgcccaacatcccacaaggtacaggacagccccctgcaacaacgaattatccagcccacagtgtcaacggtgccactggtgagacatttgatttagataggttttcttcccatctgtaaaagggtacattttattagaaaaaaataaatatttctttgggaaatcttagagatgctttagaatggaattctgaggcaacattttaattatattattgttattctactgttattgtcttgaaagtaaatggaagtgtgtatatgcgtggagagggcagggggcatacagagactctatcagagtccatgtaggttaatgctgttcagccagggctgtggaaaacattgtaatgactaaact

SEQ ID NO: 47052 - DNA, 1023 bp, Homo sapiens
gtccaactctaatccccatttgtagtagtttgccgaagccacagtaacaaagcaccataaactgggtggcttaaacagaaattaacataaattattgtctcatggttctagaggctagaagtctgaactcaaggtgtctgcagagttggtttttttttttttgagacagagtctcactctgtcgcccaggctggattacagtagcatgatcttggctcattgcaacctccacctcccgggttcaagcaattctcctgcctcagcctcttgagtagctgggattagaggcacacgccaccatgcctagctaatttttgtatttttagtggagacgggtttcccattttggccaggctctaactcctgacctcaagtgatccatctgccttgacctcccaaagtgctgggattacaggtgtcagccaccacgcctggtccttattctttcttgctttctaatgacttaaagctaaacatattttccaaacagaaatcagagtgtgtgcttttttactcatgaaccaacaagacagagtgctggtcatttggcctatccttggaaatctgtgatgtctggacatcttaagcatagcatgtagatgagtaatactcaagctaggttctgaagcataatttaattatactcctgcatgtttaaaagaattcagaacctaagaattaaaagctgacccagaggcaggcacagtggctggccgggtgcggtgattcactcctgtaatcccagcactttgggaggctgaggcggtggatcacctgaggtcagagttccagaccagcctgaccaacatggtgaaaccccatctctactaaaaaacaaaaacaaaaaattagccgggcatggtggtgcacgcctgtaatcccagctatcccagctactcgggaggttgaggcaggagaatcgcttgaatccaggaggtggaggttgcagtgagcctagatggcgccactgcactccagcctgagggacagagcaagactttgcctcaaaaaaaaaaaaaaaaa

SEQ ID NO: 47053 - DNA, 1032 bp, Homo sapiens
gtagtaatataaatagtaatttaaaaagtcatgcagacttggttggggagaggcatgaagtttgggtgtggtgggggcggggtgaagcggtagaagggttcgcaatcactgctgaaactttcaacatattctaccaacaatatgagccaccagggaattccttgcctcatctctagaacgaatcccattaagcagttgtggctacagatgaatttatctaggttgagagctgattcccaataacatgcctcattgatttgactctaagcagtaatcaggggcccaacagttgttggaccaaccagccttgattttccagagaaggtgatttggtatatggtagtgtctgagggtgagattgccccagatgggagtggagggaagcagaacagttttctctggtgttttactgagtttttgtcttgatcctaaatccaagggttagggtcagaaacacagactcagaggttagatttaacacccatttagtgggttaaacacatcaatggttatgtgaactttgttaaggtttaaaaagctatttagggcctgtttctccctcataggaatttttgcaatcagcctttttagtagatgcccatatagaaagtgaatttgggagggtctaaggtggtattactattaaactttttgaaaaggctgtgtgatagcaatggaaaaaaaaattcaggcatggaaatccaatatgcagtattgcagtagctagttttaattttatttttgtttttttggttttttttttggagatggagtcttgctctgttgcccaggctgaagtgtggtggtgcggtcttggctcactgcaacctctgcctcccgggttcaagcggttctcttgcttcagccttcaaagtagctgggattacagaagtgagccaccgtgcccggccactagttttaattttggatggtacctaggaaagcagttgagctagtatgctgcatacattgtagtgtgagaggcagagttccgagttggagagtgtctgcttccactttttccatttgatt

SEQ ID NO: 47054 - DNA, 1047 bp, Homo sapiens
tagtaagccaatgggctggaaattaaacacacatttatctcactccgagttcatgttttttattccattttatgctttaaatttagtttttccatttgtcaaggttatatgtgcacatggtttaaagggtcaaatagtgctgtaagtctgaagaagaaattttcagttccttgtcccattttcaaaacacaatcacttcaaccaatttccaaaggcaatcagtcacttaggcattgtagacaattaggaaatctttctctgttacatttcgcccctctgccccaacacgtacttttatagtccctttctcaataaagttatatcatgattttggtcagagcaattttcagtgtttattttattttgactatcctctttcctctccagtaaaatattttatttttcttcaagttaacaaaggttaacttgttcaaaggtccttcttcatttgcttcatttttctgttattattgatacaaatgtcaaccatcctcttactgtttaagtccctcttccatatattcaagtacatctgttggatattctgtcactttcatccttcctggagccttttgacttgctctatctggactggcttcccagtaggctctgcatgttactatcatctttatcatcctttcaccattatcttgggcgttcccttaacctctcttgagatggatccctgtttcctggattccatagcttctttttttccctcactccccacaaattttggtggagcatcctgtagtagatttctgagaaaagggtatattaaaaacacatttaaaaaatcttgcatgtaaattgcaaaaaaaaaaagtaaaaatatttttatcctattcaaacttgatcaacatttttagctaagtataggattccaaaattggaattctctctcaaaattttgaaggcatggctccatagaattttggctttccagtgaaaaatctttcagcctttagctgtggttgagattttcttctgggtccaaagctgtggtcagaaaaaggaatcaggagttctaagtgacttttttttaaa

SEQ ID NO: 47055 - DNA, 1003 bp, Homo sapiens
gtggcctctactggaatttcaaagcctcaggggctgggatggcttccttaatctttcaggaaatgagccaagaatgacagaggctgaagagatatggcagcaaaacacatgttctttctgtacctgaggacacatttgcaaaaatcttagcgccgtctcaggctgtctgtagagggtacattggaggacagtaaaaaatgactgatatttcatggtggggatgagaaataccctctccaataagaagaattctttgacactgaggttgcggatgagcactctgttgacctaggaggaggcagcagacagatttagtttctgcagtggcagaaagggaaagtgactcatgtgggtttaggagccgagccatccagcagtgtgctctgagcactcccgaccttcctgtctcctcgctttcctttctcttctctgcttcaccataataatgctcatcactgcagatatttccactctttaagatctaggtgcatcctcggatttgtctctctgagtcctgagacagcctctggccaaatccaggttggaagaaaacagacaagcttctcatcaagggctttatccttcaaaactttctagaaagaaggccgaaggagggagttaaagcaaaacagtcttgtgagaaagaagacattgcccagtctaaaatacgtgcctagagccctataatcatattgccaatgggcaaacacctttatttttggaaattttaccaatatcagagtgcagtccactttccttttcaaaagggctgaatttattcacatttagatacatgtcctatcaaaaatatttcacaatgtgaccaacttttctagattcacggtataaatcaactttatagacactcatggtttaacctcagttggtaattttctttcttttaagcaggcaggcaagaatattcatgattgttactattttatgaccagttttatccagagttttcacacaacagaggctccccatttcctgtaaggtatta

SEQ ID NO: 47056 - DNA, 1094 bp, Homo sapiens
tcgcagggctgtgtgcttatttgcctaaaggagccaggtgaaggcaggtggctctggccagctcaggaccctgcagtttaagtggtcatttgaaggagcttatgaggtcttgggaaagtaaaatattctacgtccatgttaggaatatatatctaccatgtcttttaaggatggtagggtttttttgtttttttttaaagtcattgtcatcaaaagaatttggttgtacatgatactatgctaggtactacatgaagacaattatgcacacctagttctgatttctagatgctgcaatcctataggaatatgcattgtcttaaaaaaagtcaaaaggatttttgtatactccctcttttataatttgttatatttttactatgtatgagtagatgattgaattattgaaatctgaccttgtttttagaactttggatagaatgaagtacacgcacccacacaattcacctctctctctgtgttgtttgtgtatagatgttacctgaataattaaaaattaaaataataacactgacttttttctgaatatatgaatacctgaacatctctaaatatctcttcattgtagaaaattataaaaaataaagaaactaaaggaagaaaattaaaatctcctgtaactccaccagcaccagcttcttcttgtgaagtagtctagcagagttgacctctgctgttctaaaacacctatgcaaataaaactttgataatcctccaccctgctctctctaaggtcctgtcttgagcccttgcagtctcagttctggctctctgacagtgtgtgttatttgccacagctctggactgaccatgtgcgagccagagagaacattcctcttgtctctacagcagcttctaagtggagaggaagtcctgccgcctggtactgagcgtgtctctgaaacacagtggccaggcagcctggcttctgattcccaagacctgccttcactgtgggtctcctacaccctacctggcaagttgaggactccagcctcaacgggaacttagctgtttgcacagcttagggaaatctttccagaaccccttctcattctgcagacctgcggggg

SEQ ID NO: 47057 - DNA, 1032 bp, Homo sapiens
tcatttcatgattcttaaattttcctttcttcggcttttctaaattttatttttcctgtgtccattattactgcttcactcactttgtcttttgattttccttattttttctaagattgatttacctttttttcatttttcttcttttttgatgtacttatatgtttattttttcttttcttaccatcatcccattcactcttatataatgttgccttagtgtgccacttaatttttttttagcaaatactcctatgacatgacaggcatcactttcacctacatgctggtttttatttttcttttgacccattttcattttgttttttttttttatttttaccctttatacttgagtttcttttgcttctttatacatccctgtatctcttctttattgacagattagaggtaagtcacattttcgtagccattaagatatgtttcagataacaggatggaagtctgagaatctgaactggtgatagaaataaacgctcagtgattatcaggactgttattaaatcattacactggtatttactatttctgaagttgtcccagaggacaaatttacattaataaacctgttttgatatcaaaacaatcttttcttacatttggtttctgcctgtatcttgatttttagtatatgtgttagtttaaggtagggcattaacttctgtttgttgaattatttgcaaggaatatgaaaatgttcgtcaggaatatgaagaagtaaaactagttcgtgaccgagtgaaggaagaggtcagaaaacttaaagaagggcagattcctgtaacatgtcgaattgaagaaatggaaaacgagcgtcacaatttggaggctcgaatcaaagaaaaggtactttttggtttcaattttggattatctgaattttattttagcaaatataaaaaatattttgcaggtgtttgaaaatattttcaagggttttcttgtatctttcatttcttaagttttttaaccaggaattctgccaccataggattttcaaggacatactta

SEQ ID NO: 47058 - DNA, 1032 bp, Homo sapiens
aaacattttgtgtaattctcaagtgaaactctctggttgtagagatttcttcttggagggagttttaaaattatgttttcaacttccttaatagctattagactagtcaaataatctatttcatattaggtgaattggtccttttgtccaagttgtcaaatttatgtatgcataaattctcttatcctttgatatgtatagaatctgcagtgataaccctatttcattcctgatactggcaattccccctctcccccacccccctactctttttttagttaatcttgccaaagattttctaattttattgatttttttcaaggaggcagctgtttgttttattgatttttctctctgttttccgtttcattgatgtctgttcttatctttatgattctcctgcctgatgtagatgggctcattttttataggttcttgaggtggaagcatagattattgatttgatgcttttcctcttatgtatacacttggtgttatacattttcctgttatcactgcattagctgtgccccacaaattttgatatgtgctatttttgttttcattcagtttattgtatttttcttttcatttttcttgagatcacacaatttgtttattcactaacctggtattagacatttagactatttctagttttgggctactgccagtagatctgccatagatattcttctaccgctttttgtatggaagtatgcttttatttctcttggataatttcctaggagtagaatatcattggtgtgcgttcagttttttaaggaattgccaaaatgttccagaattttggtaaattaattgtaattaataaaagttgacttgtgatggcttggaatttttgtttttaatggtccttcgtgaaaaattacaccttcttaaggtgtaatttgagaaacatttctctggagtagccttggaggggttagatttaggtagctacatggagtctccttacattctacaaagcaaagcagaatgagtaaggatgtaggtaaagtgatagattta

SEQ ID NO: 47059 - DNA, 1042 bp, Homo sapiens
agtgagactctgtctcaaaaaaaaaaaaaaggtaaaagtttaaggacattaagattataagttatttttatttgttataagtctctattttcagtaatgaatgcattataacttttataatgaggaaggagaggagtaaatctgacttggaaataaagctggctaaaacagattatgtgatgtgttaaatttatctattttaatgcaaaattctagttgtaaaatgtaaattgggcatataagtgtatatttgtttatatgtgtgtgtcctaaagaaaatctttactctgtcttaggtagaccatagttttgataaaaatttcactgacatcaagtggcaagttacatagctggttataaaaatgtaatttaccctgaatataagtgaaggaatctaagcatatagactgatgattaaaatctcacaatattagtctgaagtattggtagaaaatatttccattggaagaaaatagtttatttctgtttcagattacaggttgagtatctctatccaaaatacttgggaccagaagtgtttggatttcagagtttttcagatttttggaatgtttgcatatacataatgaggtatcttgagaatacaacccaagtccaaacacaaaattcatttatatttcacatacaccttatacacatagcctgaatgtaattttaaatgatgtttttaataattttgtgtatgaaccaaagtttgtgtatgttgaaccatcaggaaataaaggtgtcgctgtctcagccacccatgtggatgatctgtggttgatggcatcaccatcattcctgactctctatttatatgctactcataaacaatcatttttaaatacttactcacacataaatacttaacagtaaaaactgacatacaactaatatagtgcaaaaataatgtgttctgggtaatttgtggtgtcatgtcagcactaaaaaaatttcagattttggagaattttggatttgggatttttggattagggatattcaacctgtaatagggtgacttgtaatctttattatc

SEQ ID NO: 47060 - DNA, 1109 bp, Homo sapiens
tttattttactttttagagacagtttcactctgtcacccaggatggagtgcagtgtcaccatcatacctcactgtaacttcaaactcctgggcttaagcgatattcccacctcagcctcccaggtagagccatcacacctggctaattttttattattattattattgtagagacagggtctcactttgtttcctgggctggtctcaaacttctggcttccagtgttatcctctcatcttggcctcccaaagtgttggggttatcagtgctaccacgcctggcccagttaatgtttttaaaatagatcaataggtcgggcacagtgactcatgcttataatcctagcactttgggaggccaaggcaagccgatcacttgaggtcaggagttcgagaccagcctggccaacatgattaaaccctgtctctactaaaaatacaaaaattagctgggcatggtgacagatgcctgtagtcccagctactcaggaggctgaggcgcaggaattgcttgaacccgggaggcagaggttgcagtgagctgagatcgtgccattgcactccagcctcagtgacagagagagactgtctcaaaaaaataaaaaagagaaaagtaaaaatagatcaataagattatgttctgatgttgcaaacttcaggcttctcttgagggctgtaatagttacaaataagccatagcaaggtttttttttttccccattagttttataaagtttaaagttctttgtgtttttgtgcctattagttattccatctgtgaagttctcttgaagattaagaaaatatgaaaagtgtggggaaagataagaaatgtttacactcaagtcacaatctaagactgtttgaaatattttcaatgagttgactagaaaggaactaaagttatttcttagatagtatcaaaatcaatatgcactgttcaaatcttggcctttgtttaaccatgtactgtattgattgtttctgggtaatggattagatgttttaaaataactctttggtaccaagttctttttttttatcttgttttttctcaagtattacaatctaattaaatccaattttaatataaacatgttttaataatc

SEQ ID NO: 47061 - DNA, 1035 bp, Homo sapiens
gcattttacccatagcagaatttctttttccttttcctttttttttttttttttttttttttttttttggggacagggtcttcctctgtctcgcagactagagtggaatggcctcgcaaaagtgctggaattataggcatgagccaccgcgcccagcctagaacttctttcaaaattggagttggtcctttcaaaccctgcctctactttatcacctaaatttatgtcatattctaaatcatttgttgtaatttcagcagtgttcccagcatcttcaccaggagtagggtccatctcaagaaaccattttctttgctcatccataagaagctactcctcctccattcaagttttatcatgagattgcagcaattcagttacatctttgggctccacttccaattctagttctcttgcttttccaccacatctgccattacttcttccacagaagtcgaacctctcaaagtcttccctgaaggctggaattctttcaaacttctgttaatgttgatatcttgagacctcctcccatgaatcaaaaatgttcttaatgacatgtagaatgatgaatcttttttagggggagacagggtcttgctctgttacccaggctggagtgcagtggcacaatcttggctcactgcaacctccacctcctgggtataagcaattctgcctcagcctcctgagtagctgggattacaggtatgcgccaccatgcccagctgatttttgcattttttagtagagatggcatttcaccatgttggccaggctggcctcaaactcctgacctcaggtgatctgcccacctcagcctcccaaagtgctgggattacaggtgtaagccaccacacctggccgatgaatcttttttagaaggctttttgtttactttgcccagattcatcagaggagtcattatctgtggcagccatacatagtgttatgaaatgtgtttcttgataagacttgaaagtcaaaattactccttgatccatgggctgcagattggatgttgtgtttgcaggc

SEQ ID NO: 47062 - DNA, 1034 bp, Homo sapiens
cagccatcaaataattgaaaagagttagggcttgctctggattaggatttggcttaaagggatgttgtggctgctttgatcatctattcagaccactaaaactttcttcagatcagcaataaggtaattttgctttcttatttgtgtgtacactggagtagcacttctaatttccttcaagaactcttcctttgcattcacatcttggctagctttcagcctagctcaacttttgtcatgccttcctcactaagctttatttttagcttttgatttaaagtgaaaaacctgtgactcttcttttcacctgaacacttagaggctattgtagggttattaattgttctgatttcattattgtcgtgtgtcagggaatagggacacccaaggagagggagagtgactggagaacagatggtcagtggagcagtcagaacatatgcagcatgtatcgattaagttcactatcttacctaggtgtggtatgtggcactccaatgacaatggtagtatcaaagatcatagatcactaacatatacaacaataataaacaagttgggagaattaccaaaatatgacacagagacacaacgagatgagcacaagctattggaaaaatggcattttagactttttttgacatagggttgctgcaaaccttgaatgtgttttaaaaaattgtttttaaaccagtcaaatttagcagtggggggttgtataccaactttaatgacactatgttagtaacttctgattacccactaccatttgaccagccaaaaaaaaaaaaaaatgttttttaatgcagtatctttgaaggtcagtaaagcaaagcacaataaaatgaggtatgcctatagttactttgtagagtccataggactttctatgtagaaagtcctgtcttttgcagataggccgttttactttcttttttttcccaatcttttctttcttgtgcattattacatttactcatacctccaggacaatgttgaagagaaatgatgtattagtccattttcacactgct

SEQ ID NO: 47063 - DNA, 1103 bp, Homo sapiens
ccatgatatagttagcacacagtgagtgtgatgcgatgtgatgtttcaagtctgcagaataatattgaactatttaataaaagatgctaaagtagtgggttagttattgggaaaatgaaatgataaattatcccttcataatgcagaaacaatttccaaaaggactaaatgtaaaaaatgttaattataaaataattataagtaaatatcttaatttggaatataagtaagcattctaaacataatagaagaaatttaaaaagagtagtttgtaatcataaaaagcttaagcttttctggtaagtgaataagtcatatgtgattttaaaatataaaagaaaaaagacttgtcctgtgtcattgttgaaataatgtatgttttacttattgtttattggtggcttatcaactcccagatttttttaatgatattttaagaagaaaaatctaatcaatacttttcctttcagacaatacggatttttctcttatttgagagaattatttgatgcacctgatcctgtaatgagttacctttgctgtcagtatcatattcatgaagttcctgtaggaactgaaaagaccagagaaagaattgaacgggtaggaaagtagtgaatcatgtactgaatcatgtaccaaaaatgtagttttgttaaaacttcttagctaaaggcaagcaaaacgtgtcagaatttaagtaagtctgttgtttttaaccatgcagaaattatatttgtattaattattttccatatgacatgaaacattgactgttaactaatacattgtgagaggagtgatgtggaattaactagaataaatacttaatacatttagggtaattccataaagttaaaacctgaaaagagatacctagtacactaacctgattctgccttgcttggtaaatctatgttcaaacattgtattaatagtttagtcttttaaattattatatttgagattatttttaagacaaattatactttagaatggtaggctggggtataaaactgtttttggtcagccttccttttattaaaacttgtacttaagattatctcagatatgaatgaccacttctcataggatttgtttgg

SEQ ID NO: 47064 - DNA, 1081 bp, Homo sapiens
attatgtgttaacataaaaatgtattaaaaatagctgttttccagacaaaatacatttagtgagaagagtggcgttttacatttttgcagatttctttagttgaagtcagtaggtttttccctacttaattctgtatattgagtttgtagtgagatgtttgagttgaagtatatgaaggaaatctggcttcccataaatatgcagttggaaaaggaggagtattttagacttttcaggtaattgtggatattattctttaatactacatcaaaatttgccaaagtgtagtttattaaagtttaattgcagtgtggaatctgaaaccatatcagtgaacttgtgtactctgttacattaaaatccattgcactttagatggcgcttttacttgtaaatgatttagttatagcatgcattggtcattgggagaatactggttcatcaagtcacatagatatttcaaacgttgacatattttattatgtaatatttttaaaagatcacattgatcactgattccatcagaaaagctgttaagaattgggaagctgtcaagcttgccagtggatacagattttctaaaattcaaattttcatttgaaagtttgaactttatcattggcaacaaatattgtcagttattttccttgaaatgacaagctcactttattcctgtttggaaaaagaaaaatgaccaaatagccaagtccagataattatagtttgtcatttttttaaataaaaatggtattccatgaaaaaaatgtctagtataactccaaacttagtcacacaagtgcttttccttgaaacaacatttatacttttgaatatactacaaatatttaataagcacagcctgccctccatattcgtgggttgcacatccatggattcaaccaaccacagatcaaaaatattcaagaggccaggtgcagtgtctcatacttgtaaccccaacactttgtgaggccaaggcggaaggatcacttgagtccaggagtttgagaccagcctgggcaacatggcaagacctcatctctttaggcagggcagggaggagggaagaaagaaaaatat

SEQ ID NO: 47065 - DNA, 1026 bp, Homo sapiens
atcgtgtcatcactagcaatatatagtttgttgttttatgctatttaacttacaaatttaatgcatcatgttgatgaggaagtaatacttaaaatacttaagactggttgagtaacttcagcagtttaatcttttgttaatatctgactgtgaaatgataaacacagaaatactgggtggaggggagagcatgtgatataccatattaacttaaaaccggaaggagagctggcaataagatggtagtggcagtggcatagtttttgaatctccaaaatcttttcccaaaaacagaagagaagctagaataatataacaacaaacctgtggacaacacgtataacaaaactaagtttcagggtatccatgtgggcatactgcagtactattctgacgctaaccatcctggtcactatcaaactgtataccataggggctcggttcccaaaaagaccacccttacttcagacaccgtcttcaagtttaggggtctccaggtcacttgtatttctgaccaactagctgcaaattcaagagttcctatgacccccactcaggttcaataatttgataaaacaactcagaattcgagaaagcactattcttaacgattatgattttattataaaagatacaatcaggactagcaaaattaagagacacagggcaaccaacattttggaggttcctaaactcaaaagtttctttactcttttcttgtgcagttagggtacatcaccctcctcacacatctcctggttcaccaaccagtgggccctaccaggcttcagtactcgggtttcttattggggtttcattatatagacatggttgttgattgaatcattggctatgtggttgagcttgatcatcagccctcttccctggagtttgggaagttgggctgaaatcatgtggctcaaagacatgtgtattgctcaaatcatacagttgatctttgtggcattttctatccccatcctgagtcatattcttagcattaactcaggagtgatctaaggggct

SEQ ID NO: 47066 - DNA, 1035 bp, Homo sapiens
tccagacatttgccccctggggagcaaaagtacccccagttgagaaccactggtctaaaactaccaggttacaataaattcaggacaggaagaaatatgttaaataacactgaggaatacagtcagcaaaacctagaatataaggaactctgtaggataaataatttacttcagcactgtccagtagaaatacagtgtaagctctacatgtaactttcttttttttttttttttttcaagacagagtcttcactctgtcacccaggctggagtgcagtctcagctcactgcaacctccgccttctgggttcaagcgattttcctgcctcagcctcccaagtagctgggactagcaggcataccaccatgccctgctaatttttttgtatttttggtagagatggggtttcattttgttggccaggctggtctcaaactcctgacctcaggttatccacccacctcagcctcccaaaggctaggtttataggtgtgagccaccacacccagcctacatgtaactttgtagtagccagattttaaaaagcaaaaagtaatgggttaaatgaattacaataatatattttacccagtatatccaaaatattgtcgtttcaacttataagcaatattgaaaatttactaataagctattttgtatctcatagtcttcaaaatactttatacttaaaacacatctcaagtcagatagtaaattttcatcagaaatacttgatctgtattctgactttctgaaactgatagttgaaaaagttaggttcacatacccaagctgttccattttccagtagctaggaacaagtatcagtttttaattttaaatttaaattcaaatttaaaattcagtttcttagttgctttagccacattttagtgctttatagccacatgtgactggtttctactttattagacagtacagtttctaaaatactttcaaggaaaagtggaaggggaaacctaaaagtttaaaaggacttaagaaatgtattaaccaaatataatgtgtatacc

SEQ ID NO: 47067 - DNA, 1050 bp, Homo sapiens
cccatctattattctacttcaccagagtctgtcactctccggcagggttatgtacatgattcactgtaacttaactgcataaatgtatttgttacataaatgtgagctatataggggtgcctttttgtggaaagcatccacagagggtagattttaggaaatgtagacataggactgcacaggtgaatggaaagattaaatcagagtaaagtagcagctttattctgaagccaacctcttcaaaccctttgacttaagaaaaaaacagtgttgctagcagataagcaactaggagcatgcaggcacaaacacacatagccaaacgaagctgaagattaggtttgatatgctagggctgggcaaaatccagagatgtggaagacaagaaagtcctctcccccactccccaccttcaccaagaacaaaggaaggaaaggatggcagaatgaatagcaatagtattctaaataggtagtcggtgtccagcaaaaagcaatcaaaggtaagttccaaatgggagtgaagaaactgaactagctaccagaggagagcctcatcagggcttatttcctgggcatgtggggaatgtcatctgctactttttcatctgttctattggtaagtaattgtagagtccatgctgaagttacttcattgattgagcttatgaatgtggttgttccatataggaaatgttgttataaaagaggtttcatgaagaagttgacccatcaggcagatactattaatatgtgtagctttaaatccagtaacacaattgtattggtccgttttcatgctgctgataaagacatacccgagactgggcagtttacaaaagaaagaggtttaatggacttacagttccatatggctggggaggcctcacaatcatggcggaagacaaggaggagcaagtcacatcttacatgaatggtggcaggcaaagagaaagcttgtacagggaaactcccccttatagaaccatcagatctcgtgagacttactgtcatgagaacagcacaggaaggacctgcccccatgattcag

SEQ ID NO: 47068 - DNA, 1044 bp, Homo sapiens
gtatatgttctaatttgtccccatggcatggactcagaagatagtactgtggtgaaattcaactgtcaaagtaattagattctcaggatgcttttttagttcttcataagtgcagtataaagttctaacttcttgctctctttcaatgccccacatattctggacccattctaccaattcagcaagtacccaccattccaaatggacacaactcctcactccccatggtatgcagtactcattcttttttcccaagctcctgttttccctctgccttgctcctccctagccatttgctttaaggcccggagatgaattctaggcctttgaattctcttaactctcctgtagcatgaactgatacttcttttctctaaattcctagcctatatgatatgtactgcttgttttaatactcaacatcaatacattgccttaaagtgttatccagtacatacattttgttttctttaaagtacaagcttttgaaggcaaatgaccctgtttattattcctttgtattcttgtgtgccagcatgctgttgaacagatagataacttattcagcagattatttttcttttaactatttgaatggaactgttttcattgtatctataatgacgggcaatttttttcttaggttttccaagaccttccaaacacattggatgaaattgatgctttattaactgaagaaagatcaagagcttcctgcttcacgggactgaatcctacagtatgcctgtttctctattcccattctgcatccaaccaccaccaccaccctccccatacacacacatacacacacagagttccctccagtacttgcctcccactctgtactagagctcttggtaataataagctagacagcaggaacaatgtactttaaatgccagattctgaatctattagaattttaaatagattcttcctaaggaacacaatgttctgtgccttttctttataaaaagaatagttgggctaacctgaaatactgcaatgtctattttttcaaggataaaaaatgtcactttc

SEQ ID NO: 47069 - DNA, 1047 bp, Homo sapiens
ttgagaggaattgctctgttgcccaggctggagtgcagtgatgaaatctcggctcactgcaacctgcacctcgcgggtttaagcgattctcctgcctcagcctcttaagtagctgggattataggcacctgccaccatgcctggctaatttctctctttttttttttttttttttttgagaccaagtctcgctctgtcacccaggctggagtgcaatggtgcgatctcggctcaatgcaacctctgcctcccgggttcaagcaattctcctgcctcagcctcctgagtagctgggattacaggtgcatacaactacacctggctaatttttgtatttttggtagagatggggtttcaccgtgttgaccaggctgatctcgaacttctgacctcaggtgatccgccttcctcagcctcccaaagtgttgggattacaggtgagagccaccgcacctggcccacccagctaatttctgtatttttagtagagacagtgttttgccatgttggctaggctggtcttgaactcctgacttcaagtgatctggctcgccctcccaaagtgctgggattacaggcgtgagccaccacacctggcagagttttgtttttatcttgttttttaagtggcagattagcacaagtcgaacttcagtaagattcatttatttgattgtcggatttgggggaggagggatggagtgtgtgagaaagaaacaaaaagcaagtagatgaataatagaactgttgccctgctaagaacagaagtggaggaaaagtacaagagctattatgttggtgcaaaagcaattgcggtttttagtaatggcaaaaaccgtaatcactttcacacctaacatttatatgtagaatatataaaaatattgattctgcctctcatttgtgtaatggttgggctttagcatatctcctttaatttttataggagctttagaaaatggatattctggctgggcgcggtgactcacgcctgtaatcccagcaccttgggaggccgaggcgggcagatcacctgatgtcgggagt

SEQ ID NO: 47070 - DNA, 1050 bp, Homo sapiens
ggcagggtttccccaccttgcagggtggagctaatcacctggcgctcgatttaaaatacagattgccgggtgtcacccctgctcaaggaccagggaagttcaggctaaaatcacactctgtaggtattgggttctgccagttctggcttttctcactctttcctgctgggaggggtggaccgtgccgggcagaactgccagcctccaggcgggaaggaaggaggagaacagatggcccactgggggtagaggatcacgtgttggacctcattctgggctgcatccagacctctccctttcagggcccagcccctccagctccagcgaccccacctaggcacacggaacatatgtggaggaaaccagtgttcattttgttgaaagcaggggaattagagaaggaggcgagcttgaggaggggagaggctaaagggataaagcttccaacaatggcgatgttcctggattttgaaatacaatcaggtaaagcccgatctggtggaacgcccgtggccataatgacagctaacacccaggggctggagggggaagggcgctcaggcaagcgcgaaaacttgcacgccgccctactttgctcccgccccacttagcagccttccgcaaaactccagccctctcctctgcagcgcagaaaggccgcccgttcatgcatatgcaggaggataagtttagctcgcagccccccgcgctccgaccggcccagcgcggcactcggtgaatcacccgcgctcgggggcgggcgctcggctccggccgcggactggcgggcgactcagccactcgtggaccgcgcgccccggcctggcatcgcccttttaaaaagtcttccgcaggcggccgccgccgcagcagcctgaggaggcgagttcatctgaggacagtcccagttctcagaaatcccttccctgctggaacatcaagctccctttactgcagttgaacaaactgccctagattgggggaccaggaacccgccccaaactcgtgcaaggagctccgggcgcccacgcccacgtgagctaaccttga

SEQ ID NO: 47071 - DNA, 1015 bp, Homo sapiens
tggaacagtttgtcctttttactctccgccccccccgccccgtctccacccccttggtaaatatagcgctcacgtttcatcatctctttgtccaacgagtgccagacaccccggcccgcggcccccgccgcctccctcctcctctccgctcggttacctcgcataacctcgcgcgggcaggcaccgggcagcagctctccccgcggccgcgcccgcccggcacccagcgcttcccgccgcagcacacccccaacccattctcccctccccttcttccagttcccccttctgtacggcccccatgctcttgtcccaccccctctactcggcgtccgggtactgggtcgagacgtgtgtaggtgtagggaggtggatagcccttttccgagccgtaggcgtcacccctacgcccaggcccaggcccagtgctggatcctgcactttcccaacctccccctcccaagttccaaggttgccctctgttcccctcccaagcgcaggtgacaagctgctgagacagtgtctgattcaccgacagctgaaccagctactggtacttggaggtgggcgtttgctgaactgttttcctcccacctcccccaaccccctaccccggtggggagcgggctggagggtcggaagaggcaaggtggatgacagccgagaagtgcgtgcccgctcttccctctctccctcctcctcccagtttcatttccacacatacagccacccaccggggaccggaggcggctagtgttctctgaacgccgggaactggctctctctgtggtctcctgtttacttccctcctcctcttttcccctcccttctccccgcccccatctcccggcgccgcttcccgcccagagcagctgggaaacctgcagctgaacactgcagtcatgggacttccctggccccgagctgtgccccaggtttgccctgtcctgtcctgccttgccctgtgtccgctttttggggggcacttatttgtcctgaaaagggtcttaaggct

SEQ ID NO: 47072 - DNA, 1035 bp, Homo sapiens
aatactaggattatgggtgtgagccaccttgcccggccagatgtgctttcttgagtgggactacagctagcacaaaatggcttagcctagggacagttaatcattgtggcagataagagagatattggaagtcgatgacttggtaagggttttttttttcccccagctcaaaatctctagaggtctaaagcagtgttcggttcctagcctgttgacacataacctcaaagaacggagagacctacttagaagaagggtcaagaattatcagactttctagctgtgtagacctgaaattattctcaactctgccacttgatacggtgtgtccttgagcaagatatatagtctctctggaaaaagagatatatctaataatgcccacctcacagggctgttgtagctgtttgaggagaaaacgtgtcaaactggctgacttgtagtcagccctcaataagcattggctgccttctcttttctcaaagtgggcaagtagagaactgaaagacatggaaaaggttagtttttcggggggtgcctcttaatgaatgggaggactgcctctgaggggtgaggtttgagtacttagatgctctgtagcagggaaagcaatttggtaattctgtaacctgaagccgagtaggtctggagaagccaatttggtggcctgttccttcctggaggccacaggaaacatgtcctcactcatatctgctcccctgggtcccatttcctgggagacatgatggatgagccacagccagcaaagactttgtcccccatttatcatcttctggattgcttagtggatccatttgctttccaacaggtgagtcggatgagatggattacttgttgtcaaaacagtaagtaatggaaagttgtggtcattcttttgagatgtagagtgggaaacatttaagcatttcaacttagcttaacagcaagctcaggaaatagacatttatggttccaaatcttccctttcctacctgttttacttattgattttaaaattaccacccaaagtgcctt

SEQ ID NO: 47073 - DNA, 1045 bp, Homo sapiens
gcctttactgtggaaggttttccctgtgagtccacactacctcagcctacaggccacacactaaggaatatgcttgttgtttctgtttaaaatggaattgtattacttttcagaagcccatgcatatttagggtattagagtattcaaagagggaagagccagggccctcttcaagaggggccttcttaggaaaagaaccagcaacctcatatcagggctctctgtgcctggaaggatcagtccagtgagccagactgcatgtctatgtgtaaatgcacatcaggggacatgaggctacaccacctccaaagaaataatctatggctcttgtcgactcccattgcattgtgcctgaggggttatatgatatctacagaaatgatcaatgtggctcctaatattcaggaatgcgtatataagcaaataagttcctgctgacattatttacaaatcccctggtaagagacaatgcaagaaacacatctgtacttacagctcacggttcaggctcgaatctctctgatctgcaggcactaattcctctctgtgccctctggatcccaagctctgtttactgttaaaacttgagcttttcacgcttcaagtgatgctcctcaaacaaccaagaatccagacaataggcagtccacattccgcttagaatctaagcagctgttggctcttgtgttgggactatgtgtccaaatgtatgctgcatatgaactgctaggaatatgataaaatagttgggtgacagcacacccttgtatagtgggctaacaacgttattctttcccagagcaacattgacacgtcagttaaaatacaacaaataaacattttcatcttggcagatttatctgtttttatttttattttttttttgagacagagttttgctcttgttgctcaggctggagtgcaatggtgtgatctcagctcactgcaacctccaactcctgggttcaagtgattctcctgcctcagcctcccaagtagctgggattacaggcacaagctaccatgcccaactgattttgtatt

SEQ ID NO: 47074 - DNA, 1033 bp, Homo sapiens
cggagttaaataagatcacttatgagagctggatatctgggctcactctctacatgcatggtttgtgctggcacacccccacccccacccccaggggcctatcatttcaacctatgcctaagttcctacccctccccatcttcaggagcattggcaaatcatgaaaacttctcatgaaggagtttacttaaaattgtgtaggacgctgtttaaaaatcagttcaaaatggaacttggttcatatggtttccgtttaccattattatacactggcattaattctgtagtcctgtgagtacagactgcaaaaaacaaaaaaaggactttagtggttaaaactctaaaatatactctcagcctccttctgacttgaactctttccctctccttgttgcttccttctcttagttgggtcaaattccatcacttgtaggtgaaatgaatattgttaactgccctggttttatcattttgcccaaatgattgcaaaacattccaaagcattatcttctcttgtcatatgtaggcctagtgacatgcacattcttccagaacctctgcattttaatacttaagtaactccttaaacctattttaatgcttaagtaactccttgaacctacatctgtcctctgaatacaagtctaatgtgttcagtggaaggaaggtaggcatagatatcagtgaagcttggatttaaatctcagctcacatacttcctagctgtatcaccttttgtaatgttaacctgcctgggcctccattctgtaacatgggatcacttccactttccttatagggcctttataatgactggggatctatatatctatctatctgtctgtctgtatctcccaacacactgtagaggcccaataaatgctggctgatattattctgttattctttttgtctcctcttcccttagtccttacttccctttgatccccaattaactgttcacacctctcttctttttttttaaattgccctcattattggttatgtttcctccactttcatcatttttagc

SEQ ID NO: 47075 - DNA, 1036 bp, Homo sapiens
tagagatatttgtacatccatgttcatagcagcattatttacaataactaaaacctagaagcaactgaagtatccatctagggaagagtagataagcaaaatatgttatatacatacagtgtaatattagccttaaaaaggaaggaaattctgacatattctacagcatcaatgaaccttaaggacattatgctaagtgaaataagccagtcacaaaaagccaggcgcagtggctcacacctataatcccatactttgggatactgagacaagaggatcacttgaggccagcagtttgagatcagccagggcaacacagcgagaccctgccccccgacccaaaaaaaaaaaaaagacaaatactctgtaattccatttacatgagatacttaaagttgtaaaattatacagacagaaagtggaatgatcgttgccaggggctaggaggaagggacaatgagagttatgtgtttcagatttggaagatgaaaagagttctggacatggatggtggtgatggttgtacaatatgaatgtatttaataccactcaactatacacataaaaatcgttaagttggtaaattttatgctctgtgtatttaccaggggagaaacagaaaaaaaataactgttggctgtttggtctcactccctccgtctttactctgtaacccatcttctgtttgagaggccacttcagtaatacagattatataaggaagtaaagagatatacaggtgaaagaggaagaagtaaaaaaagtgacctaagtttttttatctaaagatttttaaagatgaggtttgggacacaggaggaacagattgtattgctaattgagtgattgctgtttggtctttgaatctgaggtgtctcaaggatttctgtgaggagaaaaatgggtatcttgcctgcaatctgagacatcagaacttccagagacatgagttagcactagggacatagttttggatgtaatcttcgttgagctcattgctgaggctgtagttatgcattcagttgacctggagaaa

SEQ ID NO: 47076 - DNA, 1046 bp, Homo sapiens
atatacagtacttgaatacggattgatcctgatttggagaggaaaaaacagctctgaaagctgtcttggagaagttgaaatttcaatataaactgactacattcagtgacattaaggagttatctttcatttttcttaggtgtggtaacagtattgtggttaagcacgagaaggtctttattgctaggatatgatgagtattaagaagtgaagtgtcttgatatccataagttattttacctgtacccatacacacaaaaagcaaaaaggtaagaagatgttaatagttgtctctgggagtgtatatatgtatgcattagtattattgtttccactgttttctgcaagtttgacatttctcataatagaagggaatgcttttagagctaagttgagagaaatagtgtttattgaagatggccttattatatgtagtgcattcctgcagatcctatgactatcagggatctgtacctacattgtacacctaagaataactgtattgcactctgttttggcattgtaacactggcctacattgagaaccaggatagaaaacagttctgtgaaatgctttgtgttgtaaggacatttttgcgagcatcgcttactgtatcacatggtataggaaagatgaaactttgcacttcagtaacaagaatacttgtgctgcttctgagaaactggatttttggcatgttacagacaatgagttatgttttactgggtgctagaaagctcagatttcatttgtggcccatctctaacaagtgcactttccagctgcactcctgactgctttgtaatttccctcctgcccttacttttctctcattctgattccctcctctattttttggttgtgttttgtaagatactttatgtccaacaatgttctagccatatttaaaggaatttaaataatgtagtttatgatttgaaactcacaggctaaagccaggtgctgtggctcacacctgtaatccaagcaccttgggaggccaaggtgggcggatcacttgaggtcaggagttcgagaccagcct

SEQ ID NO: 47077 - DNA, 1039 bp, Homo sapiens
atgtctattcagatgtgttgcccattttaaaaattgggttgttttcttaccattgagttatgagtcttttatatatattctagatacaagtcctttatcagatataatttggaaatattttctcgctgtctgtaatgtgttatacatcaattttgagatatccttcacattaagaaactaacggtgtggataataatcctggtattgacagaggtttggactcctgaagcctgaaagtctatctgctgccacgcctgggcacatactgcatcatttacaaaactgtagagcacctgttgtgtgtgcagttgtgatttcttatagatttttagaattggaaggcatgtaaagaacacgtaatctggtacattgcttcagtaggtaagtcagtatgaacttctaagaatttttgttttcttctgtattgggtctattgtgggtatgtccaacgtgacaggggaggtaagggaagtggcatcccctgagatagtgactgaaatggctttcatcatctttaagtcaaagtgagatgccagtaataggatatatgtatgtatgtacttgtgtctctgtatgtatgtaaataaacaaacatgctggaaggaggaggtgattcaatcagggactttgtgaaagaaaaaaagaataactggaccttcctttaatgatgaaaactgtttatacagcaaaccatcaaagccaaaatgtgaattttggtattagcccgatttttcctaagaaactgttgatgtaaccactgtagttgcagagatcgttttggtatattctagaccctctttgttttgttctgtttggggtttcttccccctcaagttgctcttgtccaccactagactggctgccttttattccatagcagacagtccttaagtctttgcatatgtccttattcaaaaattaatcttcatcagtttttttctgcagaaaacagttttttaaatatcttacatgagaatgctctgcacctgcaatctctggttgatgcagtttcctttctctcttctctgttcccattggt

SEQ ID NO: 47078 - DNA, 1047 bp, Homo sapiens
tgagtcaccacgcctggcctttcttttcttttcttttcttttttgatggagtctcactctgttgcccaggctggagtgcagtggtgcgatctcggctcactgtaacctctgctacttgagttcaagcaattctctttcctcagcctcccaagtagctgggattacaggcgcctgccaccatgcctggcaaatttttgtatctttagtagagatagggtttcaccatcttagccaggctggtcttgaactcctgacgtcgtgatccacctgtctcggcctcccaaaatgctgggattacaggtgtgagccaccgcatctagcctctgtgggatcttgactgacatagaaattgctactacaggtggccccaggagaaagacactcagattgggaatcttggtttggatagtgcatttacttacttgccagtggtaaatgcgacacagataacccctgtcatagggcagcatcatggttattcacattatcactgtgtgggcatgagatgaagagcaggaagagggcaaggcattggaagatcaagtactgtggcactgacattatggtgattagtaatgattatatagaccatgggaccacctggcttcttttgacagtgctagaaagtatatgaagaataaaggaaaaatgaaactgtgagtttgcagttgagattgtaagtggataatcagaaagcctgggtggcagcttttgaaggatgaagtggcagcttttgaaggatgaagtgtctcctatactcacagagcagatgacaccgtgggccacgtccagttcctaatgctgagcattataacaacatttaattgggttgcacaccaacttcactaggccttttctgccaaggtgagggcactggtagaggagtggagcttaaaacaggggctggatcaatgtgggtaaagcagaattttgaaactccagactcccttggacttccctagctatgcgagggagctctgcctccactatttgagagaagcagttcttacctacataaaaatttttcaatacctgcacctggggcag

SEQ ID NO: 47079 - DNA, 1046 bp, Homo sapiens
ctcttcatatttggtattatttgttgatggattgagacccagggagcattaaataactgccgaagctagtgcagtgaatttattgtgaaaccttgaatccagaatctagattttgactctccactcttgagcttatggtagaactatatgccttagcccttgcaagcaacaaagagtatcactgggctttaacatagttactatagtacctccttttccttagtctgcttaattctatcccatcctaaagaactttatcttggtctgtcctgtcactctgtcttccctgcaaagtttcccttcataccttcattctttcccttaccctactggcatctgattccatcttcagccactctactaaccactgttatcgtcaaagtcagcgatgaacgtcttgccagatctccatgaggccccttctcagtccttaattgattccatattatctgagatgatagagcatggacaccttctcaaaattcttttctcccgctatttagccttgctcacctgttctgatctttgccctgtgactgttcttctgaaaactcctttttgttagtaaagatttattgagcattactgtggaacagacatcatgttaaacactttacctgagtaatttaagggtcagcctttctatcgtgcaagaatcatctttccctaattattttttgggagctaggtgtgtgtcacattccactcccatgtttatctgcactgctgcttgcttcatctctgtcaccagcccctaaagactgtgaaatctgaacacagatagttaccactttgatgggtcccaaaatgtgtaaatcagagatttggagattttttcaactttgggaggaaaaatgtgggacatggtagtccggtccttacaggggcacacaaaagatagcttccctcataacaaaattaattcatgataccatagatcccaaacagtttttctgaaaactcagttataggatctgagtgatgtacgaatgagtgttaaaggtttttacatgtgaaggtgttgtccttcattgtggctcttgcat

SEQ ID NO: 47080 - DNA, 1023 bp, Homo sapiens
tcaagcaccactgtaaaaaaatttttgttgcctcacttaatcctcacaacctccctctgaggcagggactgttataatcgtcatctgacagataagaatgctgagaggttgttccccttcctgtgtccatgtgttcaccggggcctgttgtggggtggggggaggggggagggatagcatttggagatatacctaatgttaaatgatgagttactgggtgcagcacaccaacatggcacatgtatacatatgtaactaacctgcacgttgtgcacatgtaccctaaaacttaaagtataataaaaaaaaaaagaaaaagaaaactgagaggttaagtgacttgtccgagatcacatagctgtaaaggacagaaataggattcaaacccaagcagcccaactccaaagtccatgttctttatcaatagactaatcctctctatgtagtatttgtgtgtcacagggaactcaggaatttcattacttgacccccaccaaactaatagctctgagcacatggaacctttcctctctagatgtgagaacttccatgtctgcctcccgaaaagcagctaattctacacttagttcagaggactgtttcaaattcaatgtataatttacttttttaagaattttcttaagagacaaagtcttgctatgttggccaggctggtctcaaactcctggcttcaagcgatcctcttgcctcagcctctacagtagttgggattacagatctgagccactgtgcctggctcaacttttcaattctgaaaaccagttgtaaatttataaaatttgaacctctgaagcagtgtttttcaaaatcgatcccatgaacccactgcatcagtgtctgcagggaatgtttgtttcaaacatggagtctgagcttcacccaaactcactgaaactgaatcctctaggagtaggtcccagtaatctgcatttttaagaagcaccccagccactcttattgacaagattgacaataattatagagttgcatctggaagtttca

SEQ ID NO: 47081 - DNA, 1050 bp, Homo sapiens
gtggattatgactaccagcaatttttttctaggaaagttaaaagaataaatcagaacccagggcaacaatgccatttcatgtaaacattttctctctcaccatgttttggcaagaaaaggtagaaagagaagacccagagtgaagaagtaattctttatattcctttctttaatgtatttgttaggaaaagtggcaataaagggggaggcatattataaaatgctataatataaaaatgtagcaaaaacttgacagactagaaaaaaaaagatctgtgttattctagggaactaatgtaccccaaagccaaaactaattcctgtgaagtttacagttacatcatccatttaccctagaattatttttttagcaacttttagaaataaagaatacaactgtgacattaggatcagagattttagacttccttgtacaaattctcacttctccacctgctcaccaatgaaattaatcataagaaaagcatatattccaagaaatttgttctgcctgtgtcctggaggcctatacctctgttattttctgatacaaaataaaacttaaaaaaaagaaaacaagctaagagagaagtttgtgtataagacaatgaaaattatggtctcctgtaagtatatcccagccaccaactcctaaagaactgcccttttctccatattaaacacacacacacttacacacacacacatacaaacccctgctttgtaaagtttccatcagtggaaactttgatttctttttttaatctcttatgctctcctgaagttcatggttgagcaccatctccaagataccacagaactcttgattgatgatcaaaacagtagtgtcatcttttccttttagaaaacggaacattttctcacctcatgattgatgaattctaaaccaatggggaaaaacaaaaaggctttaaaataatgaatctgtttctcaactactgttatattcaattaatttaactacattgaaccaaattacctttggttctaagaagacagctgtagactgcttattatgctgctacaggg

SEQ ID NO: 47082 - DNA, 1060 bp, Homo sapiens
tgtcacagtgttctcatctgtaaagtgaggataataatagtcccaccaggttttagtgagaattaaatgagattaattgcctaaagctgcttttactattaaggagtaattgttactatcgaaggaatagtggttgctatattaatagacatttaacagatatttttgatgggttgtgtattgatttatttacttccaattctactctaagatggagtttctccactgcttttaaaaaaatcttagttattattgaatatacaggagaatatacatttaattctttaggctttaaaaaatattctatatttaaaatgttgtatttttaatatttttagtcccaaggattataggctacagtcagtaatgaccacttcaagccctgttgcctctatatttctcccctgttcagctccgttcaattcaggtatgaagggggtagcatctggtacagcaggtagcctctagctcccacagaccttcctgactggttaagtgccatgccatacccattgttaaattttgaatctcattccagaactaggttagtcttatcttctttttctgaatgagaatttctgttggaagctgtttggtctctctctctcccctctgaccagcagccatcttctctggagggatagatacaccacagcatatcctaagctgacctggcctcctcgaaatcactgggaccaggcaatattgaaaggctgaggtgggctctgagggacattgctggcatgtgcagctccccaggcaggcctgggtccagttttaagctcctgttccccctcaggagatggggacagcaatgcgcaaccccagtcttggggatccattgaacaggaagaacgctaggtagctcctggttcttcctgccaacccatttctcatttgtcttgcttaaaggcaagggtgtcttggcaccacccagccccatttggttcttttttctcacccagctccttttaataaagtgtcaaccacggacctggctggactgaattgacgagtgtcaagacagactgatgaggagggaacagaatttcctgtgtta

SEQ ID NO: 47083 - DNA, 1044 bp, Homo sapiens
ttatcattagaaacattgatgttaatactttccattaataagctggaagtcaaaatgtaccataataaatgcattaatggggaggtcttaatttaatacttgctgattaatccattgcaaatggaaatttatgcagaatgacattgatttaaaagcaaaataaaaagtgaaagctttttttcttgtgttcttgtaaatgtaaaattctttcaggcaacttgagctggttgagagagtgtttggacaacagagtgggtgttaatggcttagacaaagctggaagcactgccttatactgggcttgccacgggggccacaaaggtattacattttgtttgttatatgtttctatgctgctgaaaatgtgtttcacctacgggagccagatttacaaaaaatgagaaaggaaaagcattggctattctttttgaatcctttagaataccggccaaaacccttgttcctggaagctctgtagaacagtgggtagaatgtggtcagtcagcctcactgcatgggtccctctcgcttgaaagactggacacttcctttcctctctcaggcttagaaaggttactggaaaacagcagtaatataaaaacaaaaccactgtctaatcttacagaaggaaagatcagaatttgctcctctagcttagcttttcacaaggtcttcttttatgatttgcattttaagtttaatgcaaactattagattcaagagaaagccaacatttgccaaagttagtgattccattgatactttttctgttgtaatcaataataatgacaaattgaatttttagatgtatttcttcctggacaaaaatttatcacccaccgcttttctacctctctctataacaaaagaaataaactcaacaacaataagaaatgaagatctcaacaaattaaatagcagtgccaaaggaaaatttgtaactgtctactaaaaagaagcctatcttatttcagctaataaacatgttagttatatgaatgaaaagtattatagtgaatgtaaaaatattcctctaagtgtcat

SEQ ID NO: 47084 - DNA, 1040 bp, Homo sapiens
tggggcagtagagaaacggagtacaacagtttttcattggacatctgcttctatccacctgccagcctccattcgctcccttcatctctttcttgccaatgtgctggagtagttaggatcataggtttagaattaaaagggtttgaaacctaatactgctccttcctagctggaggaccctagataagtgtcttaagctctctgttcctcagtttcttcatgtgtgtaagggatataataacaagagtgatccccgcatacaattgttgtgaggatgagttaaaagtagctagaatagtatctgacacacaaatactctgtaaatgagagttattatatcttgtttaaaatttttttggccaggtgaagaggctcatgcctgtaatcccagcactttgggaggctgagggagctggatctcttgaggccaggagatcaagaccagcctgggtaacatggtgaaaccctgtctctactaaaaatacaaaaattagccaggtgtggtggtctgtgcttgtagttgcagctacccgggaggctgaggtgggacagttgcttgagcccgggaggctgaggcatcagtgagccgagatcatgccactgcactccagcctgggtgacggagcgagactctgtctcaaaaaaaaaaaaaaaacaaacaacttttttttttttttttaccctgcagtaaatcggttcaccccatttgttttttacctccccattcactctcaaacatgtccaagtttggaagataaatgatgtagtcatcccaattgtatgtgaatttgtgtgtgtgtgtctaattacacacctatccttccactagctggtgagctttttgagagggcagtgcctcattcatgattgtatccccagcacctagaacagtgtgtggtacaggagaaacacagtgagcacgtgggcagggggcatgcagggtgtaagtaaagagggataaaaagtccatctggaaaggaagagaaacgttggtgcctcagactaaagaggaaggaagggcgagtggcgagtcagaggaa

SEQ ID NO: 47085 - DNA, 1083 bp, Homo sapiens
aaagtcagagtacacagtgtgacagcacgcactccgagaggcaagtcccagattatcctaggactattattgcttctctgtggatcttggtgaaccctaaggatccttctggctgtgaccatctccttggggtggcagtgaaagtcttttgtctattggagcagtgggaagaacagcacagagttccctaatgaagaaactggtcagtagtaagaaacaatttccaatcacgggcaaatttcactgtttatgtagaagcaatggaagtagcaaaaacagtcaggtttggtgcgcgtgaaaggtcctaaaagaagggtcctctgtataaaataagctgtacactcttgtgatggtcagaggctcatggcagggcctagccggattggccatttaagtgccaaaacactgaaattaaatccagagagaaggagggattgcagactctagaacaaacagtcataaattaagccctgcaggtcagtccttaaggagtggcttcagaaacatccttggagataggaaacaaactcaggacaaatagaacaagtatttattgggagttaactccctttaatgataaagggaacattctcttggttgggtgacatggccagaagccaatctctcagtagagatgagtctccccatttgacctctcttcttttatcagatccaagctgcaaacctccaggccttcaggcttgggtagatagagggaaaggtgaattgtattttctaggtcagatgaaggagcgatggaaaagctgagctttctcatgggatatatggtttgaaagtagagctattccttcctcacaattgtgatgggcctactgtaggtaaggcctttgtcactcttatgtggattattgtgcaagtcttaccctgtccccactgcctccccctttcctctggtcaaaaagaattgcttcttcctctccctttttcttctctttcctcctcttccttctttaatgttctcaacatcattcaacctaactattttgccattctgtgcacatgaactggcatgtcctgcttttctgcctctactcatgtcattctcactgccgggacatccac

SEQ ID NO: 47086 - DNA, 1019 bp, Homo sapiens
cagtggctcatgcctgtaatcccagcacttcgggaggccgaggcgggcggatcacgaggttaggagttcgagatcagcctgaccaacatggtgaaaccccgtctctactaaaaatacaaaaattagccgggcatggtggcacgctcctgtaatccctgctacttgggagactggggcaggagaattgcttgaacccaggaggcaaaggttgcagtgagccgaaatcgtgccattgcactccagcctgggtgacagagcgagacttcgtctcaaaaaaataaaaattaaaaaaaaaattcagtcaccgtataccatatagtggaaaaagcagaggcttaggagtgggttcacatcccagctctgcacatttttacgtggccttggacactttgcttaacctttttgaatctcagtttctctatctggaaaatggaaacaacatccaactgcttcttttgttgagaggattcgaagctatgtagggagagtatctggactgtcattgtggttcttggtgagcacatttgatgacactttctgctgcatcgttttttttcctcaagagaacatgctcaattgtgtatatgggttcaagaaggcactggccagaataccagggaaatctaaattccatacttaggtagctcagatcataactgggtgaaagttctttggccagaacaccaagtcagagttctaaaaatatcttatattataatgtttttcttttttaatttttttcactcaagacagtgaatatttaattgcttgactagtgtgcttacattgagagtattctagaaccctctttctgacattatcttaatgttttcaaatatttaaccacaccttgagataaaagcaatgaaataaagcttgtgtttaggacacagttgaaaaaaacatgccaacaacgcagtgagttatggggcagctagcaccaccccacctgccttccgtaagcggagagtctgtgctttgcacctgggatgtttgtccttgatacttgatggttacta

SEQ ID NO: 47087 - DNA, 1090 bp, Homo sapiens
agaactcatagaaattcaacagtattctcagtcacagtaagtcaagcatagcaggcccacataattttttttttccagctcattcctggtctgctgaaatgttttaagtgctaattctgacttttctttcattactgtgctctgtgtcccaggcccttccacttaacatttgtgcatttacacaagcacacaaaaacaaacactgtgcatgtttttgcaattagtgcttactttgaatcaggtggtctttaagaagatagtgaaaaagaactcacagaccactaaattagaatgggtctaaatcataattcaagccctcagctcatgctcaataccgctctagtaagttttcaaaaactagaaatatactctactcagatggctctttctgtaatgggtgattccactcaaaaacacttccttgtactttatcagaaacgtaacgtcacttggtctaaattccaggttggtgatcacatatttgatctagtttacatgctttcactgtaaatattatagaaatcttttggaaaatttaaaagcaaaagtcaggagactaatatatcatgaacatccacgtctccattaccaacttcaataattaccaactcaaggccagtattctttcatttattgccccctttactctgattgtcttaaaacaaatagcatacctcattcatcaccgaatagcctagtatgtatctgtttaagatatgaactacttttcataaaaccatattactatcacataaaaaattaatttgtttatattatcaaatatccagccagttttcaaatttcccgatctaaaaattttttctttgtcatttgtttgagtcaggctccaaataaggcttatacattgtgattgattaatgatgtgcctcttatttatttatttatttttttattatactttaagttctgggttacatgtgtagaacatgcaggtttgttacataggtatacatgtgccatggtggtttgctgcacccatcaacccatcacctacattaggtgtttctcttaatgctatccctcccctagccccccagcccccaacaggcctcggtgtgtgatgttcccc

SEQ ID NO: 47088 - DNA, 1049 bp, Homo sapiens
aaaagtcagttggctgtatatgcatagatttatttctgtgttctctattctgttctgttggtcagtgtgtctgtttttatgctagtaccatgctgttttggtttctacaccttttagtatattttaaagtcttcagctttgttattttgcttgggattgttttggctatttggaatcttttgtggtttcatatgaattttaggactttttttccatttctgtgaagaatgtaattggtattttgatagggattgcattgaatctgtagattgctttgggtagtatgaacattttagcaatactaattctttcagtccaggagcatggaacatcttttcatttgtttgtgttttcttcaatttctttgatccgttttttatagttttcattgtgtagtaattgtttcagtcttacaacttttatgagttttggttatattacttttttgtgctgttaacaatttgacaacatactctctactctttgatccagtaattctacttctaggaattcgtcccaaggcataaaatgatgtctgtactcaagattgttcttcgtattgttgttaatattagtgaataactgagcaaagttccaggaaaagaggacttgttaaaaagcttacggtgtgtatatatatagacagatacacacacactacacaaacatttatatatatcatttaaggaattatgcaatacattaataaccattaagtaatatatagattaatgtttagaaaaatatacataatattactaagtgaaaaaagcagtatatatctcttttatgtaaacttgcatgtgtacctatcagttgtaagcagtaacttgattatagttgcacagagagtagtggtctgaggcagctgtgctgtaaaattaaaagcactgaaatggatttgggggcttgagttttagtcactgttttgctaactgtgctactctcgatgtaccttttcgtatctctggtcctcctagatgccctcctctctaaaaatgagggaagggatgggcatttaacttcattagcaatgacagataaaccat

SEQ ID NO: 47089 - DNA, 1050 bp, Homo sapiens
tacctgttggggtagattaaaaataatatgatgcaggccgggtgtggtggctcatgcctgtaatcccaacactttgggaggccaaggagggcggatcacctgaggtcaggagttcgagatcagcctggccaacatggcaaaatcccatctctactaaaaatacaaaaattagctgggtgtggtggcgggtgcctgtaatcccaactactcaagaggctgaggcaggagaatcgcttgaacccagggagtggaggttgcagtgagccaagatcacgccactgcattccagcctgggcaacagagtaagactccgtctcaataaaataataataataataataataatatgatgcaagtcaacgtagccttcctgagctctgtagtgtcatttattttgttcttcctatgtctgtacaaaccttcaatttcacttgcctttaaaagcgtatcttcaatttcagtgagatagcctctggatatgtaaattcagtctagttatccgtgtttgtagtcctgaattttgtttgtattttcccaaaggatgttcctctaaatatctattaatatataatttaatattttaagcagtatatttctcttttccaggttaaataaatctttcttggggcatcaagtgagacaggaaattttacattctttgatagtattatcatttgtatttttgtgtcacacacattgtcaaagataaagaaaataattgaataaaaacttaatacaatattagattatagggtacaacaaagaaataaatgtgatttattggcttaattatttaaggaatgaagaaataaatgactgataaaataattccttcagttagctggctgaaaacctatgcagcagcctaaagtcattctggcctattggggtttatcatctacaaaaatgtagggattggaatttatttattcatcatattaagcttagcgagctcccactttctatatgctgtagataaaggggtgaaaaagacgtctgcatcttctatgtaatacataaaagttcctacattctagcaacaaaacagga

SEQ ID NO: 47090 - DNA, 1140 bp, Homo sapiens
taagtgaactcctcctcacaagagtgttctagtatggtatagtatgggtgtccctgttaagggaagattcaaaatcatgtagggattagattaggtcaagttgaggtctttactaattttgaatttctatgattctaaacagagatttgagaaagttgatagggagaacagacagatcagtttccttcaatataatacagcagtagtcggaaaagaaaaaccactatgtaacaaacaagggcccatggaactcagttgataatatcaactgattttaaagtatatatggcttagatagcaggtttgtttttctgcttcacctgagcttgcattcctcacctcatgtttgatgaatacagtcaaacctaatatttagctgtgaacattattataacacctatagccagttgaggtgggcatgggcatgagcctcacaggaacactcagcttattgatttgtaaactgagtcttggcaaagttaggcaacatggccagtaagaaaaatgactgtggcactttctgccatcgtgctctgtgcgatagcagctcctgtcgagtgggtcaggtgggcccatctgttcacactcagctcctagtcaaccgtagctgaattgtggtcaccaaagtgaacactacaacaaagatcttctctgagttcctggagaattgatcatccaggcaactgatttggcacacccctgaaccctgctgtttgttctgttctcttcctgttcatccttggatgaggcctatagtggtatagagtccctctcttgctccatttggttactgtctagctatttcaccggaaacaaattatcagcgcttctctttcccagagaaaaggctatgataggacttgctttacagagctatcgtgaaggctgaataagattgcacatatgaagtatgcagtcctgcaatgggtttcttttaaaaggaagggccacattggatgcatctttaaggacccaaaaatagtcactatagaggcttgtaaataatgcgagcctgataacagctgtaattttctctaaagcataatttgttttaattaagacaggattgtgttcatgggtaggaaatggagagggctgatcttctctatttcagaaatgttaggagttactccgtgtaag

SEQ ID NO: 47091 - DNA, 1065 bp, Homo sapiens
ctggaagccaagtaagccttgatctctatatgtcttcaatggtgacaacccctgatctcagggaaaacgtaccccttcccttgtataggacccctagcatgacaacctagaatataatcttcccaatcccacctttaaaacttcaaaggtttgggctttttaaaaaaaattcccctatattaagaagaagattaggtttttggttttacatgcttaaaaaatcaaactgtgtaattactttattatggagtcatagcacatgcatgccagttggctccaactctcttgccttgttgaggtttttattctagtctgggaatgttcctgagcgtcccagagaggttaggtctgcccatttctggtctgtttctctgaagcatgactaggcagctccgattccacgacaatagcacagtcacagactggctctgcagaatagaatatgccagggacgaggacaacccatttatatcaaatcctgttcagtatagtcaaattctatgtcaaaaagattactgtgaaagacccctttaggctatttgtaaataaataggtcctcatctcttttttctctaagaacaaataggttaatttgccttaacgttttgaaaacctaataatacagatctaatatctcttgtcctcaattttaaaatcctaaatgccaggaaaactgaacgttcttttgcaaatttaacactagaattcattttttggcaaagtttgccataaactcatttgaggctatttacagtattatttataacatttattgtgaaatattcatgtatttgattgtgaagtgctggctcagaccccgctggagattttgtatcatgtatgttataggcatcatctctgaaaaaattttgaattccaaacatgtcttgtccaattttagaatagggattgaaggcctgttctctgaggttctccctgcaggaggatcataagaaaaaggaactgaactaatgatataagcgattttctaaaaatagccctgcacctctgccctagggaggaagggaaaggcccattcatctagctgcaccctgaagtagagcg

SEQ ID NO: 47092 - DNA, 1034 bp, Homo sapiens
ttgaaagtcaagcagtcatcagcatcctatcctcattgagaaacttacatagcccagtgatagctcctctttcaaaagacagtgaatgtttttgtcaagaggttccattttaactttgaaggcttttttcccagggaaatcaagaaaaagcatgaatattaaattattattctttgacgccattttctcaaactgttaaagaagaagcccatgacaccacctcctctgaggttttatttctcgtttcctgtgtttgtcttgcttttaaggggcaggagctgatgggtgcattaactgcacagagggctacttcatggaggatgggagatgcgtgcagagctgtagtatcagctattactttgaccactcttcagagaatggatacaaatcctgcaaaaagtaagtggatctgccccctgggccctagcatttagacctaagttcttttgatgactatcttcataagaaaataagaaaacttagaatttgtaatgataacactaggtttaaacatgtacctgtggacactgttctgaagctttcacccagcttatcattgatatttttattcctttgcctcaggggcaccttaaaacctttaatatttcaatttcaagtacatgctccataccctttaaaatcacagtgtctacctgtgtcacctaacctagcaattgttgtgaggaaagatttttgagtaatcttcagagggataattaaatgtaagacattatgaggttgctagtaaacacaccttcccctgtgcatgtgtgaatggattaaaaaattgtacatttttctcatagatgtgatatcagttgtttgacgtgcaatggcccaggattcaagaactgtacaagctgccctagtgggtatctcttagacttaggaatgtgtcaaatgggagccatttgcaaggatggtgagtacaactgcccatatcgatcttatgaagcaaagtatgatctttctactttcaggactaatatttttccacttaaaaaagaaactcacagcatgcatcagatatgaca

SEQ ID NO: 47093 - DNA, 1110 bp, Homo sapiens
acacagcatagtgccattacaaatggaaaatcagatttcatctctgtttactgagcataaaatctgaactccttacctgagatctttgtgctgtcacctcacaccaccatcccccatgccctcacatgttctagtcatgccaactttcttttcatccttcaaacaaaaccagcttgtttgggacccaggacccttgcccttcacatggctggcttcttctcatcccacaggtctcagttcaaaaataacttcctctgagcagttccttccaccactgaccccacacctgcccacctcgttttgactttccatagcactcaccacatgacattttatggttcgttacttgttgtcagccagccccgtgagagctggtgcttcatctgtcttgttcacagctgtatcttacatgtccagcacatgccttgcttaagaaatatttgtggaatgaatgaataagaaaacatccgagagaagtgacatttgacctgggccttgaaggataagcaagaaattaaaaatcaaagaaggttatgatgtttaagaaggatattcgagagagagaacctgagcaaaggcacaaagccattgaaagggtcctgtggacggcgatcacttggaggcccaggcaggggatgagcagggcaggcagcttgggagaaaggatggagagatgagtggggtcaaccggtaaagaaccttcgctggactgtttcccttcctccaccctcttgtcatcaatgtcatcaaccctcttttcagagaggctaattgatttgcccaaggaccccatcaagtcaactcttggcctcctgccaacatatttgagaagcattcactcagacagaatgctgaggcggccagatttgctcagtccccaggcactgatggctgtattgagccagttgaacgaaagaacagggtgcaagctcacatgagaggcagcagcccacagcttctgttcactgtgatgtccacagtcagagcaacaatttggcaaggcctgtttgcaaaactggacttgggaccataagcctgctcagtaccatctttttctcctaagagaagatcccctagccctctaaactgtcatcaccagagaagaacaaa

SEQ ID NO: 47094 - DNA, 1059 bp, Homo sapiens
taagaagacataaaacctttaaaaaagagaacacaaagttggaagaacttgcagacattgtgcagtttcattgtcccttactcatcctggctttcttcattgattcatttggcacatatttattgtgtacttttgtgctttctgctttcctatcacttgttccgtttattccacatataataggactgtatagcctaatatttatcaagcatcaccaggctacacgcttaatgtacgtgatgtgttttcacatctgcaacccaacaatttttacatatggggaaactgagggttagagaaatgttgaaatgtgaccaattttatgcatatgggaaatgacagagtaattcagaagcagtttgtttggagcaaccttgtgcataactttgctccctgtcttcacaaaggaagtagttggcttagaagctctttgttataagtaaacactaggatacacagggttgtatttcccaaatctcggtgacttcaaacaacacaggtttatttctctctcatgctacatcttcatcatgggtgagctgagaactctgctctgtgtgatccttaattcaggaccaggttgatagagcagccactaccttgccatggcagacacaaagcagacactggctcttagaggtttctccaggatgtggcacttgtacctcctgcttacgtatttttggctaaagcaagttacatgattacgcctgggatcagagagtggggaggtgcaatcttaccatgtgcctgcagaaaagagagaaaataatgattgtgtgtaatggtgacagtctcacaggggaatgactatgggtcatgggactgttgctggcatattctgagctttcacattgtgtgtttgtacatgaaatagtcccagatgtgtgcccgatatgcttcaataaattatttctcttctgctcctctgaacttgtccattgtcttaccttggaaatgtctaacttttttcttctctcaaagcaactcttttgaagaagtcactatttaaaaaaaaaaaaaagatgaaatttccccaagtattctgttatctcactt

SEQ ID NO: 47095 - DNA, 1066 bp, Homo sapiens
tctatcacaggcatgtcctacgtccttattacatgtcctttttacagtaaaggaaaattttacctgtagggtaggcttttccaattagacaagcaagaactgctcgaatgtattagattttatgctaaaaacagacggtctctatggctgcgttattagagctcaccgtcagtcaagcttgcctttaaaagttgctcttcccagttgcagacagggaaagcgtgaagcttctgaggagggaggagaggggacaggtgtgggagcttggaatccaacagcaaagccctgcaggtgctcattcctccccgagtctttagaacgcgcctcctcacacttgagcgtcagttataggcttccttgcaaggtaattacaaactttcagcgacccctctgtgaccgaggtggttaaaaaacaaaatcctcttcctgttggaaaaatctgactcatgttctatgcggagacagtcacaaaaacaggagctgctcttcatttgatttcgaggcaagaatttgttaaaagggtcacttcggtgcaaaggcaacggcagccgaagagagtgctgtacaggaggagtgtgctaagggctcgagggagtgacagctctgtggtttttgctgggctggagaggaggcacgtccatggctgctgtctactacggcagttttacacatgtgacttcaaggaagagcagctcagagaccgtggaaagcccagcagccaaaggccacggagaacacgggccctatttcagagacagagccgagaagattattcaatccagattgggctatcttctgtgagttatagctgaagcaaaatgctgaaaatgagtttgtttggcattcaggcatttaagaggcagtgcaagccaaaaggaaaatggtctggtgctgtgtttctagctgaacatctgtattttatctggcgtccagatgatgacacggtccagggagccaagagttagagcaggcttgattccccaaatgattccacgtcccttcaactggactacgcattttgcaagcagaaaccaggcttcagtggttcccttttgtcgaagcacca

SEQ ID NO: 47096 - DNA, 1027 bp, Homo sapiens
tcacatacagtggcagaagccagatgaggaacttggtcagtcagtttcaaaacctgtgcttaaccactgtgctactttcacacagcacacagaaggaatctaatggcatgctatgattacagccgtttaatacggagacaagactcataatagttcataatagtcactgtgtcagggtggtgcaattttgtttcgttttcctctgttttccaaagctatccttgaggaaactttttcctagtgcaaagcttttcattgggatggtatgtttctttaaatggaaggagactaattttaccatttaaaaagtggtatttatttttaaaaacataaaagaaattccttttcaataataatgagatggggcatcgccgcggagcctcggttggcctcggatagccggtcccccgcctgtccccgccggcgggccgccccgccgtgcgccgggaccggggtccggggcggagtgcccttcctcctgggaaacggggtgcggccggaaaggcggccgccccctcgcccgtcacgcaacgcacgttcgtggggaacctggcgctaaaccattcgtagacgacctgcttctgggtcggggtttcctacttagcagagcagctcgttcgatgcgatctattgaaagtcagccctcgacacaagggtttgttaaaaaaaaaagaaaaaagaaaaaagaaaaaaagaaagggaaaaaaataataataacaaaagcaaataagtaataataataataataataatgagatgggaaatgtggccatgtgtttttcttgtgcttttgcacattctctctaggctttgtctgtggtcatggaataagaaaagccttttggttgccttgtttggaataggtgcggctttacttcattctccacctgagagggtagtttactgcatggggcattttgtttgctgggaaaagaatccatgtatgaatcataccacttaacatttccctgccagcgctgtgtgcatcttttgatgtgacatatttttgtttgtttgttcttttcta

SEQ ID NO: 47097 - DNA, 1078 bp, Homo sapiens
agagcaaactttcactcttcatctctctccttttaccaattaaaaggaagaacacagatggatctagagaaattgatcagaaattcagaaattataattatataatggaaaccagtgttaatcctcttagcatttctaatgttcattcattctgtaaaactgtgtacttgtattaaaactatttttttgattttttttttcttaaaatgtttctgcttttaagtatcatattggtattttgagggggagttcaatttgcctttattgtatttatggaagacagtgaattttaagtaggaaaaagataaagaatcttctccacacatggttcatctgactgaaccatggcagtgtgaacatctgggaactgtagaaggggtataaaataaatggaaatcagtgttttcaacttcatcactttattgccttgagactttggaaatataactcagttttttttccatttttattatttttcagtatttcgtcccatatctgctaatgccaaacttgtgatgaatcgccgatctgattttgacttttctgcccccaaaataaacttggaaattgagttacataacatagcaattgaatttaataaaccacaggtgattttctttaatataattttcaattgtgaattattgtttgataaaagcaaaactaagattttaaatgtttcactaaaattcatgatgttatatggtagcatttccctaaaaagtcagtaatgtaacttttatcttcagcaattgaacaaaaaaatgtgatacatttaagagctttaattttccattctttagtatttcagtattatggagcttcttgaatcagttgatatgatggcacaaaatctgccatataggaagttcaaacctgatgtgcctcttcaccaccatgccagagaatggtaaatgccttgatttttttttttttttagattttaaaaatacaacataaaaataaatttctcgacttcaagaataatctttaagatataccatttttaaggtctgatacaaaccataattgatttatagctagaaatatatgtagctgctttagcttattgagttaa

SEQ ID NO: 47098 - DNA, 1032 bp, Homo sapiens
aacttttttacatataagtcaacacaaataggattctttgtgaattaatctatgtcaatttagaggaatcattgtatgtcttctttgatgggaatggactggagtcagaaatgcaaagtgaagttgtcttcattaattttttaaatcattttcaatttttaaaatccttcacaattttactgatcgctgacttttttcttttttttttaatgcagatttgaaactaaaatagattcatttcatattactggcttaccagataattcagaaaaaccccgcctcctgtcttcattggatgatgcaatgtcacttttccaaattacatttgagataaatccattagatgaaactgtttctcagaggtgtatcatagaagctgaacctttagaaatcatatatgatgcagtaagcatttttttaaattactaagttttaatataatttagtttgctttgagtttgtgttaatgatgtttattttaacagaggacagtgaatagtatagtggaattcttcagacctccaaaagaggtacatctagcacagctcactgcagcaactttgacaaaactggaagaatttcgcagtaagacagcaacaggtaaatgccaatattaatgttggtgaattaaatactgtatcctatattaaacttttatttatggtagaatgtttttagtaaagtttattttaaatttattatatttctagactggttttagtttaacagaaactaatttagtacttttatgtttaaaggcagataaaaccataatcattttttacactcagaaagttcatacctagtaaccacatttaagttagttgcaaaattttgcttaggatacttggacctctatttatgacaaaaactggcctctcgttttcctttcttagaatgcgttccagattttgatatatcagcctcagggaaaaaagttctatccttttttattctctaggagagtttgaataaggtcgggtacgatttcttccttaaatatttggcagagcttaatggtaaaaccacttg

SEQ ID NO: 47099 - DNA, 1046 bp, Homo sapiens
atatgttttagaaagtggaagtcttcagtattttaccttctgtacataataacctttaaaatttgaagtctgttcttccaactttgttttcttttctataccaatagtataaaaatgctaattctatgaaaaaaaatggaaagcttctatgataggtttttgcacttaatttttaaaatttaatatattttggattttttctagaaagttaaaatttacctatttgtgaagagactcatatatattataatgattctggttacttaggttctttccttccctcatattcctcctttcttccttttattttgttacattctcctctattaacatcctggtttctttcttgtattataggttgagtatcccttagcagaaatgtttgggatcagaaatgtttcagatttcagatttcttcggatattggaatatttgcattttacttacttgttgaacatccttaattgggaaataggaaattcagagtattctaagcagcattttctgtgaatatgatctttgaggatcatgttattgtggtgctgaaaaagttttagatcctggagcgttttgattttggattttcagattagggatgctcagcttgttattttccccttcctttctaagaactcaaggtctttcaggtctttttgttgtcaactatggcatgagcttacagagcctgctcaactagttatcctttgtctctggcaggaaaacagatgtggtcgtttgctaaaactcttctttcagagtacaaggttctctgataggatcatagtgaatcattttctttcagttatttcatttatttactcatttaaatatatatcaagagcctaatctatatgtcagacactatgctaggttttagggaacatagcaatgatcagaatggatgtagttcttgcctattgatagatgttatactcttatggataggacaaatataaaactaagagcaatatactggaaatttttgattaatgctgtatgggtccaatcaggaaagaaaaaccacacagtaattttgataggtatgt

SEQ ID NO: 47100 - DNA, 1028 bp, Homo sapiens
gcaggtattttaaattttatattggaagtattttgctgaggtcattttaaaattaatactaattttacattaagattgttttatcagttcatatatttagtgattctgtatttctcgagtaatttgtgaaaagtattcatagaaaagatttacatttttccaggtctactgtatattattgaaacacagaaagttcttgatctcaaaattaatttgaaggcttcatatattattgtcccacaagatggaatttttagtcctacatcaaatctgcttcttttggaccttggtcatctaaaggtatatactaataatatttgatttatgatacagcatttggggtgtttctttgttttaaatgtattttgttttttaaacagtttgatttattgctttttttcctagatttgtggtagataagtaagatttgagaaatctccctttctgttaaataaagtgaagtctcaattaggtagttttcctacacttatgaaagcaaaatgaccaattaaactctgcagggcaggtttgaatctaagcttgattgactgattgattgattgattgattgactgattgatttgagacagagtctcactctgtcgcccaggctggaatacagtactgcgaccttggctcactgcaacctctgcctcctaggttcaagtgattctcaggcctcagcctcctgagtatctgggattacatgtgcccgccaccacgcccacctaatttttgtatttttagtagagacggaatttcactatgttgcagactggtctcgaatgcctgtactgaagtgatccacttgcattggcttccctaagtgctgggattactggcgtgagccaccgcgcctggcccgaatctaagatttatatttgtagtatttgagagttgtgcttgagaagcttatttctttctcaatttagacctattacttgattacttaaagtatatagaatgatagagaattgtggaaacaatcaaatacgtcttcatctttctgaaattttttgtgcataaaa

SEQ ID NO: 47101 - DNA, 1027 bp, Homo sapiens
agataattcagtaaaatttgatctgttgaagagatccatatgtagagatctaagtgtttgtatgcagtcagattttaattacctgagctaaccaataaaaggagaaacaatgagaatccaaagtagttgttatcaaaattgttaatttgtataggactgaaacattttatttcttcaattatatttgcttcaggatagtgaatgtagtttgtatttttatcatattctaattgtggtggaggaaacccaaaggtatagtgggtggcagaagtacgttattttcagaattccacaaattctttttcagggaataaattactgggtttggttttccttgactgggattttatctgactcatagaattattatgttcaaatgagatagtatatatgaaaatgcattatatgactgagatcccattaatcttgttatgaatttttaaagttatttctttctgattatacctatttcagaaaatctgaacaactgagaaaccaaaaagataaacctttatgttactgcttaggcaggaacactattgatattttgttgcacatccttttagtatgtttttcagtgtgtgtacctgtgaatatatgggatgtgcttgtttggtgtttatattggaggtatttgtgaatgtattttttttacatgatttatatagttttatatccaggtattttttcttttaccagtaatattttggtcacttgaactcatggtttttattgtctatattatgctatatggctatggtctcagttatttaaccattcccttatggaacatttaggctcgtaactctgcagtgattgttgccaatcaacaacatccaagtagacttggatgtgaatttcagttttatcactagcagattgatcataggcaaattataaattcttttgagtctcagttttctaaagtgggattattatacagaattttgagaattaacatttaaacattacctagaagagtagaaattataaatcttgaataaatggtagcttttattagttactg

SEQ ID NO: 47102 - DNA, 1075 bp, Homo sapiens
gattgtcagtggatgcgcagtagatttgataacctactgattgtatgtacctgagaatgtgacattaagattacctagatgtggggaaatttcctcatataatggaatgtgtgactatgaagtattaatagttattttaggttttgtgtgttatagttacgttaaatatgaactattttctgtacttaggtgataattggagagaagcacgaaaactcagtgtatctacccagcatattttggtacccatgcacttcaatttggaactgtctaaggccatggttttcatggatgtaaggatgcccaagtatgtactgtttgtttcatgtgaatatggattttctgggtaattctgtagctagggaaataccatacttaactgactcttccttgtgtgtgtggtgaaatgtatataactgactcttccttgtgtgtgtggtaaaatgtatataaaatttaccattttgataatttttaagagtatagttcattgtcattaggttcacgcatgttgttatgcaaccatcaccaccattcatttccagaactgtttctcttccaaactgaaactctgtactcaattaaacaataacaccccatttcaccctgcacccagcccctgacaacaaccattatatcttctgtctttatgaatttgactattttaggtgcctcatataagtggaatcatagaaaatcagattttgtgtgcctgggtttcttcacttagcataatgtcttcaagattcatccatgttggagcatatgtcagaatttcatgtatttttaaggctgattaatattccttatatgttgtatatactatgtttttatttattcatccttcaatgaacatttgtgttgttaatgctgtttggctgttgtaataatgctgctgtgtacaaatatctgcttaagtccctgatttcagtatttttgggtgtatactcagaagtagaattgctggatcatattatagttcagtgtttaagttttagaggagtgctgtgctgttttttatagcagttacaccattttactttcctaccagcacaagagtttcaatttcttcact

SEQ ID NO: 47103 - DNA, 1033 bp, Homo sapiens
tgatctttgatacatagtctcatgagcaggctatttgcactgccaaaccttagttttctcataggaagcatgtacatataggaacttaaatagagagcaaaaataggttgtctgcctcatagattgtgaggactgtttacaataatgcatgtaaagtgctttcctcagtgcctgtcacatgagaaacacttgattagtagtaattgtcaattgtatatagcaaacagtagaaggacattacatgaaataagaacataaacctctgaaaaataatgagtttagcccatctaatgaaactggttaatacggtaagacggaaattggaatagagatttttagtgtttaaaatcacatttgattcagataatttgagaacagtctttttaattagtgcacttaaatcagaataattcctttataattacttatttttatcttttcaaaacagattcaagatttatggaaagttacctcttatttctttacgaatctcagataaaaaactacaagggattatggaattgattgaaagcattccaaaacctgaaccagtaactgaagtatctgcccctgtcaaatcattccaggtaatgttactttcaaaattaatataagcatgaattaagaaagtccacaaatagtatttcaaacaatcacaggaattttatataagacaatttgcaatttgttttgaatagacattaagaaaattactttttttttttttttttttttttgagatggagtctcgctctgtcaccaggctggagtgcagtggcgtgatctctgctcactgcaagctccgcctcccaggctcacgccattctcctgcctcagcctcccgagtatctgggactacaggcgcccgccaccacgcccggctaattttttgtatttttagcagagacggggtttcaccgtgttagccaggatggtctcggtctcctggtcttgtgatctgcccgcctcggcctcccaaagtgctgggcttacagacgtgagccaccacgcccagccagaaaattacatgttg

SEQ ID NO: 47104 - DNA, 1049 bp, Homo sapiens
acccaaggtggagtgcagtggcgcaatctcggctcactgcaacctctgtctcttgggttcaagcagttctctgcctcagcctcctgagtggctgggattacaggcgcccgccaccacgccagctaatttttttttgcatttttagtagagacagggtttcaccatcttggccaggctggtcttgaactcctgaccttgtgatccacccgcctcggccttccaaagtgctgggattacaggcgtgaaccaccgtgcccggcctgtattcttttatttttaaaattaaatgaaatcattatacacactattctgaatctgtattattttcaccattattatcatatatgccttagataaatttttatgttagcacatacagatctacctcatttgtttatggtgatatagtatttcattttctgcatataccatcttttgcttaatatatcttcttttgatggatattcacattatgagtgtttacagttatgaaaaatactgctttgaacttcctcatatatatacatatatatgtgtgtatatatatatttgcttatacttttattcataggataaattcctagaaatggaattgttgagtaaaagaggatgtgaattttaaattttgattattttgccaaaaaaaaaaaaatttttttttttttgggacgaagtctccctcttttgctcgggctggagtacagtggcacaaccttggctcactgcaacctccgtctcccaggttcaagcggttgtcccatctcagcctcccaagtagctgggactacaagtgcgtgccactacacttagctgatttttgtatttttagccgagatggagtttcaccatgttggccaggctggtcttaaaatcctgacctcaagtgatctgcctgcactgggctcccaagtactgggattacaggcgtgagccactgtgcccagcccagatttgcttaacttatagtttgctaacagtgaatgaatatctttctctgctttcattactgagtattagcaaatgttaaaattttattcgaagtgaaaaaa

SEQ ID NO: 47105 - DNA, 1076 bp, Homo sapiens
atttgtatagaatttgcattattccttaaatgtttgatggaattatcagtgcaaatattttttgtgtatagttgagtctgggattcactttattttattttccatatggcattcagtatccaaaggagatccacacactgcatttgattgatataccacttaagtctgttatagtttatgaatttcctttagtttcttctctgcccttgtgttagccatttgttgctatcttatttattctgtacaattttccatagcctgtatcttgctgattatgttttcatgctatttaacatgttactgtatcctgtgtttccttaaatcggtatttaaatctcagggcacagtgagattcagggtttgggagtaggggttggcaagatacttcatagttggtagtgtgtgttttcataggaggcacatagtgtgtagctgtcttttttttcttttctgttttgcactgtcttggaatattttcttttttttatgttagaagctatttgttgttatttcctgtaatttggtcttgaagtctgtgtctggagagtggccataagccaaaatagccactttctagcttgcaggcatgttggtcagatgggacatcggggaggcaacacaacaaaacaccctcgaggggtgcccaccagggaggctgacaggaagtctggaggcagtagggacgtttcttcatttattaaatgggagagttcaccagtctttatgctggtatcaccaatcattttggcttttcaaaagtttattctccagtagatttcttaggcagggctcataggaacaataatccttatttatatttgcagggtagtttgactggattttaaattcttgccttgaattttcttttctagatgatcttaaaacatattactccatgtcttatggcctagtattggtgttgacagttctgatgacagtttgactttctttcgcttctaagaactttgccattttccccagacattcagagctaatttgaagctttatgtagggactttggacaggtagacatcacagttgatggtcaggaactggtctagcaattttatgggttc

SEQ ID NO: 47106 - DNA, 1037 bp, Homo sapiens
catttgctgctataaattttcctttaagcactgctttagctgcttcctgtaagttttgatatgtcatatttttattttcattcaattcaaagtattttctaatttctcttctgactttcttttacccattgtttatttagaaatatgttatttaacttctaaatattttgagattttcagatccctttctgttactgatttctagtttaaattcattatggtcaggggagaaaccgtttcagttcgtttaaatttgttgatgtttgttttatggcccagaacatatatgattaatcttggtgaatgtttcaagtgtacttgaaattaatatgtgttttgctgggttgaatgttccatttgggcaagtaggttggtggatagaattattcaggctactgattttctgtttactggttgtgttgaagcctctgattataaccattgatttgcctgtttctcctttcagttctttaagttttttgctttgtatgttttggagatctcttgttaggtacatataaatgtgtatgaattttatgccccttttgtgattatgtgatgtgtctttttatctgtggtaactgtgcttgttctgaagtctactttggtagtaatatagccattccaggtttcttcggttaggtttgaatggtctatctttttctgtcctttagcttttaatggatgttttcttgtttaaagtgggtttctgttttttgatgcaaagtctcactgtgttgcccagggtggtcttgaactcctgtgtttaagctcgcctcagcctaagtagtaagtagctgggattatatgtgcatgccaccacatctggcttaaaatgggtttcttacagtcagtgtatatttagatctttcttttttatctaatctgacaatctcttggcttttaatttgtgtttagactattttataaaactaattattgatatgattggattgtaatctgatatctctaattgttttctgttctctaattttgtttatcctattgtattcctccttttggcctgatttttgatt

SEQ ID NO: 47107 - DNA, 1836 bp, Homo sapiens
atttattatacataataaatgtgtagttccttatttatataacatcgttttgacataggaatattctaattaattgaaatatatatttcatatagtaacattaagtttatgtgcattatatatcataaatatgttatatattaattagaaccttcgttttatatgtcattggcttaagtcttcgttttacctgacttgcaactataatttaaaaatactgaatatataattgaagtttgttttggtctgaagtcatcattaagaaaaggttattttaattttctagagacaaggtcttgctctgtcacccaggctggagtgtagtggcatgatcgtagctcattgtaaccttgaactcctggattcaagtgatcctcccgccccaacctcctgagtagctgagactacaggcacatatcaccatgcacataccaccaagctaattttttttttcttcaagtttttatagagatggggtcttactctgttgcccagtctggtcttgaactcctggcctcaagtgatcctcctgctttggcctcccaaagcgctgagattacaggcattatgtctggcccaagaaaatcatattttcgattgcattgtcattctgtgaatatcagggactttaaggagttagatttaacccctatatgactccaccctaaggcatttcggttcttatttcggcttttcttgtttcattttgtttcggtttttgtttttcccttgctgtcagctgatattttttcctgtgggtgtcacacctatctccataacatcactattcattcttttaaaatgctgtctcagtgttttagtgtatgaactaggtaatcaaatctaaggctgtagtggaataaataggccaagtgtggcaattcttataagcaagaaaagtatttgcgtgttcatttgaatgtatttgggaatgtggagccctcttttgttatttcaaaattctaagttaattccatataatgttgctgttttgtgatcttttaagccataacatcattttgtacacaaaaatgtaaagataaacaagtattccttgttgaatttcttctcttttaaaaaaaattagagttgggttcttgctctgcagcccagactggagtgcagtggcgtgctcctagctcactgcagcctcaaactcatgggcacaagcaaatcccatctcagcctcccaagtagattaaattagtagggacaacaggccctgctaattttttatttttaattttttttttaagacacgatctcgctgtattgcccaaactggtctagaactactggccccatgttatcctactacctcagcctcttaagtagctaatttatttttataaccaaaaaaatcatgtcacttgagccctcttgtacttatacttagaaattactaaaatgttaattttttctttgaacatgaaaattaggtataagagtataaatatagataattatattttatgtcattgaagtttttttttggaatttggaaattggaaaattattttgaaacttcttaaacatattttatttatttatttaccttacaaatataaataagctctctgtccactgaggttgtatagagaaatagggttgtttttcattagggaaagtgagataagggaagtagatatctgtaagacattccagtgatcccatttagctttgttctgaggactagatttttattttatctgtgtctttgtgtttctcagtttttgtggcagaaaattaagatttaatatagacagtaagattttgaataaataatgcttggttgtatcaagtaaaagtttttttttaaatggaggtaaaaccata

SEQ ID NO: 47108 - DNA, 1067 bp, Homo sapiens
aaaaaatatacaaaattcgtctatgatgattgaaattagaatggtagagaggttgggaattggctagcaagtgttaagagggaactttctggagggatataagtgttcagtatcttaattgaagtagtgactatgtggaaatatacacttatcaaatttcatcaaatagttcatataagatacatgtatttcattgtatgtaaatttttatcacaattgaaaatacattacctggcataatggtacttttctctgaagttagatataatgagaattagaaagtgctgcgttttcattttaagctcatttaatatgtgcatataatgccttgattcaaaattcaaatgtagaaaacaaattttgaattcttctgattagtagaaaaattttaaaaatgtctcttggttttagttttttaaagtaaaatttgaatactgaattatgtgccagttactgtaatatgcattttacatgtgctattttacttaatctccaaacatactcagtgattagttctatttttccttggaacagaacagaagtaggaacagaagcatcaagaggaaatagaaacaccaagtgttcaattaatattcccaaattattatggaaagagtcctaagccagaagttactgagttttacatctgaattttctaatattttattttcttgaatgtcattttactatacctgtttaataattctattaaatctatttcaagggtattttaatgagctacttttcatgatattttcttttattaaataactttaattttttcaaggagcaactgtggtgacagctgctgtggtagaagtacattcacgtgccttactagttaagacaacactaaacataagcttcaaaactgatgatctcaccatggtgctgtatagtccaggtcctaaacaggtaagtccaggaagaaaagaaaatgtattttcacatgtgaaatttgcataggttgatgtttttaaagtaacaaatgttaatatttaacatttattttgtagtatctgtccctctgagaaaaatgatctttttactttaataataattataac

SEQ ID NO: 47109 - DNA, 1010 bp, Homo sapiens
tctagtaacctcttggccttcctcctcttcataactctacttaaaattcattcctttacagacatcttttcaagttaactggctgacttccagcgaatacttacaaaaatatttgagcttctgaaggagtaatagaagcataagtttttgtttgtttctttgtatttttttcctgatgcttggtatgcatctatagaagcataaatgttctaaacattgtcaccatagaaatataagatgtaattttgatacaatgaatacatatatattaggatataagataaactgttgcccaaatttgcaagacagttggccctccactaagcaaagagagagaatagaaaatggagggtataccaattctctcttagtttttgacttagaagttttaaatatatatttcttctattcacatcttttttggcttgaatatagctgtatgaccacactttacttcagtaaaggttggagactgtggtatttttttctgagctaccttgtgctcagataaaacttctattactgtggaagaatagaacagatattaggttctagatgtcctttatatgggataattaaggagtgtattattaagtcactttttaaatagttgtttttattaacttgtttatttgacatacctattactaggaaagtctttaaatagaaatatttttatatttaaacattaatttagtggtattgatttttctctcataggttttgcagccctgtgacttgttttatcaaactactcagaaaggtacagatccacaagtgatcgatatgtcagtaaaatccctgacactaaaggtaaattaaaatataatcatttgaatatttagtgcacttaaaaaaagtagtaaagcctagaaagttattatagcaagtcttttaattgttatgcaaacaaaataggtgtgtttttgaaaatacgtttttatgagatatttacaaagtaatattatttaatacacattttatgaatgttattctatattttattattt

SEQ ID NO: 47110 - DNA, 1035 bp, Homo sapiens
ggttcacagcaaaattgagaagaaggaacagagatttcccgtataccacctacttctgcacatgtatagcctccccctttattaacattccctcatcaacgtatatttgaagactgaaaaaattttccaaaattgagaatgtttataccacactcgacactttattttaatcacaacaaggttcaggttgtctcatcatgagccttgcccacatgcttccttgtttgccctctgaatataattttcaaatctaaggccaatgttgcctatgcttctaatacaattatgtaacaagtattatgttacttgttacataatttagaacaatttagaacataatttagaacacagtttagacattgttctaaatattttaatccttacaacaactcttggaggtagatacagtttttatttaacatgtgaagggactgagaccagggaggttaagagacttcttgaagtaataatagctacaaagtggaaaagatgggatgcaaatccagctgcagaggcgttaaatccactctaaaccactatgctataatgcctgtgtcatcatcttgtaggttgttgtctatcctgagtttccttcatcctttggatgtttgcatgtgtgcaggaatgtatattatttgtttgaaatatattgtggatttatataatcatgagaatcggggcctttaggtggatgaaattttgcttctgaagcaagagactgcagaattactcacgtgtttcctacctaataatgacttggtcaacctgcagacagattttcagtggcttaaagccagttaaagtaacaacagaggtgactagcttagcatgttgagctcttttcatattagatcacttaattttattttccagatattttagatgaaggatatgaaaaggaattccttggtggtttttaggttagaatacacatggtcagcagatctgtgactcctaaaaaatggtaaagggtattgattcttatgagctctaggtttataacactgttctgctactattgtctgcctttgtaag

SEQ ID NO: 47111 - DNA, 1064 bp, Homo sapiens
gatgtttattctgtttttcccttgtctttagctacttgtcactttttagtttttaaagttctgagtaataaatattatgaaacttggatagaaataacttgttaaatatttgaggccaaaaagattagaatttaatattataaaggtttagtgcattaacaatataatattttgtttatgctaaaaagtaatttatcagtttaagcaggaatttttaaaggtacctaaattgtgatgtatttggaatatttttttcctaggttcaacttatggtaactgatagtgagttgtccaatcagttttcaattgatactgttggtagtcatggagctgttaaatgtaaaggcctgaaaatggactatcaagtgagttcattctatgcttatcaagaaacttttattttaaatgtttctattaactacttaattaaattttataaagatgttatacataacagtttttgagctgttaatttttttttcttaggttggtgtcactatagacctgagcagttttaacattactagaattgtgacatttacccctttttatatgattaaaaacaaaagcaaataccatatatcagtggctgaagaaggaaatgataaatggctctctcttgatttggagcaggtgggtagatgaatttcaaaaatatacctctttggattctattttctccttgaagttagatacctaaagtcaccatgtaatgttttaactctccccttactccaattttgttttagtttcatgaatctttattgaatatttgtgccctgctctagatagatgggaaggttcaatttttaataattaggtaactaggaatgcccagcttgttaagggaggtagacgtttaacaattactaaccactttggttaaataaagcagccaaagactagataagatgtaaatgcaccaaagagaaggaaattacttattctctctaggaagctattaggaatgctttcagagagtagggtaagccagactcttcttcaagttatttgaggagagtagtaacttagaagtgaaattttgattttgtgccatcattaaa

SEQ ID NO: 47112 - DNA, 1028 bp, Homo sapiens
aggcgttccagggggcaacggcaaccccctttaggtcccctcccatttatgggagctctgttttcactgtattaaatcttgcaattgcaaaaaagaaaaaaaagaaagaaaaatctctctggctgccttcagtcttctctttgtctttgatgttctgcagtcacactgctatatgtctatatgtggtttactttttatttacccttcttgaggtgctttacccctagatctgtggattaatgtatttcatgctttctgtaaaatttgctactattgtttctttaaatattgcctctcctccattcttccgtttttttccatctaagccgttaaatcagacatgttggacattcatactctatcctccatgtctcttaatagctcttttatattttccaactctctttgcttcattctgagtaagttctacatggacatctttcctttttttttttttttttttttttttttttgcttttgctgtgtctgaactactatttaagtcttcaactgagtatttgaataattatagttcttattcccagaaatttcaccttttttcaagtatattcattctttcaacaaatattgtttattttttatgtgacttgcaatataatagttaaagccacagtagttaaagcccatctttatgtagtttacgttttagtgggtataaggggaaacattaataataccgtaatcaattagtatatagtatgtttcaaagtgacaagtctaatgtgggaaagtctgatgtaggataagggacattgagagttcaagagccaggggtggtctctaattttatgtaaggtagttaggatgggactcattggagtgacatttgaacagtgccttcgaggaaatgagaaagttagcaattgtcgagagctcagctgaggaggagagagctgagctgccaggtgtcggaatagctgattaacacaaaccacaatgaaagtaacagtcaaacctttaatcacttactgtgatagtacagattgagcatccttaatctgaaaata

SEQ ID NO: 47113 - DNA, 1058 bp, Homo sapiens
ctcttgatggtgtaagtctagatgatgaggcacagttttttttgataatttcttaagagtataaacactgataatagcattgtagctgtgtaaaacagtgttccattaaaaaatgtacttgaagcatgtaggggtaaaactgacttgatgtctacaatttattttgaaatgcttcaaagaaagaaaaatggaagagctgaagcaagtgtggcaaaagcttgttcattgttgactctgatgaggagtctgtcagagtttgttaggagtctctgaattttgtctatttttgaattttttcatgtgtttaatatagtgtaaatatgtaaaatttcagatttttttttcaaacagtaggtaccctcttgttgagctgtcttggggaaaggactgcttccttaaaggctataattgaatcttcatggtttaggactactcttcaacattattcattttatttgctgttatatcttcttagtgccactacaggttatgcaagtttctgatcctctacttagtagttccaggctgtcttgaatttattttgtttcctttctttctttcttttcacctgttacttttcaacaagcacatatttatcattgcacttccactttccttccactgctaactgtacaacttctaatcattgattaaaatcaaacagacattgagtagggaccacagggctggactagcaagtacctaaaactcgtttggggtagcattctctcatctatttaagatgttaagaaagagggatgcctgttttttttaattatccatattataaaaataataagttgtttctaaacatgtgtgcaagtgtctttttaatataatgacttctcttcctttgagaagatacccagtactgggattgctggatcaaatgatagttctgcttttagttctttaaggaatctccatactgtttttcatagtgtttgtactagtttacattcccaccagcagtgtgaaagtgttcccttttcaccacatccatgttaacatctatttttttttaatttaaattatgatcatttttgcaggagtaaggt

SEQ ID NO: 47114 - DNA, 1035 bp, Homo sapiens
tcctctcaaaccctactgctgctttatcagttatttttatggaataatctaaatcctttgttgtcatttaaacaatcatagaatcttccccgataatagattccatctggagaaaccattttctttgcttatccataagaagcaatttctcctttgttcaagttttatcataggattgtaacaattcagttacctcttcatgctccacttctaatccccttgctatttgcaccatatctgcaattacttcctccgctgaagtcttgaaccctcaaagtcatccatgatggttgcaatccactttttccagacaaactcctgttactattgatattttgacctcgtcttattaatcacagatgtttttaatggcatctagaatagtgaatcctttccataagttttcaatttactttgaccagatccatcagaagaatcactccctgtggcagcccaacaaaatgtatttcttaaataataagacttgaaagttgaaattactgtttgatccatgggggctgtagaatggatggttgtgttagcaggcatgaaaatgacattaatctcgtacatcttcatcagagctcttgagcccgagtgactaggtgcatggtcaatgagcagtaatatttttctgagcgataggtctcaacagtgggcttaaaatatttagtaaactttaagtaattcttaaggactctaggattttttctttttcttttttttgagacggagtctcgctctgtcacccaggtagcctgcaatggtgcagtctcggctcactgcaacctccgcctcctgggttcaagcaattctcctgtctcggcctcctgagtagctgggattacaggcgcctgccacaacatgggctaattttcatatttttagtagagatggggtttcaccatgttggccaggctggggacgatctcctgacctcaggtgatccacccacctcggcgtcccaaagtgctaggattacaggcatgagccaccacacccggcacttttttttcttttgagataagagtctca

SEQ ID NO: 47115 - DNA, 1033 bp, Homo sapiens
tgcttgtcacctggaacagggagacagataagcatgacttttaggccaccttctttcatgtcactgaaggacagtaccacctgtttcaatttacctgcaataaagttttcttttaattccttcaccatgtgactgactttatcccagaaggtttgtttttaatcctcctgcttggccaggaacatccagagaaggctactggattcagttatctttgtctccctatcttagggctattcttactaggctcttttaagttaaagaggtacaaacatctctgtgaaatctttatatattagaataagccctgtatcacctccgtggcttttatctgtcatccatgcccaataataatagacattactggtagaaaggttgtgtattacatttacattttatttttgtaatttcaaattattttagaatagaaaatatattgtgagagcacctaaaatgctcaagaatgttgcttctactaccctctctggaattgtgtgtaagtatttctactccattagtagaatcctgtatctggatttatggaagttcatgatacaaaatcagcacagattggaaggaatttttttctttcaggctggctcatttcacttaattctgaagatgaacatccaaagaccttagaagaactgcattcctactattaaaccaagtactattgtccctgagccatctgggccattgaagtgaatgatctcttttgcaggatgaattttatgtattggctgtcagtattacacctaactaaactataaagctaacttctagatctccattcattacattttgtttcattacaagttcactgaagtaagcaaatgttcatttattttcccaccgcagtggatcctcacaaagctacaagaagcaagagaaccttctccgagcctctgacagagaacactgcctgaagacacacagcaataagtgattacagctcctagactaccttccaaaacctgtttgggaagcatattacagaaatgatttcaagtaccctgtattctggatgcta

SEQ ID NO: 47116 - DNA, 1075 bp, Homo sapiens
actcaaaaaaggaagtctgtttcagaactttagggcctttgaaatatttcctcaagcctatttcatgagatctacttggtttacccaagtcatgtttttaatagactgctaatatcaaaggagaatttttaaagccttaacaatgcctactttccattcactgttaacatggaataaacacaattcccaacatcttagatagtgtattatgcttccaacagacagtccctctcatataaagtttatgtaccctaaaatctaacccaataacctgtcccgttgccaatagattgagaatttctggtttgcttactctacagttattcaaatgagagtcacgcttttaaatttacagctcatcacagaaatcatcagctatacattagtaaaaataaggacatgaggttttctttcttggtttttgtccaagatctttgcaccttaatattaatggactgtttcaggtaaaagagaatgaatgtatgattgtgaactgtgaagagaatgatgcaggatcctatttagttactgaataatacagagtattcaatgcatgttgtatgtgccaccaagttactattaactgtttttggaattgaagactctgtatagtcaatagttgtgaaattcttctcaggctccttaaaccctcgctttgttgtaaaagctaaaataaacagcatgctatattgtaattgtatttcttgctgaccaaatctactaaatgctattgatttctctctgattactaaaacacattgtttattctcagtagtttcccccaaaatgcttttttctttgctgaacttaaattgaatcaaaccacaagtttaaaatcacatgaaagtgtgtttccatgttgacctttgtttaaaaaaaaaaaaaagtgcttattttctctgtcgctaagctcctccagttttgcttttgtcagaattaaacttaacagtagaggtagtcagaaagcttgcatcagactgtcctcatccaaaacgaaatacttcattacccaatgttatgatttcaccattctcagaaaaattacagtcccctgcctccctgggtgtagtgtcgt

SEQ ID NO: 47117 - DNA, 1045 bp, Homo sapiens
ataaattttgcagaagtcgtgttcctgcgataagatacaaagatgtgaccttccagttgtgtaaagctcttaaaggctgtttaagtatatcaagtgtgctaaagaacctggagctaaatggactaattctgagagagagggatttaactattctagcaaaggtaagctttgtctcatttggcttgtagacatttgatagttgcttttagaggaaaaaaaacctcaataacatttttaacttttccccctcattaaagggattgaataaatcggcttctttggtgcacctgtctcttgcaaattgtccaattggagatggaggtttagaaagtgagtttaaatctcatttaactcttgtcctatcaggctggtttcatgtttccctacatgccatgttaattcctgtctgtaccttttttcttactactgcctcatatgcttgttcaaaccttggtccagtctcaagtctaccatgaaagcttggcatgctgaatgtaatctgaactaactttacttaagtttgtgttaaaccacagaccacacaaatatataccatctggtattctctgttttttgtgtttgttcatcttttagagtttttcttcaagaaatatttatgggaaggaaatagcaaaatgtaaagaggccgggcgtggtggctcacgcctgtgatcccagcaatttgggaggccgacgtgggcggatcatgaggtcaggagattgagactgtcctggctaacatggtgaaaccccatctctactaaaaaaatacaaaaaaactcaccaggcatggtggcgggtgcctatagtcccagccactcaggaggctgaggcaggagaatggtgtgaacctgggaggcagaggttgcagtgagccaagatcacaccactgcactctagcctgggcgatagagcaagactccgtctcaaaaaaaaaaaaatcatcattactttaaataattaaaacatatatacaatcaattttaatgcactgtggtatgttccaaaataggaaatataagcaaagtgctgtataggagcatat

SEQ ID NO: 47118 - DNA, 1020 bp, Homo sapiens
aaactattaaggcacttttctgccatcttaaatttacagtcaaatcaaatgtcttttctgtttttgtaaataccgtatgattctttaattttgggtcccagaactgctgattgcaaaccttttattaacatagagtatcttaacaatttccatttaagatgtagccctcataaatgatctgtaactgaaatatagtgtttattctgtctcttttagtaccagtggataacttctccatcagtgaaggaaccatccaaaactgctaaacagaaaaggagaactataattctaggaagtggtcacaaaggaaaagctactattagaattggtaaccttttctgtcttggctttttaatgctactagtgttctagtgtgttaaaattaaaatctcttctcattgtatgatattgacagtaacaaccaatattgactccgtgcatattatgaggtctgtaattgttctgataagattatgagaatttatggaatgtagaaatagtaaatgaatcattaggaaagggatgctagtgcttccatttaaaaaattacccttatttgtttttcatacaatattcatcattttggatatgttttctgattcatgattacttttgatactttgcaattgaaatttgggatgcactttgatgacagttttagcagtgcttttgtatgattttgttgttaatgaagaattatcctttcatacgatagaaaacaaaatttcttcccagttccattttttttcccttgtttcctcctccttccttgcaaattcttacccaaagttgttgaattaggtagcaccttgcttctttcaatgatgaaataaccttaaaatatatgtaatccttataaaacaatactgcaggtaagtttattacccagagatggaacattttagacaaacattccctaaatgtttgctatttatggtttatttaatctgccaaataatagtctagaattttgaaattgtctataattttgtgaccaagaataatgaaaaaagactttat

SEQ ID NO: 47119 - DNA, 1024 bp, Homo sapiens
tgcataaactatagtgctgaggccccagtctttacacttccatttaataacttcacagtttcatatcttcttgagatacttactaatttcaagtcccatcttggtcacaaggagttgtgaattagagaacaattaatatcaccagttaaagaagttagattagaaatctgaaccatcctaaacataagaagtacctgcatcttcagagtcttatcccaaagccgttctgctaaattgttcaattttctccatagcagagctttccaggcccttatttggaagtgatttatctctatgcacagttatgtatggatagtatacataatactagcaagtgttattacctagtgttaactggtggtgtatttacatcaaaatataacttaatttatcgatatctttttaggggtttcccattaatcaaaacacgtgatatatgtaatcagttgcaggtacgtagttaccatgtttataatatgtaggggattggaatgggaagggtggaagatcattctctgtgctctttaaattgaatagagtcgtaagaaacatttccctccctgaagtaaattctttaaaaattttctgggttctcccggtgccacagtataggcgtgtggatatgtcacacaatggaggccttgtggtttcatctgtgtagacaggaagtcatttctctgggtccacaaatcagctgttgcctccagcaaaacaaatttgaccaccatttctcacccgacacatggagctatcatagtcaagaatgtccttaagtttaaaagaaatgttcttgggggatacatattttatatgtatatatatatttccagattctaaagctaaaacaaagcaaccagtcctaaagcctctgctttctcagagcttttctttctcccttgtcaggatcaaacacattccctgtcattctgcatcatggtattagagcaagtgaattctgtcagagtatcagattttccttttcagttgtttttagagaccgtaatttctctgtaaaagatagcac

SEQ ID NO: 47120 - DNA, 1948 bp, Homo sapiens
caaaaaaccccctgtgatgatctactggcatgctattacagctaataaagctgaataaggaggctgtgcacaacaccaacacaccggtatgaaaagtgtgtacaccagcaataaccaattagaaaatgtatgaggaaatagactctcatccacaatagctgcgagaagtaaatattatctagaaataagattaacaagagaaatgtaaggcctatataaataaaaggataaatctatgctagagggtataaaagaaacacaaaaatagaggtatgccatgtataagacccaacataataaatagttctaccaaattaatttataaattcaaagcaatttcatataaccacagtaaagctttttaaatggatgtaataacctgattataacattaatctgaaagtcatcaggcataaagcaattttgattacatctcaaaacaatccatggagttagggtaaatgtgctgttcacacaggaataatcacaggtatagaaccgagaacctaggaacagagcaatgtatatatatatgtatttaaaaaatggcatcacaagtcagtagagaagggtttgaactattcagtaaatgatgttgaggttatttactactttttcttatttcatatcatggatgaaaaaaatcaagatgaattaaacatggaaattaaaaataactagaagaaaatactggaaaaaaattgtaataaatgtgtaagaaaggcattcccaaccaagacacaaaacccagtagccatgaaaaaaaagatagatttgactacatttttaaaaagtaaaacctttcactttttacaaaactttgataaaattagatttcataaataaaggagtgggaaaatacatgtaatagaacagaagatttaagataatataaagagcacctacaaacaacaaaaattggacaaaggctataaaaatattttataaataagaaatacagactataaacataaactttcaacctcgtaagcaatcaggaaaattaaagttaaaatgagatactatttttcaatacattgaaatggcagattattaaagattggtgatagtgctggagataatgtgaggaaaggagtattctcagtcattgtagaaattgatacagcttttggatggacagtttgacagtgtgtatcaacatgtgaaatgtctccagcctttgatctaatgactaattttaggcatccagcctgaagaaatattcacacaagtgcccaaagagtcagatacaagactgtgtgaagtgttttttgagataataaaaaactagaaacagcataaatgtacagaaatgcagaaattgttgaattagtacataccaatttctgacatataacactctgcagcagataaagacaatagctctctagtgtggacatgaaaatatttctaagacattgacaggacgaagaagttgcacagtaaccacgcactcctgtttacatttgtatagttaaaacttgtttacctatacgtagcatatatgcgtgtgtgcaccctagaaaagagtctgtgataacacatatcaagctattgacagcggttttgtctgctgaaggaggaaaaaaggggggcttctcacattttactccatttaattctaggttgtttggtttaaaaaaaaagtttttatgtacaacagacaatttttaaaattccttttcatcatagaaaatgaaaatgtgtactctgttatcctttacgctctgtccatttttttcttcaaaaatgtgtctgacctattatcaatgtgaatgaaaatgagctttgctacataacctcttttcagagctttgtattcctgaagtgttggagtcgcctacatggcatagtcaaatgtttttaacttaaccacaacccacagtaaaaatgaagctttctgcaaagttaaaagtagtagtcctggccccaccttccttgtgtgcac

SEQ ID NO: 47121 - DNA, 1088 bp, Homo sapiens
tccttacctagaagtttgagtaaaggtctcagtaccaaattccattggccagcctggggcaggtactcatccccttgagccagggttgaccacagttgaaccatgtcgactgagagtggcagaggggtaatttcctaaaggaacatcaggctgttgtcactaagaagaggaggaagagcttcaggtcaaacagtaaccctaggctttcaacacagtctccagtaaatagttgtccaaggattgcataaataaatgagtgaattagggaagacaaagtagtattgtaacattaccatatttcttgtagtaaatccacccaagttaaagcacttggtagagcatcacttgttctcaatctttgaccacatgagtttatgtattgactgttacctatgcttctgcccagagctgttccagacaactataaggtgatttttctgcaaggaggtgggtgcggccagttcagtgctgtccccttaaacctcattggcttgaaagcaggaaggtgtgctgactatgtggtgacaggagcttggtcagctaaggccgcagaagaagccaagaagtttgggactataaatatcgttcaccctaaacttgggagttatacaagtaagttctgggagctgagctgggtggtgacgtgctcaatggtgggttaccccgacccagggcaatctgtagttttcaattattttctccccttgacagtgttagttcattaccatttagattgggtggctgtactagctaagactagagcctatgcatactcttactttattttattttctattttttttctagacagagttttgctttgtcacccaggctggagtgcagtggtgcaatctcagctcactgcaacctccgcctcccaggttcaggcgattctcctgcctcagcctcccaagtagctgggattacaggtgctggccaccacgcctggctaatttttgtatttttagtagagacagagtttaaccatgttggccaggctgcttttgaactcctgacctcaggtgatccgcctgcctcggcctcccagagtgctgggattacaggcgtgagccactgtgcctggccta

SEQ ID NO: 47122 - DNA, 1083 bp, Homo sapiens
catggtaagtcctttggaagttgctgctcattatttttgccttacagccactataggaccaacttattatttctctgcagccttgcagagaaagaggtcactcacatttgccgtgcagctgccatgtgttggaagcttcatatatgtagtaccactaaaccgtcacaactagtctgaaatggagatattattattcccagtattcaggtgaggaaactgaggctgatggaaattaagtacaagtcatacaaggggatgataacccactgttccatatgcaagagtttgttttccctaagtaaacaataaatgtgctggggcagattttttgttttttgttttttaaaaaatcttctgcttgcatctaggaagtgttaagaaaaaaaaatctgttgatttgtttatgacaacccatacatttcagaaaagtagctggaataataaacatgtttttcagttgtccagtggagccccaaaatagaagcaagatgaatattccattccgcattggcaatgccaaaggagatgatgctttagaaaaaagatttcttgataaagctcttgaactcaatatgttgtccttgaaagggcataggtgagtacatctgcaatgcacgagcttggcaaagaattagcttagtttttcaaatgcagaataaaacaaatctataggagcctgcttagcttggagtagcagttatgtaatttgttgggccaacccagctgttataaggatgtgccttcttcctgttgtttatggaaccctttgcataattccccagctgagagtataatggagctccatcttccatgagggttttggcaaaattacctttgaaaatctcttacactgctcgtatagcacagaggttgccattccatctctgatgaggccagcaccactctgttctggaggtagagaatcattattattccaactgaacatcaaattagtagctagtcttgcatgctctatgaaaaataaatgtcctcacatgagaatagcagcagggaatgtcctcacatgagaatagcccagccccgatcttgctggcactgtcacgacaggctcatgaatgttga

SEQ ID NO: 47123 - DNA, 1080 bp, Homo sapiens
tccaacttaccttttcttccccacatcttgcttgctttctttgccaagagtgaatagttcgaatgactctaaatgtgagcatggtgaaccttcacagcttaagggagaattttctgatgactgagacgtgtgaagctctgtgccaggtgtcgggagtttttaggtaggagaccggaaatgatggtctcaggtgctgcaactctcaggagccagtggctagaaaaaggtgttttgatgcgaaattagacgtttttgttctcaatgcctggatctttggtcattctaggtctgtgggaggcatccgggcctctctgtataatgctgtcacaattgaagacgttcagaagctggccgccttcatgaaaaaatttttggagatgcatcagctatgaacacatcctaaccaggatatactctgttcttgaacaacatacaaagtttaaagtaacttggggatggctacaaaaagttaacacagtatttttctcaaatgaacatgtttattgcagattcttcttttttgaaagaacaacagcaaaacatccacaactctgtaaagctggtgggacctaatgtcaccttaattctgacttgaactggaagcattttaagaaatcttgttgcttttctaacaaattcccgcgtattttgcctttgctgctactttttctagttagatttcaaacttgcctgtggacttaataatgcaagttgcgattaattatttctggagtcatgggaacacacagcacagagggtaggggggccctctaggtgctgaatctacacatctgtggggtctcctgggttcagcggctgttgattcaaggtcaacattgaccattggaggagtggtttaagagtgccaggcgaagggcaaactgtagatcgatctttatgctgttattacaggagaagtgacatactttatatatgtttatattagcaaggtctgtttttaataccatatactttatatttctatacatttatatttctaataatacagttatcactgatatatgtagacacttttagaatttattaaatccttgaccttgtgcattatagcattccatt

SEQ ID NO: 47124 - DNA, 1026 bp, Homo sapiens
ttttggcagggttaccatggaagtgatactgtgtcctcctcagtgcatcctgggaggaggcacctgatgttggttcgtcttatcggtgatatagtcgctggtgtcttggttcatgtggtgtccacgaggtttctccactatcaagctattacttgtctctttgtagttaataagtgattataaggagatgttttaagactctaaatatcctgagagtcaccaaacaaattgcatagacgttccacaaaaaggataatacaagaggaattatttgatgggaaaggtgaagtgatttattactgcttttctaccagtatttcttgcaacctattcttcctcctcccaaaaaaaaacaccttaaagtataagcaaaagtgtgcaaaagatacactgggaagtcaaaaatcagtagtagtaggacatatattccagcaaccctgagagtaacaaatgcatttgagaatataaatagtctgggcaagtgtgctttttggtgaaccaggaaaggaggaaaagaattccctgatcaaaatatagggactcaacttgtagaattttcattccccgtctggtcaagtttgtttatctctcagtattttcagaagtgcagccctttggcaacaaatacctttaatcgaatagccagatcatgagccatacagcctgattatactttgaaagatatcatataacagcctaaagttaaagctgcctctgatggctctggctcagcagaatagtccccaatagaataataaaatcttggcttccatctagccgggtaaaaagcccaaggcatcttaaatgcctgagaaacgagacttgaagttgaaatctaagaatttacaggtcatttggggggagaaaaaaaaaagattatcttatccagcagagtgaacatcagatagagccgaatcattcctttctgctcccttccccaagtttaaaagcctagtttcttgaggttgaaagtccagggctgaagcagaaatatattcaggagttattgggaaacgacaggtgagc

SEQ ID NO: 47125 - DNA, 1023 bp, Homo sapiens
gtggctgtaagcccagggagatggactttgagcaagtggctgtcaactccatggataggtggaagtgatgaggacacccaagtgagccaaccctgagtcatttatactgatgggcatcatggaggatggaaaaattaacagccacacagagcctcagaggtgtagagacacatatgctgggatccacatgttacacacccaaccttgccctttgcggttctctgttttgattccagtcagctttctgtcctttcatttcttaggaaggtcagtaccagcccagggatagtcccctgattcttcctactgccaagccctagttaaacttcatatccacttccttgggttgccctgtcaatcagtttaacatggggagtgacttcctgccctaggctacctttctggcatccttctttattgatgatcttaatgctgtgttttcttccaaatatgtacaactcatataatgcatgtgtgatcaaaattatacaaagaactaaacatatacttcccattatattctagaggcaccagttggtgttaaattagcttgtttcttcactgctcttattctttggactcttttttcatccaagtctgtttttcttcagatgattgtctgaagaaaatttatatatatttatataatatacataattactataaatatataaaagtatatatttatataaatatagaaaaattttttgagtttggttagatcattatattttaccctcaatttcaatttaccattactctctaataatcattgaagtgctatttttgatatgttcatacagggattcacaataacaaaaatgcttttgaaaaatagtctgtttgcagaggagctcatacagcatattcacatacaagagtgaattctttttgtttgtttgtttgtttttgagacagagtctcactctgtcacccaggctggagtgcagtggcgcgatcttggctcactgcaacctccgcctcccgggtagctgggactacaggtgcccgccaccacgctgg

SEQ ID NO: 47126 - DNA, 1021 bp, Homo sapiens
aatggaagaccatatgtgcttctgcaagatcaaaacacaacgggcctggtttaagactctgtggtggctctgactccgaacttgtgtttattggtttgtgtttctgctttagcgctatcctccccaccatagtctctcccagtcccttacttttttctttcctttccttcaggagttcagggggccggataacttaaaaacttgtgtttggactttgcagagttcctatagtaggcagaggccatgacagagacacattacaggtgtctggaatatgaggcattattgatggtgcctccagaacagagcaattcctttctgcctgcagacttgccttttggaatgtactaattacaagaggttagagatttgggttaaagcaaggatgaaaagcgattttatttggttttctcccctctacccttttatttaaacaaacgaatataggcttttaaaaaagtgagagggcccagtattcactttccctatgtaaagtgagtgaatgaatcagactgctcagttttttttttattattattattgtgggtataagcataaatgaaaaccaaataagttactaataggactgaatgcacagcacatctttcttggagctcaagaaccttgtgaacataaatgcatttatctttgggatgactctttgagaatggtgtctggttaacataataccctctaatttgttatggcctatgcttagcttctttctcttgttcacaggagatcccagatagctctgaacaagctcatgatgaatgccagacctcctgtgagacaaagctttgtaatgggggataaataaaccacacacacttactattgacataaaatgtagttattttcctttgaataaaaaatacgctgtttgtcacaataaaggaagctctaatatagttatgttattttctgaatccttgtttagagcatctaccaggacccgtctgtatagaccatgtgatgtctcattatcagtctgtgtgacaaagctttcatcctgaggtcc

SEQ ID NO: 47127 - DNA, 1033 bp, Homo sapiens
gaactgattaacagcgtttttgcccacagctaacagaatcactatagcaaggggttaggggttgggggatgggggatgagctgatgcaatttggcttatattggggctgggggaaattcttcccaagcaatattccttgctaaacagtgggggagtgatgggaagaaagttatctacagtgtccactatttttaagttacctgttgccatatcattagattttcagcttcttttcagtgtttgaggaaccgaactgaacttcaactaaactgaatttcaaattttctcatgaaagtgcattaatgttggggtctcagaatttttgtctgacatgctcagcagtgagtgctgcttaatggacaaaagcttactaccaaagctaaatgttctagagaatcgatattactacaactgtggagcccttgtttccatacaagtctcttcataaagtaattcatgaattttaagctgctttttccagtccacattgttctagagaatgatagaacaggttagtaggtcactgccaaagttcaagtctgtaaccttttgtctccttctagaagcagtggaacttattcatttatgagttcttaaataattacgtcattaggggtgggtttgtcacaattaagattgatatttgcttgtgttgaggaaactggattttaatcccaaaatttctgtttttgtccttccattttcaatattccattatttcacataattatccaaacaatgtatttaaactgaaccctttctatgtgatcaatattatgctaggtatgctggggaataaaactgatgtaggagagatggctctaagaagtactctgaaccgggtgtggtagctgaagcctgtaatcccagcattttgggaggctgaggcagctggatcacctgaggtcaggagtttgagaccagcctggtcaacatggggaaaccctgtctctactaaaaatacaaaaattaggcatggtggcacgtgcctgtcatcccagctacttgggaggctaaggcaggagaattgctt

SEQ ID NO: 47128 - DNA, 1011 bp, Homo sapiens
cagacactttgcccaatcaaaaatactagtcagctattgccacaataatgctgagttataaaatatccccaaatttgtcccttatagaaaaagcatatattctcaagctcataagtctgggttgactgtgctttggctgttgtaggctgagaagctgtgccttagtcttcaggggcttctgggaatagctacagactgcaggttgggttcaagtcagcttcaggtgtgtttgttctggtgcatgggctcttgggcagcaattactgtagacatctcttttgatggggaatcaatagagagcaagagcaagtcatattaagtcctgtgaccccctaacccccatttcctaacatcccattggccaaaacaagttacatggccaaaccaaacacaagttaggtagagaagtaaactccactcacagtgggaagaggagggcggtgaatgtttattgaacaataattcatctgttactctctcttctccagcatgacctgtaggcaacctagtggtaattgctaggcacagcactccattaatagcattcattaattatgacagggactcaaaagaaatagaagcacaggcacagaacctcagtgttagctggtgttcattacctaactcacggaaggacaggaaatgttcagaagtggaaatcctcagggtctgcttgattcctgttctagttccccactgatctggctgcagtcccaagactctgtctctatctccatatcttctctggccttcttttctcttgggctccattcctctgtcactttccaccttccttttgggtccttgtgtgcccttgactctagagtgatgaccaaaggagtgatcctgggaggaaaaggtgccagggagatatgtgtaatacttgtagttaatgatagctaacattctcagtgctttttaaatgccaagaacagtgctaatggttttatctgtattacctgtcattctcacaatgacctagtgaggtggctgctattacaactcccattt

SEQ ID NO: 47129 - DNA, 1150 bp, Homo sapiens
catatgtctctccccatggtggcatgaaatgtaaggtggatttcacaggactcaagttgagtcagggaatctttaagggggagaaaaatgtcctgggcctctgaaggtaagaatatagtataataagcgtctcagactgaatgcatgcgtgaatcacttggggattttgttagagtaaaaattctgattctgcacatctggggtggggcctgagattccgcatttctgacaaacccccaggtgaggctggcactgctggtctgtgaaccacactttgagtggaaaggattattggtccagacagcaaatcctagacattctgaatgtttaaggtaggtaaacagtagtgatgtttttataattttgttgattctttacactttttttaaaaatcaggatgagaaaatttcttgccaacttgcctcagacaactttttgctgcataaacttcattaaaattttttgtttcccaaattctctgatgacactgaatctagatttaaagtggctgagacagttggccttgggataactttttccaaaacttttatgattggaaacaaccttaaaaagtgtagtcaggactctcaattgtaggaaaggatgttaagcactcagcctactcctggtattaggttagcacacccttcccagcttgaatctttgcctcttcgtttgaagcctcttcctttctcctttcaactcttcagccaacttttaactgtcagaagttcaggacaaaatttgtttttttgttttttttttttctccaagtgatggtccattttatcttcatcagcattgtccatttttcagaataaaccctgttcattttccccaaatttgtttcctcttcctctagtgttaagtatatccctttaaatagctaagtgcttttttctgtaaggcatttgggtcaattattgagggtaaatgagaagaaacaaagaaaagttgagagggaaaaaagtcaatattggattatcctggcggtaacaagatataaaattgctggagagtgaactgtgcatggtgtatgtatatagatgtaggtaaatgacaaagaaattatacagagacatgagcaccacccactgcactgaatcattcctcataccagtgcacagtgcaggaaggtgacaagcctctt

SEQ ID NO: 47130 - DNA, 1019 bp, Homo sapiens
caggtcctccatgccatccctgggtccttcagaggtacctcacagggacccctgtggtatacaaaatcctcatgctgttctgctgttctcttaaatccctcctcaagtcttgcctgtggtgggctaccccacagcctcttagtgctgaggtcttcttgccctggcaggaagctcttttgaattccacaaggacaaataggaccaagtccccttcttagtctgtactgggcccatgggagcccacatatacttgccatgccacatgctaggaggacaagctggaaccctactgtattcagaagtgtatgaatttctgggcttgaggcagcaacaacactgaggtttggtaagcccacatactccaaggaagaaatatctagcttttcctaacattctcgaaatgcatcctattcatgtttgtgactgcaccagggcagactgatgagtttgtttgacttgacctccagccaaggactagaacctcagtcccctcatcctgtagaaatcccatttgggtggatgactcttgcacctgttctccttctcaacaagcctcagactctgcttacacaggttgaatgggatggtgggatccaagcacaggtgtggccacctcttagcaaaacctgcaggaataggtctagcagctcctcttgagaacaaggtggggtacccacagcctattgtacttagctttaccagccttctgagacaataaagaaaacacaaaataatctttctacatagaaaagctgagtaacttttctgattctcaggtctttcctttgcaaaatgagagtaaataaaattctgtgcttgcttcggcagcacatatactaaaattggaatgagagtaaatgaaattctcttgttagtgttgttgcaaagacaagatgatgtatatgaaggtacctgacatatttaatctctctttcaactgttcctccattattcttcttcattcttctttgtttacttttcccactgcttctcctgggtccctaggttgatacgctagg

SEQ ID NO: 47131 - DNA, 1078 bp, Homo sapiens
atggtggccaaatcatgtctacaatgagaaattttaaaatattgaatagatttttgaaaattgaactggcagtcagctggctgtcttactgtcttataaaaataacacccctggatgtcggctgcagtggctcatgcctgtaattccagtatcttggaaggccgaggtaggaagatatctggaagccagttgtttgagaccagcctgggcaatatagcgagaccttgtctctacaaaacatttaaagattatccaggcacagcagtgcgcctgagctgagcctagctacccaggaggctgaggtggaaggatcacttgagccaggagttcaagggtacgtgtgagccgtgatcacaccgctgcactccagtctgtgtgacagagcaagagcctgaattaaaaaaaaaaaaaaagcctattggatatatagctgctgtgtctgggttctgtctctctgtttatgaaggtccattaacttatttcatagtcaaaatccacatgattctctgggacacagggaagaaagatactaaggaggggtagtttcttcttttcctatggttttgtagaatatagagaaagtggattttacttagtaaatgactgaatggtttcatatatcatctcatagaaaaacattaatttttaaattctgctgaagtggcttagattataaacactgctcttgttacttcatatcttgcaagtctcctttagtgctctgttattaaaatattgtgaaagagaaagagcgctgattaaacgtgcctacatggatacatttacattaatgcatgatgattaattataagttaatatgctcattcacaaaaatattttaaggtggcataatgataaggctgcattgataaccttgcacagccccttattaactttatcaaaagccagatatgaggtgacgttaacacattttggagtggcatgccagcaagccaactggctttccgtgagtgtcatactcactttggaccacaagatgccgctcaataatccgttatgatttaggtcttttgttacaagccaaatgacatttccatttattttacatgctctccaa

SEQ ID NO: 47132 - DNA, 1170 bp, Homo sapiens
gacaaagacaccctcccctatgtagacataacatgttgagtgtcataaggaagcatatgtatttgctataaatgtttacaaattcaaaagagaaggggcattgacttgggattataagaaatgaagtgtggaaagatatcatgaaactgtatccacaagcagcatttgtattgcaccttgaaataagggtatgtcggctgggtgcggtggctcatgcctgtaatcccagcactttggggggccgaggcaggcagatcatctgaggtcaggagttcgaaaccagcctggccaacatggtaaaaccccgtctctactaaaaatacataaagtagctggacatggtggtgggcgcctgtaatcccagctactcgggaggctgaggcaggggaattgcttgaacctgggaggtggaggttgcagtgagcagagattgcaccattgtactccagcctggatgaccaagtgagactccatctcaaaaaacaaaataacaaaaaacaaaacaaaacaaacagaaaaagaaataagggtatgtcttcaaagaaggtgggaggagggcattccaaggagaggaaaagatccaagtattcacaattccttccaagcctaagtgtgtgagaatttagaatgtttcactgtggaatatgtgatgatgatgaactggctgaccctctctttaatcttggtatttgcttgctataaatagaaacaaatgggattattgatattcctttttattaaaagttaaagaacagtgggtgggggatagataagtaaattatcatgcaaagaattttgattctagctccagtaagttcttgtcttgcaccatttctttgtcagatgggttgagtgtagggtcctgcttttaccatgcttcgctttccattattcccaatttaaatagatctttcttcctgctgttgagtggggtttgttcaatcttgttgttccatggttgtcctcctctagtacaggacttcttactgtggttaaatttcattgtgttggctttgtctgaacattccatcttaccaagatctctttggatcttgaatctttgatacagcataatactcattcctctcaatgttttgatagtgaaaattttgtaggtgtgttttacatttttatctaaatcattggcaccaagtttcaaaaaagaaccaa

SEQ ID NO: 47133 - DNA, 1034 bp, Homo sapiens
tgtttctttttctgtgagaactattgttacattttggtcatttttttacttgattttttttttgtctatcttattgatgttaagaactctttatattaagcctacttatacatctctgtctctatatctatgtatccatctaaatagctagttgtaaatatagatgccccttttctgtgatgagttgcaaatatctttttccaatttgtgatttatcttttaagattttaaaaatgactttttttgtaccatgtagcatattcagttttgttttcaaatttatcagttattatcttttatggcttctaggttttctattatacttaaaaatctttcttccaattcagagatttaaagatatttagtatgttttatttaatttttaaggtttacaatgttgataattctgaaatctattttggagtaaggtatgaggaataaatctaatttactttttttccagatggctacctaatgtcacaaaccattgattaataatctttactggcttagaattctatctttattatcacataaaatatttacaatgaggaaaaatgaggcaaaaattttgaaaaaatttaatgtaatcacttttaatctctggaagaataagtgaatagctatttctaaaatatttttaaaaacagacagcatttacagataaagataactaattaaaaaaacttaaagagagtgcaaaagttagagtataatcacagagcatcatatctgtatttttcctggtctgctgactcagtctgggctagttgcacaagaatcacatggagaacataaagaaaaggataaggaactctagtttctatggtaggttctaggcatttacattttaaaaaatgctctagataattttgagagtaaagccagattaggaaaccatgggttcacattgtcacagaatagtgttcattctatttttattctgcctattgtgtataaaatcaggatattccttaggaaaaaggtatcagatttatataatttacaactcaagtatgtgtatatgttcattg

SEQ ID NO: 47134 - DNA, 1069 bp, Homo sapiens
tttgctacatggtttagttatgaatagtgtttgtgtacatataaacacagaatatttaagtaatctaaacatatagctctattaggatgatagagggacaggagagaatgagtgtgatgggagctaggagccagagctggtcatacagaggaaagttaatagaagattaaaagtgaaaaatcaagaagcagcaatgcaaggatgttatttaaaaataggtactgaaataatcagttaaaatatataaaaattattgcctttgtggatgaggaaatgatgaggagcctgctgtgtttcataacaaatagtcatttgattctttaaaacatgttaatctataacttcaataaaagtctgtcttaaaatgaaaatcagtgtaatttacctcattaacatcttaaaaattgtatctaccaagaaatgcaagacacatgtttagttacatacaacatttagtaacatctcttagcaaactttcttaatctgataaatggtaatttaaaaggctgtagaaaatattatgtttaatcatgacacaacaaaagcaacatattcaaagccaggacaagtcaaggattccaactgtcaacaactcccctcagtgtagcacaggagatcttagcatgataagacaaagcatgagaatagaaaaggaaaaaaacatatatcattatttgcaggtaataatattgtttatcaagaaaaactcatgtgaatcaaactattcaaactattcagggagttccacaaggctgctagatacaatattcatttaaagacatgaatagaactcctatacaggtagcgtgatgcctccagctttgttcttttggcttaggattgacttggcgatgcgggctcttttttggttccatatgaactttaaagtagttttttccaattctgtgaagaaagtcattggtagcttgatggggatggcattgaatctgtaaatcaccttgggcagtatggccattttcatgatattgattcttcctacccattagcatggaatgttcttccatttgtttgtatcctcttttatttcgtagagcaatggtttatagtt

SEQ ID NO: 47135 - DNA, 1031 bp, Homo sapiens
aacactagaaacatgcaaatatatttctagagacacagtcagagaatcctagatttaggaaaggtagatattagaaattagaaccaaatcatgagcaaggtgaagctcttaaaattgcatttaaatgttaattgcatttaaaatgttaaaatcttaacattgcatgggggaatttcacaactaataatgtttgttgtggtcaattcaactatgagtaaaagtaaaataacattttgatataaattatgtattttaggaaagcagaattctaagataacttgttacagactaacactaagtggccgtgaaacattttgatttctagtatttgattaactttgtctccccaaataagctaaagctggtgccccagccattactgagctgctacttctttgagttcatctgaggagtaaatgaggcaacagaaggctttcctcccacttctgagacagccgtcctggaggatggtgggttctggcctactgtattgcacaggattggggcaggaaagggaacactgaaagagttgcgagacctggtcttgggcagggctgtattcagatttcttatccatcatgtttagagaatgggttgatgtccacagtgatttctctaactagtttcaaactgaactatcaactctttaaaggaagaacatgctcatcctcatattgtaaaaaaaatatttggatctggaaccagagctggggaaacaggatgacaaggatcaatgctacatcgttcactgtcctagtgtagtcatcaatatattggtccctcatctcttttgataagaacctgatattaagtgggctcaagttggttgattcatatgggttaaatggactgttttaaattacgcataaactatacaagccataaaattgcaagagtgagggaaagggtgacttggtgatggaaagaatgctggccaagaagagtagcaggaatctgtgagagtaatttcaagagataaaagcctggaattagttgagactggcagaaagacaggttcataacagaaaatg

SEQ ID NO: 47136 - DNA, 1044 bp, Homo sapiens
tgagagagatatataaacaggaagttcaaaaatccccaaataaatttaacccaaaatggttctctgaggcacattatagttaaaagtcaaagacaaaaacagaattctaaaaacagcaaaagaaaagcatcaagtcacatgtaaggaagtctgcattagactcacagcacatttcttggcacagaaaccttataagccaggaaagaataaagtgatatattcaaagtgctgaaagagaaaacagctttcagaaaaggacactatatctagcaaagttatccatcataaatgaagaacaaataaagtattttgcagacaaacaaaaactgagggaattcatgactagaaatactaaagtgagtcctataactggaagtgaaaagatatctaccatggagaaaacacatgatatattaaactcactgatagagcagatatacaaataagaaagagaaatcaaacattatcactacaatcaccaaactgcaaaaataaagagaaaggatatgcaaaacagaacaattaacaaaataacaggagtaagatcaccagtaacaaccttgaatgtaaaaggtttaaattccccaattaaagacatagatgggttgaatgaattaccaaaaaaagcctagctatatgctacctacaaaaaactcagttcacctgtgaaaggcacatacagactggaaatgaagggattaaggaaaagatattccacaaaaatggaaaccaaaagtgttcaggggtagctatacttaaatcagacaacaaatctaaaaacatagactttgaatctaaaacataaaaggatataagaaaggtcattatgtaatgataaaggggttatgttagcctgttcttacattgctatgaagaaatacctgagactgggcaatttataaagagaagaggtttgactcacagttctgcatttctgtggaggcctcaggaaacttacaatcatggtggaagccaaaggagaagcaggcaccttctttacagggtggcaggatggaatgaatgcaagcaggggaaatgccaaat

SEQ ID NO: 47137 - DNA, 1051 bp, Homo sapiens
ttccagatatcctagggatataaccagcttaaaatatcctttaaaatttgcagtattatttatatgaagtgaaatgcgtagatcttattgtgcagttcaataagttttgacaaatgtatacatttatgaaactcttacccttgtcaaaataaatatctcggctgggtgcagtggctcacacctgtaatcccagcactttgggaggctgaagtggggcggatcacgaggtcaggagatcgagaccatcctggctaacatggtgaaaccccgtctctactaaaaatacaaaaaattagccgggcgtggtggcgggcacctgtggtccctgaggcaggagagtggcgtgaacccaggaaggcggagcttgcagtgagccgagatcacgccgttgcactccagcctgggcaacagagcaacactccgtctcaaaaaaaaaaataaataaataaaataaataaataaataaataaatatctccatcatcctagaaagtttattcatgcccctatgaaacaggtcgtctcatcactgttcagcttgctatctcacctacggtagtttttcctgttctagaatttcctaagtggaatcgtatattatgtactattttatgtctggcttatttcactcagcatgtttttcagatttacccatgttgatagatgtattgatggttaagttttgttttttattgctgaggggtccactgtatgggtatgccacaatttgtcctttcacctgttcgtagatgttatggttattatcagtttttggttgttatgattaaactggttattatgaacattggtatacacatttttgggtggatatgttgtatttatttttgggaaaatacctaaaagtggaattgttgggccatttggtaaatgtatgtttaactcctcaaagtaaactttcagttttctacaggactgtacaattttaaattcccaccaccaaagtatgagtgtttcagttattctgtatccttactaacgcttgatattttaaattttagccatcctaattattatttattgtagttttacat

SEQ ID NO: 47138 - DNA, 1024 bp, Homo sapiens
agttgagctgaagtctcagatatttttattttaaccttagattaaactctaactgggctttggaatgccagccctgtggaatgagtgggtctctaaaataccttagattttgagcccttctttcattgcttactttctcgcaaaatgcaaagtggaacatgagtaatgcgtatggataaattgtcaggtgttgtgatttgcactcagcttctagactcaaatccatcttgccagctcacgctgtcatctaaggctctgcttgtttcttactgctgcaaagtcttccattctttgtgaggtatgttcctccatctaatgatatctacatacttttcctccccacccccaaggtataggagttgccacagctgtccctaaacctatgaagagctcatttctctcttgaatttagtttaggaaggcttcttggtattcacttttctttatcattcctatagagaaatggtctttcattttctgggctttctttggtgtcctaaatcttaactggacttagaacaactttgaataagatatatacttcagaagagaagtcagaagctcatagtgtttatccgggggaatgccatatcaggtgtaccaattattagggggactagccagttgctgaaacccccaatcatgattggtattaccataaagacgattataacgaatgcatgggaggtaacaataacattgtagatctggtcatctcctagcagagttcctggttggcctaattctgctcgaattagaaggcttaaggccgtgcctactatccccgttcatgtggcaaatagcaggtgtagtgttccagtatctttgtggttagttgaaaacaatcaacgattgatgaacataagtgggaaaaaaatgtaaaatggctgagtaaacattagactgtaaatttaaagacagaggtcaaggcctttttatcagccctgaggtgatttctcatgttgagttataaattcaaaggagcagcttcagtcctgccggagcttctctggcctttctcccc

SEQ ID NO: 47139 - DNA, 1060 bp, Homo sapiens
agatagtctgagaagcactgatcaagacagttttttaaagaaatggcatttaaagtacgatgtgcatcatgttagaaaatatcaagctgtttttcctgttcacaaaataaatccaagcataattacctcaaacacatttgtaaaatggctttcaaaaacagacatttgaagaaactcattgggtcaaagtttagagaatctgaaaaaaagtcttttatcgtgaactgtagctgtaactaagactacagtgtatgtggaaaggtagatcgtactgttctgattcttcaggccctccctgtattcaaaggatgcacccatgccctttgccatgtgagtttgcacttgctaccactaaatgtcaagtgttaccctacctcgttgatgtcgggcttcaccaaatgacttgcactggccagtagaatatgggcagacatgccagtgttccggtctctgtgacaaagcctcagaggcattgtgtatttcttgtgtctgtcttcagtttgtgtgaccactgtagaaggacatgcttcagctgtctgctgccccttgagggtaggtcccagaatatgacacgtggagcagaactaaacctgatccaaggcttagagccaagtccaccacactgcagcctgaagtactcatcaaagccaacccacagaccaataagccagaaaaagatctgcctgttgttgtaggccacctagttatggggtggttcgttatggagcattatcacagcagtaggtgaacagcacagttgggttataatacatgctatagttacggatggtatttgatttactattccagcctggacacctcttctaagtggcattctcatgtatgcaactgcctatttgacatgccaactttggtctccaataggcaactcaaatgtaacacattcaaacatgcactcttgattcccctccccacaaccccaaactacttcactgcttggtaaatggcaaatctcttctatcacttgctcagaccaagatccttggaatcatcattgatttctcactttttttttcacatttcacatctagtgggatgg

SEQ ID NO: 47140 - DNA, 1038 bp, Homo sapiens
cctgagacacagctatggcttctctttgtaagtgcctattaaatgtttcttcctaagaagctggatttgtcagtttctttcttcggcctctcagcttcctcagcctttgggagtagatttgcatagagctgcccattgcggaacactaagccaggaaataaagagaactagaaaccaaacaaatagtaaaggcaaaataagatggcaggtggacttctgggcaattattgaagtagcgattacacacctgatttcaacagaggaaaaaagagtaaaataaaattagactttatagttacactcatgacaactccaggcacagctcagctcatccttagtgtagctttgcaacaggcccaccccaactccaaagaacctagagcaagagtataaatggagatctaaatactcaaaagtcctacatcaaactcacaagttgataaaatattcttctatccttctgtctttcttgtttcttgacacaaatacttttataatatcctagaagaccagcttcaaaagtagaattcttggacttctgtgccagaatatggctatgtaaggagaacagcccccataccttgctaactcctgttcacttcccactctgctttgtcctgctctgcaaggggctttgcgtacacatgtgtggatactccagcctgcatgttcaagctctctctacatccccagaaaacaactatttcctctttatatcttgggcctaaggtgtgcctattggcatggtctgtacttagaaagatcgttgagggaaggtttggagcagttggaaggtgtttgggcaggagactccctctgttagatcaaaaggggctcagttagtttctgctagtgtggagataaatcatattatggctaggggccatgatggtaggagcagtcatagtaattcttgctccagtaagagtaagtaatcccagggctccggatgctgagttcatggtcttgaatgggggcagggcagaggctctgggtgggcatgagccctttgccttgcagacttctcccttgtgtagg

SEQ ID NO: 47141 - DNA, 1046 bp, Homo sapiens
gtttggcacattttttactttgtcacttaccatcgagattttgtacatagaaaaaaaaattgataaatgcccttgaaaacatgagaatgtgtagattttctgtcttgacaaattcttccccccttcccacttagtctcacaaatcaggcagtctctgtattctataaaatgtaaagtttagttggatgacttttcataaacttcatttttaacacatttcttctcttgtatttctataatatatgcaaaatgccaagctcctcaaaagaactttacaggtcattttcctgccataatagtcgaatcagcagcaaatgcacttcatggtttaaatgcagtgacagaagtagtctgacagcagaaatacgtactggatagtaacttccacaaaagccttgagattttcacatgagtagagattatagctttggaaatcgctttttcttttctttctttctttttttttttaaagatcggtcctgtgtaaatatggacaaagaacgtttattggctctgtactaccaagtgtccttgacctagtgacattattgatttcccaccattgtctttatatgtattggtccaagaggacagaaccataatagttgcctacttcaacaattaattttgatctctatgtaatgagcctcatagaagcccttgaaagaataacttttaggtcagtgtgtgagcatgcacgcgtgcgcgcgcgcgcgcgcacacacacacacacacacgtgcacacacacgggaacatgatgcctcttattttttcaaaccagaaattaggtcacctggtctgctaaaagatttttgcactgatctgtgaatctcttggatatgaaaagagtggcacaataaaacaaaattatttggggttattaatgtaatgttacctttattgtaaagaataaaattaaatgaaattgcagtggttgtacaaaattggagatgcttatttactcattggtggtgaaataaaactaccccctctgtctaaatataaaaagtgctttggtcactggagctcatgctgtgttctcagt

SEQ ID NO: 47142 - DNA, 1018 bp, Homo sapiens
gctttcttttcctctcttggcttgcagaaaaacaaatgctaacagaaaacaaagaatgcttcctttattgcttgggtgatgaaagccaacatcaaagttgatgaagaaacagattggacttgtttaggtgtattctgaatttcttgctaaatcattatctaacataacccccccattgaaacttctagtaatccttgctttcaatcttctgtgaacagtaagacttcctgcatgctctagcagttctggattgggcatgtggagtaggaggttctgggctgacaagaactaaattccaggatcactagtaggtttttgtttcccttttgtaacacagagccccgtggtgtccttggttcctcagattattcaccttatctgtgatatcttgactttctaccttgcctaagtgccttgaccttaaaagtagtctatggaccttatcaaactttcttctctaacctaactattgggctatttcctttgtttcacttccaggacaaaaggggaacataccccagaccctcagacaggctggggataatgttacaaatgtgcaaaaactaggaagtactcatgctagcttctccccatttccagctttggggcaataagtaggaatagcaactaaaatgaatgcacaaaccatccagtgcaattgtgttaacaccaacaaaagtctagctgaattaaataagtactcctagagtaaaagcaactttccttcctctggaagccctcctagattattacaaagagaattttgaaggagatggacttggcaatgctgttcatctcatacgtttgttggcaaaataaatccacaacacaccacattgttgttaaatagaatgaatattacaaagccaatttaaatctggaataaaactatttaaaaggatgatcatttaatagctcttgaaagcaagtaactactttctctgtggcatagtagaagaactcatttgagggaagtgaagactgtgttagaatatctgggccttcctcagaatttctg

SEQ ID NO: 47143 - DNA, 1037 bp, Homo sapiens
agtcccagctgctttatctctttcctgtgcaagctgattccaggttggccagtgattttcttctctgcctgtctccattctggagttcccatatcaccctctggtcctgcttgccctagagcccttttctctgattcctctgggtaaaaagattagttttttgtaaccagagttttagccaccactgcaactattgctgaccacatggcaaagttgtaaaaatataaaaaaatgcattctatgcagggccctttctctaagtttccaactccccttcaaaatattgttgcttttagtcccagcaccctctaggtcactccagatcctcccaatccttctattagttattttttggatttttccagggttgataactgttatttgtaggaggattgctatgttaggagctcatgctttgtaccagaaatgtgtacattttctttagagaaagaaaaaatcttacagaagtattaaaacaaatcatagctagttagctctgtattattttatatacacttgagtttgtcaagcacaattcaggaagtgtgttctccttacatataaatgaccacaagttgtagattgtccattgctctggaaattcaataatttctacgtctggatggttcagacctctagatagcagtgtgcttgcttgaagctactactgtgactgttcaaagtggaaggttctttggtaattttgcaaatggatgaaaatactagtgggctttctttgaactcaccctggtattaattgcccttatttctgaaagcagcaggggagagggaagttggcaaggaagagaagaagcagccaacattgacttctctttctctgtgctctagtgaataaaggatgaaacattcacagagagatgaaaatcttttggtttgccctgaatcaagccagcatgcttgatgactcagggaaggcattgatgggtacgatgttagaagaagaaagaaacagcaagcataggttatgaacatattgttctgcctgtaaaatagccacttgtctacttgccctgtac

SEQ ID NO: 47144 - DNA, 1034 bp, Homo sapiens
aaatgccttctcttatataggggttgactttgatgtctaatgctgtcaatatcctgtcagtccctgaaggtgaattttctactcaattcctttcaaaatcatttcccttctgggcagaaattatcataaatgtagcaatttattcttgctatgccctgagaattaactcagggtaagttgaacttgcagcgccagagtcaggctctgacagaacacatctgtttggtgccagcagctgtagctttggtcatagaactcattttcaaagtgtgaacaggaaagaattgggtcgggtttttttttgtttgtttgtttatctgtttggctttaatgatgtccacaaaaagaaaagatggaagaaaatatgctactggtattgcctctgttacttctataattctgaagcaccttattacagtaaattaagtaaaattcagaaggaaaagcaaaatataaatctgttttttaaaataactgctgcaggttaaacacaacacaactctctttgtagaactgagatgaaaagtcactacctagaaccataactaactacagtgtcttttgcatcattcatctctagagagatggcctttaaaaatatatataattgcttgttaactcactttaagagcaatctgaaatggagggagaggaggaggaaacttctgaagcataaagaagcaactccctgggttgatttcctcctaatggccatggctttctttcagagatactttttctgtacatcatgcttgcacattttgattttacaagtgacacaagcttttcatacctccaataggagcatgtctgaaaaagtacaaagtccactcttcctagatgctcctttatctatcccaacaacacctgaagcttctaatacaatgatgagaaagcttgcattttatttctgtcttaagagagtttaaaatgaatccagattatacttttcactgttttcatttccttcctagagatttgaaaattctgagatagaaatttcagaattgtttaaaattaaaggtaagaaaaat

SEQ ID NO: 47145 - DNA, 1050 bp, Homo sapiens
caaaaagatttggtatatattgttttcaacctgattatgataactttactttggcactttctctcagcttttttattatctagtttcaagccctcaaagttccacttgttaaatacatttttagtattatttacaaagttactataaattccatgcgattgaaatcactacagttgaaactttcattattatcatagcaggtaatatctgctcatctctgtcatgctgaaaatatctccctttcctaatagccagaaaatatctttctcttgctctctttgccttttaagtgaacagatttgatgtcactatgttattatcactttccttctggcatcattatctcaggttttcccttagtttatgaactgattttattttgtgaagtgcaagctgcacaaattaaatatattaacattatttaaagtcatattgtatttctaggtggatcttttactgatagaaataggtgaaaaatcttgataatcaggtatgtttggactgacggaaagagaactcgaagcgatagagaacaggtgaagttgtaagggtttactgctaggctttcattcaatagttaaggttttacttctagtactatttgaaaggtaggcatttcagtctaggatttcatgatcctacagtttatgagcgagaaagtattccaatggtctatgtctgcttctgtctttagttgtccagcgtatttagatgatatcgcctgaatccacacaggaagacatatatctagggattaccaactcacaattgggtccatagattatgaggacaataaaaaagacaatggctgcacatgaatggatccatgtggaataaaatatgctataccatcacattacagatagttctgtataaatatcatgtgcaaatattttactaaatttactactatagatgaaacatacaagaaaaatagcagtgatctgagtcattactatgggataaaatgatatgcactaattttcatcttgagctaaaattcaagacactataatagcttttaatattctttcctaaatatatgggtat

SEQ ID NO: 47146 - DNA, 1049 bp, Homo sapiens
taagttatgcttaaattgacatataattaggaaataactattaactagaaaaaaaatcagagagaagagcattccaggcagaagtaacagcataggaaaatgcactgttgcagccaaggcacggaaaatatagtggactgaaagaaaaccagtgggaatggagtggaaaaaaacaagagaacaagtgctatgagttgacagaataggtacaggtgaggccatataggagacaaaggctattggaaggggctttgtctttactttatagaaagggatactgtattagtttcctattgctgctataaaaaattagcacaaacttagtggcttaaaacaacacgaatatattctctgattatagttctggaagtcagaagtctaagatcagtttcactgggttaatatcaaagtgttggcaaagctggttcttctcaaggcactgaggagaggacctgtttccttactttttcggcttctagtggccacctgtatcttttgacttgcgcctcattctctgtcttcaaagtgcgtcatcccaatctctgattctgtcatcacagcaccttctgctttgaccctgaactcgcctgtctcttttttataaggaccattgtgagtctatcaggcccatccagatgatacgtgataatctacccatccaaagttcctaattaatcacaattgcaaagtctcttttgccatataaggtagcattttgtttctgaagattaggacatggacataatgggggggctggtattcagcctaccgcagaagccattgaatttgttcaagcagggaaaagggcacgttcagatttgtgtttttaaaagattctccagttttcttgtaaaggatgaatagaaagagggccaagtatgtttgtgaaccagtttgggaggccaatgctgggttctggcaagggaagcagaaaaataacttcgtaacaaagaagggaaaataacattttggctaaaagaatgcaagactgttagaggtaaaaagaagtttagagaacactatcagtgctgtactgggtctggtttggt

SEQ ID NO: 47147 - DNA, 1041 bp, Homo sapiens
ctgcaacctctgcctcccgggttcaagcgattctcctgcctcagcctcctgagtagctgggattataggtgcacgccaccatgcccggctaattttttgtatttttagaagagacagcgtttcactgcgttagccaggatggcctcgatcttctgaccttgtgatccacccacctcggcctcccaaaatgctgggattacaggcgtgagcctccgcgcccagggcatatttttattgttttaatctttttaaatgtattgacacattttgtggcttaatatatattctaccctgagaatgctccatgtgcacttgagaagaatgtttatttgctgttgatgaataaagtgttttataattgtctgttaggtctacttggcttatagtgttgtgcaagtctcctattgcatcattgatcttctatctagtcgtcgtttctattattgaaagtggaatattgcagtccccacatattactgttgaattttatcctttcagttctgttagtgtttctccttgtattttgaggctctgttgttagatgtgtgtatgtttacaattgttatattatatattaacccctttaacattatataaagtcctttgtctcttgtaacagttttttacttaaagtctattctgtctggtgttagtatagccactccagctcacttttggttattgtttgtacagaatatatttttccatcttttcacttgaagcctatttgtgcctttgaatctattgttaagtctctcatagaaagcatacacttggttcatgtttgtttttttaaaaaattaattgttccaacctttgctttttgatggaaactcttaatccatttacatgtaattttttttaacttttattttaaggggtacatgagcagattcgttacataggtgaacttgtgtcatggagatttgttgaatagattattttgtcaccaggtattaagcctagtacccacttagttacttttcctgatcctctccctcctaacgccctccaccctctgagagtgtgtgctgttcccct

SEQ ID NO: 47148 - DNA, 1034 bp, Homo sapiens
tttttcatagagcgaagttttaaattttaataaattctaacttatcagttacgtctcatgtattgtgcctttagtgttgtatgtatctgaaatgtcatcactaatcccaacatcatctagattttctctgatgctatcttctaggagttttatagctttcattttacatttaggtctacgatccatttttgagctaattttcgtgacaggtgggggtaaaatctctgtacagatgcacttttgacatgtggatgtccaaatgttctaggattatttcttgaaaaaactattttttctctattgtattactttttcttctttgccaaagatcagatgactaaatttttgtgtatctatttatgggctcccagttctgttttattgatctatttttccattcttttaccagtcacattgtcttgattaccatttatagtaaatcttaaagtcaagtggagtttgtttttcaactttgtcaggtacaccccttcctctgatctggttgttctctctacctatatcactcttcctacagatgtccacttgcctgattctcttctttattttcttcttccttcttcgagccccaccactagccccagatggtcccgctgatgataaaactgaaagtaatacatcacattttctttgacctctccaaccatgtgttgtgaaaacgtagtttcctttgcatgtggtctcccatttttgagatctgtctaggtcacgtgatccatccgttgcttcagtaatcagttaagaggatgttaccgtttaaatgtaatcagtgtagcaaggggtagctgtaggaagtttgcacagaaaaagagggctgacttattacccaggatatgtgtctcatccctgtacaatgactggaattactttgctctgacagacaaagacaaggttattcctacctcagtatgactattgactatgaacctttcacagacaatttaatcagcacctcaacctagaaaaagtcccagccattcatggacctgacctaatacactgcacagagaaaagaa

SEQ ID NO: 47149 - DNA, 1035 bp, Homo sapiens
taaaaccattataaaatactaagaaatgtcacatcataccaagagtaagaaagatctaattcacaaaaatgatcccattctgccacccttgaaaagactatctggttatctaaacaagttgactctagaaagaccataggcatattttccctgaattgtataagaaggttttcaatagtgtactatacaaggggtaacctatcaagtgattattaaacttggaaagcgaacacagaccttggcccattaagtacagccccatgggctgcatcagacagaaggagccagccaaatgccactgagcaatccatttgaggaacaatttgattctctcatggattaatgaggtagggaaaaaaaagaaaagaaagaaaaagaacaggcagtaaagtcatcccatttgcagatgatgaaatatggggagagcatgttaaggagagaaggccacatcatttatctcagtggggagagctccatcgtggctgcatttttcagtcatgtggtactgtgcattggggctttccaattcctcctgacaaatttgctttttctttaataatacattgggtttgtggaatgcttttcttcctaacagcataaagtacttttgatggattttatttcatttatcctcatcaaaatctgtgagttttcaaaggccaggtaaacttatctttttttttttttttttttttttttttttttgagacagagccttgctctgtcgcccaggctggagtagtgcagtggtgtaatctcggctcactgcaagctccgcctcccaggttcatgccattctcttgcctcagcctcctgagtagctaggactacaggctcccgccaccacacccagctaattttctgtatttttagtagagacagggtttcaccgtgtgagccaggatggtctcaatctcctgaccttgtgatccacctgcctcagcctcccagagtgctgggattacaggcgtgagccacagcacccggccaaaacttatctattttacaggcaaagaagagagttgtatgaaggtc

SEQ ID NO: 47150 - DNA, 1047 bp, Homo sapiens
agcctgggaaggaggcgtggctggaactgaaagccaaggtctaacatgactgtagtctttattggtctttttgtcatacttaaacacataaaaaatacttgtttcagctcttccaacctacaggtcaatgatcctaagtaataacaataacatttatatgattctttatgacttccaggatgttatgtcatttgatacaataatgtctaggataagctctacattaagaggatgctgagtgttcactgatggcagaagcttttgcagacacctggttcttttgacacagacaaaagaaagaaatcacttttccattggcagagtacatgtgtttggtgtggggcactgccccatggaactgttcatcttcttcttttagtgtgtttgtacaaggtgggaggggtgagaggctctcagtcctctcctcattgagaggaggagagaactcatgatttaaaatgtctttctagtctttggtttgttttttctctaaggaaatcaagagatctaaatgccctgtaagaaatctgattcagatcgggtgttgggaatgatgactgtaagatgtaaactgcattctgtgaaaaaagaagtgacattatcttgagggatttctggacaatttgtagaccatgctgtcggagggtaactctaactccattttgcctaagttgaggagacatgcatggagtgtatagactcatgagtctgccaccaaatggggataacactcaagggaacgtttgtggcggagcctgagcgccatcctccaccatggcaagattggattaggtgccctgttgtgtctccctttagcacacgacacttacctcagacacaacatttgtcacacttttaaataactgtctgtttagttgtctgtgatggttaatattaggtgtcaacttgatggtgttgagggatgccaaatggctggtgaagcattgtgtcagggtgtgtttttcagggtgttgccaggggagactgacattcgagtcagtggactgggagaggaagatccactcttaagggtactgtccaatctgt

SEQ ID NO: 47151 - DNA, 1450 bp, Homo sapiens
ttatattggtttgaggaatgttgtagtctcctgtataactgatgtgttctgccagaatttctatgccagttatactacacgttcaaaaaaccagatctgcttttacagaagtattatgaagcatatttttatgattgtccaagaaagctccagaataacccactcatttatttttctatctagcttttttgctttgaatgtgtgaatatgagcagtacactaacaaatcagaaatcaaactctaagtagcatcaccttttccaaccttcctttcaaaacatcagcgtttgtataaggcattctttgctgttaacttgcctgctgtgcttaggaattaagagtccgtaggataccaaattttcatcagacttttttgatgcatctgcttgggatgtataaagaaactggagatgttaagaatgctgtgtttgaatttaatttttcttagttttgtgtgttttctcttagaatttgtgtcttaaggtggttaaagatagtgatgggctcttgatttattggcataggttatatgaagatactggtttaggtgaggcttttatgtttgtttcagatttacttggggcattttgaacaaactagggagattgtttgatgaaagtcatgcatttaattgcttttccttctttgacagtattatgaaatgtcctatgggttgaatatagaaatgcacaagcaggtaagttatttctttataaccattttaaatgacagtaatactgggacactatgaaaagaaaattgtatgttttgcagttttattctgcaagccgttgtggctacctgtatttaaaagtctgggtagtgaagaaaatgctgttttttcatgtgtggctccccatctttctttcatattatcctaatttttataatttaaaaatgttattttaaaaagtctgaatacatattaaactctgtacactttcaaaagcaggatgctaaattttaaaatcctcttgttattcttctgaaagagttgctttatgtattttgggcattgcaaacttgtcttgtgaaagagcttttcttggaaaatattaaacagtaaaattaaattgtgtggcgccttcgttggcttgatgtgaaagaatggatagagggtgagctgggaggatgaaaatgaaatctgtggagctacaaaagaaattgatgtaaaatccttgtactggtcccctgaggctacttagttgggtcttaccaagaactataaccgttacttccaaaatttgtacagagtaaatgagcctgataggaggatgtgataaggttcaacattgggtcttgaaatctagcaattagttcagtagcaaaaaaaaaaaaaaatgattagtcagaaagcactgagagatacgactcaaacagtcttctttttgtgcaggagactgaataaaatggtttggcttaaatttcctagacagaagaataatagcgg

SEQ ID NO: 47152 - DNA, 1084 bp, Homo sapiens
tgtgttgtctactagtttgtggaaaagtgacacttggaaagaggaagcaaaagcaaccgaacttgctgtgcctttgaggaacaagttagtatagctaaagtagaatgtatgtattttagtatgttgagtctgcctttttaaagatgaaaacatgaatcattccaaacagaatttaaaattcagtttgaacgtcactgtatcactagtcagtgtttatctgaataattcttttactattaataggtctgtgtacctgtggtttgaatgaatgtggagcaatatcgatcttgactatattgtgtgtttagctaacttccctgcaaatcagtaaaaaatgcaaggttttagttcttttcaagggacaaggaattttgaaaatgtcttaattttttttattagtagagatagtataacgttgttgaaagaatagtaatcataacagtaagcaattttagattgcttatagtgtcgataatatttcacttattcttacaacaatcttatgagattatagtagtagtattatttccattttacgtatgttggggctgagacacagagagcttaaatagcttgcttgaaatcagctagccggtaaaatagatcttgggtttgactcaaggtcagaacgctggtatgacagatatttctgccttattccagttgatatgtttggaatactccaccatcagcatacttactaccttcccccaaatgcttgactgattccggagcctcagattctagttctggccttgctagtcaccagctttgtgatattgctgagtaccgtacctttaagggccatgcttttctcatctttaacttagggcgtaagtgaacgcccagatctcttttagctcttttggttaaaatgaccatttcagtttggtttgttgctgtgatccagtgaacagaaattgaatttttttttttcagtcttagaaagtctcttttagcacttattttcagaatttttaaaatccaaagttacccaatgtgcctaggagtagaaatgtatatttatatactattaatactttattttttataaggtactttctcatccttttttttcatgtaa

SEQ ID NO: 47153 - DNA, 1050 bp, Homo sapiens
aaagaaaattgtgtgacttctgaaattgtatgaattataaagtgatccaataattttcttccaaagatgtgcaaagggactatgtagcagtttattacctgttgtgtaattagctccgggggttactcttctagaatctaaggtaggtgtcagtttctctagcttgaggtaaagcgtgtctgtaaactgtggcttacagtgagcttgacatctcaagtcctcaggactttcttgctttgtcccatcaaggaccctttccttagggaagataaattcattgtaaataaatgacttaatcataagtagaagaagggagaaatgtttaatcttggccttttggagtttataaatcaaagacacagtagagatcaagttccttcattaaagtgtagttccaaaaaggaagaatgtggttttggttttaaaaaatttttttatttttaatttttaagagtacatagtaggtgtatgtatttatggggtaaatgaactattttgataccggcatatagcatataataatcacattcgggtaaatggactacccatcaactcaagcatttccctttttttgtgtgggttagaaactttctagttatactcttttagttacttttaaatgtacaataaattattgttgactgtagtcactctgttatgctatcaaacactataccttattcattctgactatatttttgtttacagaagaatatgttttgttcactgctggtaccactagcacctaaaacaatgcctggaatatagtagaagaaatgaatgaatgaatgatggaacagctaaaggagtggtttaattttttcattttattgcatttcatgtagcatcacatattctgagtatcagccacctttatataagctgtcttcgtttctgagtgcttagggagggcctggctttatgctgagcaaaaaaggcctagataggcaatcagagagtgggagttcttatctcagtctgctacaggtccttgagctgctgattggcatttttaaaatttagaattggattcatactttgccagatgat

SEQ ID NO: 47154 - DNA, 1010 bp, Homo sapiens
cagttgtgccttaactgctgaccaggcagaggcatccctgtgtctccatcatatatgctgtgtctgatggagatcatgtcacccaaatgaaaaaatacttttctagtctaggttcaaagggtgatacataaaatacataccacaaaaaattaatgatacaatgaaacctcagatctttaaaattattattgacttattggtaactttacagtttcttcaactccttataggcaatacgatcctaaatatttttaaaaatctagtcctaattcagccagtaacttcctgtgacattggtaaattatttaacttttctgagtctcagttcctcatccataaaacaagggtctaggactggatttttactttttataacatgttggttcccaggcccctgatctgggccttaggcatcagtatttttctaaaagctacagaggtgattttgatgtacagcaaggttgaggaccagcgaactagagcagtgctgctcaaaattcaatgtgcatacaaatcactgaaatcagattctgtttctgtaggtctgggttggtgcatgatactctccatttctaacaaaaagatcaggtgatactgatactgctggtccactgaccacattttgagtagcaaggagccaaaacatctccaaaatgtcttccatttctacattgtatctccatggtatagtttatatagttcatgaagtctgtgtgctgcttgaatgagatctcacatttagtatgttaagattgatagtgtattatcttattatctgcacaacctctctttgcttaagctccatccagactcatgcatctttatttttgtttttgttttgtatttttttttttgggagattcatgcatctttgaaacaattcctcatattgaagtcattttaatagtaccttgctttagacagcctgacagctctagctggtggctggtgggttgttatatttgctgtagagaagagggttttcatttctttcttcttcgttcactcca

SEQ ID NO: 47155 - DNA, 1024 bp, Homo sapiens
attttgttttaattttgttctcatgcatgtacattctctgcagaaaatttattaagcgtaagtttaagggagcaaaactccaacttaaagctcaaacatacttaagctgtaacattttttaactctgtactttaaccatatcacttggcaattgtttttagaaataagaaaatactatttatagtttgtggttctttatttttgtttgctgcagctcaatctcacattggcaggcatcatgacccagtagaaagacccctgaatggtagtgtctggagagctgatattctaagccttcacccacccttaagtagtttttgcaactgtagacacttgggttctgtaagtaaaccagggaagagattaaggaatgctccatttcttagggctgtgttggagaatttggttaccttggaagaacatacctatcacctaaagtctaaggcaataagaaattatagtttgcgattggggaatgttgcttcggagcagtgacactcagagagtggtccatggactggtgcaggtctgtgaactatttcttaaagatgggtgaatgagataaggtacttgttacttgtgcaaaaattaactcactgttttcttcatagagaatgtctttatttttaaaaaacaaaacaaaaaactccattgaactaaacgtagttaaccgttatctttttgctgatcggtaacaatgtgggaactagctactttctgctttagaatacttaatcggtcaaaagttgtatcaggttattttataatttaagaatagaccaaagtagaagttcataaaatgtagcctaaaaaataaaaaagtaaatttaaaggcaagttaggttaaagataagaatcaaattcaaggtggtctggacgtatgtagcatagttaagtccaaggcagttaacacaggttcacaagtagtagcttcttacagaagctgtaagaagcactgcagtttgtgctttggttaatgcaaaacttgtttaaattcttctgagtgcttctaaattatctgaga

SEQ ID NO: 47156 - DNA, 1050 bp, Homo sapiens
gcttgttaactttgcgaggaatcaatggcttgtgataacaggtttgatataggagagcatggttaaaattgcagagatcccctggcaagtatgcagtgacatccctaagaccatcttcagaaagtgcttgtgttaagtgccagcagcctgcacagggcacgtctgcttcccagttggagccattttgtcagtcttggtaatatgttatgacagtgccatatatcggaagaatgtcctaaaatgaataatagacatggattggggcttctggggatttggcccagttttctgattttcacattaggttgtgggcatgggtaacttttcatttaaaaaatatatattttctcataatactgaatgagccatcagagagcgtaattctgtcccatattccgtggttgactgattggcttgctgtacctgaccatgtattttggtgacagttggctgcttggtgagattcatctggtggcatcatggcctgtttgacctcaagaagtgaaagatgattctcaggaggtagaacttttttcctgtggtttaaatgtgggtctctatccaaaggcagcaatgccaacctttatctgtatgtctcaacaaattaatgagtgtttgagaactgactcatttatttgacttttagttaggtagtgattagattattattagtggagctaagtttgaaggtaccttgagtagagctgcattgtccaatacagtagtagctatgtaaagttgaataaaattaaaagttcagtttcttagttactctagctacatttcaagtgctcagtatccactcatatgtggctagtggctgtcatattattagcacagatacagaacatttccaacattgcccaaagttctgttggacagcagtgaatttgtagagcttacctatccgtgaagaatgccctgtccccatgtaagtgagagtggagaaggcaaggccaggtaggcagtcagtaatgtgctcctaagagctttaatcccatgttccacagctaaaattgtttgggaagccaggtatacttatttactctc

SEQ ID NO: 47157 - DNA, 1080 bp, Homo sapiens
gtggtccttttctgccctttgtgccaaacttgaaactgcagggaaatctttgttacagagaatccagaaaagacctattaacagcattgaggctgtgtctgccacttcatggctgtgtattttcagacatcattgctatttttcagaattaaattaattatcttaatggagtacttacttgcttaagtttaaagttcactccattttaatgtttattttcttgagtggcccatcaaggaaataggaagaagtagtttattttgtattgtggtttgagataagagaggtttttatttattattaattttaagtaaggcacccaaagataataaaggcctaggaaggatagtgagaagaattttgccatgatacatattttcctcaataggtcttcctcagtggtggttatgtatgtacgtttattttaatactctagtctatgccctctttaattctttggcttgatctttgttttgtttttcttctaaagcctatatatatatatattttttttaacctgctagtttataatgtatcttaaattacatccgtaacaaatctgtgttatactgtgtactcttaatgtacatttcccttccttttggtctttaaaaagcaaggggttttatgtttcttagtgggactgtaagataaagtagaatatctttgcaggttaattgctctgtaattaacccagatggggcagagggcagaggacagttttgacttaaccctgttgggaaacatcagcaagctttcactttactgtagagcaatccattagattatggtactctcagctacttgactaatatccagagaaaccttactccttttccagggaatcctgagttcctctgttgataagatgacttaatagaaatatatttttaatgaattcttgacatttgataaattaaggccatttattttagcagagaaaaaggtgaagttctacttagccattggtgacttactacttttatttaaagaagatgttttctaatatgttttattgactaacccttatcagttataaaatacctgctactctagttctaggctagttcctaaggtgaa

SEQ ID NO: 47158 - DNA, 1117 bp, Homo sapiens
actctacctttttacggtcagcatacatttctagatatcttactcccttgattattggtaaaatccatttcattgttcatcaccaatgtatacagacaaacctagatttcattctgtcccattctcccatcataaggaaaaggcttttcctggtgtaattcaccatgaagtattcttgacaccacaaggaagcacactgaaacatttagaatatgagccattctgtaggaaggctatgccaggttctgcaacaatcctctctaccactgggtaagctgaatatcaatagacaagtcacttaacctccatggatctcaaggctgtaactcaaggcattcttccaagtatttggaatgtagctattttcttatgtgttatttagtcctgtcctagaaacaaattttgaaataaaaatcttataccataggttatgtttcagcaataaagttggccataccattagccaagtaaacacagtggttagaagtgaggaaatcatttgaggggttcggtggtagggtgataaagtatgcctttcaagcatttaacgttataactctttcaatttcccaaaataacaaaataagatggtaatttgaaattaagtgttttagcattgctattgctttttaattatttgtttacaagacttttaggtatttatttctaccatgtattttactatttacagttatcaaggaacagttaagaagttttgttctatgaatctatgatgcagtaatttgttcagtattaattgatacctgcctctaggcatgtaaactgtgtgaaacgtaacaggtgtcctaattctagaaaaatgtgtggtaattgtttgtttgtcaaacagatgaataaatatctttagggcatagctggtcctcaggtggtgagcataaatggattaatgatgtgagtgactcggggagacacgcttgttttgcagcaccctcctccgccgatcgctgaagcagaacaaatactaattaacaggggcggcctggttggcaggttggctttctccagctgatttggcaaaatggtttattcctttccctccataaaccatccctcttagttattagacattttcatactgatgtttagttaatttcta

SEQ ID NO: 47159 - DNA, 1067 bp, Homo sapiens
ttaatggatcgttcctcttcatttctcagagcttctggtgagtcctgaattctttaaaatgtgcatataaaaccagtttatgatgatgggaggactagctctgaaggcagtcttcccaggaagctgcccgggctgatgtgcaaatgcatgcaaacatgaacctttagcaaacactgacagtaatgccagtggcaacgttctgtcgactcccaatcgggatatgggccttttactcgaattcagaaagtgttttgtaggaatcggcaaaacaattgaactacagagctaaaatatttatcatctgattttttggcacttgaataccctcacttgcttttcaggtggtttctctgttttcaaaattagtaaataattttatttgtttttttgctgctcccatttagctctgatgatattttcttctttcaagagtatttttaaaaattgccagctttctagttgttacttgaagccagcttcagaagtagaacagttaacacggattattagagacctttagaaggaagtaaaattctcaaattttatttctatgtcttggactgttatttggtttttgaaagcacaattttttatgccaagaactaaaaatctgtagacactggtggtaaaaagtagaaattccacaattacaagtggcagtgagtaaactggctagagtgagaagcaggaatgaggtggaatgagtatgaatctctgctgtttccttcatctgtgtgtgtgtgtgtgtgtgtgtgtgtgtgtgtgggtggggttttttttttttgttttttttttttttttttttttgagaaggagtctccctatgtcacccaagctgctgctggagtgcagtgtcatgatctcggctcactgcaatctctgtctcctgggttcaaacgattctcctgcctcagcctcccaagtaactgggattataggcacgtgccaccacacacctggataattttttgtttttggtattttttagtaaagatgtggtttcaccatgttggccaggctggtttcgaacttctgacctcaggcgatccacccacctcagcctccca

SEQ ID NO: 47160 - DNA, 1187 bp, Homo sapiens
atttgttttgggagatgtacaaatcaaatctgattataacaaatattataacaaaaatatccctctaaccaaacaatttctagaccccaaccagtggtccacttatttaaaacaatattgaatgtaacccaattccattaaggcaaaataatgtgagttagtcttggagtttttctttcatgagttccttaccttttggaattcatataggcaattggcagtgattccaaaaatgtttatttacctttggaactatatgattttaaaagtgtagtttatctttcaaattattttctgcatagttccattttacagtatctgtttttgtgggaagagactactccaaatgaaattctggtttctgattggtttcctccttgcctattttagtttcttatacttttatacctaaaaagtttttcttgcatttaacagagtaatttccccctaaaaactattgaagtagtagcataatttacatgttacttcttgtcaaccaccaaaaccacagggtacaacctgatcaaatacactaaatatgaaacaaaacacaggctcaaaatagagtagatggccattgctgcatgtgagtagtttttgccccgacccctggtcagttgattccagtcacgcctctccatgccttcctggggggtgattttgtagggccgttctgcttaatgtttcctgactcaacctgtccctgggttcagaacccagggatcttcttcctcctaattacccttgccctctttagtcctcccaggcttcaggcttccctccaagtggggatcccttcccagataaaagagttgagaagtggtttattgcttttctcaatgtttaaggaaaaccactagaaggctgcttagtatagagtgaaaaccatgtgctttgtagccgttgccatgggctctggagacagctctgcccctgctagctttatgaccttggacatgaataataattagcactgtgggtgcatatactctgtgctgtcatcagaacagcccattaaggtggagtttgctattatctccgtgttgcagatgaggaaagtgagacacagtgagactaagtaagttgcctctggttcacccagaacataagtgatgagctgactaggattcagttagtcttcagagcccatgctcattatctctattctagggtcagttttaaaccct

SEQ ID NO: 47161 - DNA, 1053 bp, Homo sapiens
tgatggtgacactaaacactgaggctttgatgtttatacgatattcttccccactaattaactgcactaatgaagttaattgtggggaagaatgccgtataaaacatcaaagcctcgatgtttaatcacaacttaaaaagaagttttatactcttcaattgccaaatacattccaattagctgaaggaaggtcaaaaattctgttttcttccatctcatcttcagagcttttctggttgaccattggttacttgagctgcctgagtgttaatctagacaagctgacagtggcatgtggaggacaacatatcttcccccaagctataagccagcataactgagagactcagtttctgcaaaaggcagtgatgacctcttctgtaatgtgttgatgaaaaatgaatgaactcacagagtaatgcatttctctaccctctaattttattattagcttgacccactactccattttcctatatgtttccatatgttgctcttataagccacttctctaatttctgataggcatatttccttgatgaattcagactgcaaaaccaaggaaatgtgtatgtgtgtgtgtgggtatgtttaaaggcatagggcgtatgtaagtggaggctttgcaaagttgataagaattcttaaatgaccagtagtagaacaagaactccttctcaggtcaatttccctgtggtgtgtgttacatcaatttttattgttgttttttttttttcttaatcaggcagggtttacaatagcaataatgtaattcaaataagcaattattgtaattgaccttggcgatgagtatccttggcttttaccacagtttgcttaatacctgaggatgggcaattatctcataatgcccactttattgagattattgttttaattatggcactcaaaatacatcactttgtcagcattgtagagtcaagcatggaagcactgcattcagtattcagaagtgcgtaaagagcatcttgcctcatcttatgacatggttatgattgcgttttttctctctcccaactgtggttttgaaat

SEQ ID NO: 47162 - DNA, 1112 bp, Homo sapiens
tacccctccccccctttttttggcaaaggaggggaaaggaaggtttaaaataattgatttaaaatgtcactaagtgtagactgatgactgtatagagatgtgaaatgtataattacacatggaagcaatatgttgctgtgttgttattaggttttttttgtttttgttttctacatcttttaaagacttttggaaatttggctgaacaattagaacacaacaggccaactcatactcatttggatctatttagacaacgttaaccaatatatctatagctttagattatattcgataaaagtaattggactttttttctttttttgactcgttgacaagtgtctttgtaatatgtttttagttccctttttttgttgtattataggcagatgaacaaattaaatttggcctcaaagagagaacttactcccttctggatatttttgccacatttctttgcaaaaggagatatatatatctttagtcagttttgttgttatgagaaattatgggttattttgtggcatgctctttgggagctgcacagttatggggaggactcccactgctgtgcaagttaagtcttttacaaaacaaggacagcagaggagggtttgcagagacctccctctgaaaaacacaaagaatggactctctcctgggatgaggacttgctttctttacctccggttctttccatgtcttagttggatgtccctgaaatggacacaggctgtgccattgtgccagaaacattgtgttatcttttatgttgttgttgttgctgttaaactataatatgtgacttctttttttattattttttgtttgaatgctttaaaaatcttttaagtctgtggatctgctgatgtacagtgcctttgctgctatggatcaaaatcaaaagaaccgtgtagatatactttattgtataagtagaaaattacttaatttcatactagaaatggatggatgctgcaagttgaaatggactgtccattgacgttcctaatgtggtagcagaaaaaaaaaaatggtgtcttaagtgcttagtgtttgatgtcattaacagtttcgtaaaactctacagtgtagaaagattttgatactaa

SEQ ID NO: 47163 - DNA, 1011 bp, Homo sapiens
cataccactgaggcacccactagtaggttcaggaacactctgaaacatacatacccctgtaagagctgagtcttagttttctcatgaatatatactcagagcttactattcctaaggaagctacaggaaaaaggtagattttgcgaaaaggaatgtgtcagcgtatatcatagtgatccactgaccctttatgtaaagcatgaaaaagagaaaataataacacttatatactgctatccataattagcaaatgtgaacatcctatcctatttgcctcagatctattttttaaaatgaagcattagagacccagctgaacttcccctttgactgcatattgtttctataattaatgtatagcattgttgtgtatgtgttgtgttggcagttatcagactttggaaaatctttcatttaaaaaaattaagtatctgtaatgtttcaaacaatatcaaataccattacatgtcttgaaccagagcagagttggcgttcattattagaactgagcaagaagtattgtatttcaaacttctgattccattttgtgatgactaagcaaaactcatgtcattttcccacattagcaaactgtatgtctcatccatcttgctcctctcagttaagacaaaagtttgtgttttttatttattatttatgtatttattttttgtgacagggtgtcactttctcgtaggctggagtgcagtggtgtgatcatggctcactgcagcctcaacctccctggacttaggtgatcctcccgtctcagtcgctggagtcactgggactacaggcacgcaccactactcccagttaattttttttgtattttttgtagagtttctctacgttgcccagactggtctcaaacactttggctggagatccgcctgactcggccttctgaagtgctaagattacaggcgtgagccgccatacctggtcgctgtttcatattatatatgcaagaagtagagaaatcaaatctaataaaaataaatggacctc

SEQ ID NO: 47164 - DNA, 1033 bp, Homo sapiens
tcataccctggacttggatcatccctttgtccagcatatctatgctgtttatgctacccaccctttagtcacttagtagctggttggtcatcggatttaaaaaaataatatatattaagtttgataatatttagagtttcagacatccactgggggtattggagcatattccccatagataagggaggctaatgtaactactgtttactgaatatcctttataggtctgacattatgctttacaaatataattcatgtgatcctgttaacaatcctataagatagatggtagtgttgacattttatagatgaaaaaactggttacagaagttgagaattttatattaggtcacatatcttgtaacttgacagagccagctttcaaacctaggtatagctgtctcaaaccttttgattttctcattttaccatctgattatgtgtagtgtttcaatttcgaccatgtaagatgctgaagagtgaaaaatctaaagggtgtgcctgtctgtgcattgtagagaattacagaagctgtattcaaatatactgaattatctaaatttttttgttttttgttttcaggtaatagatgcatattatttcttttatttaaaagaaatgaatgtgactagtattgcattaagagctgaaacttggcttttagctgcatggcatgttaaagtacctccgatgtggctggaagcttgtattaactggattcaagaagaaaataataatgttaacttgagtcaggcccaaatgaataaacaagtgtttgagcagtggctccttactgatctgagggatttggagcatcctcttttacccgatggcattttagaaattccaaaaggagaattaaatggattttatgctctgcagattaattccttggttgatgtaagtcagcctgcatactcccagatacagaagttgagaggaaagaatacaacaaatgatctagttacagctgaagcacaagtaaccccaaaaccttgggaagcaaagccttcacgaatgttgatgctgcagc

SEQ ID NO: 47165 - DNA, 1050 bp, Homo sapiens
aaaagtacttgcaagattaataggggaacctgatcttgtagtttcagtcataccaaacaattctaacgaaaacattcccagagttacagatgttctagatcctgcattaggtccttctgatgaagaactcttggcaagtcttgatgaaaatgatgagcttacagcaaataatgacacttcctcagaacgatgtttcaccacaggtagttcctcaaataccattcccacaagacagtcaagttttgagccagaatttgttatttctccaagaccaaaagaggaaccatcaaacctatctatacatgtaatggatggagaattagatgacttttcactggaggaggccttgcttttagaagaaactgtccagaaagaacagatggaaactaaggaattgcaaccattgacttttaacagaaatgccgatcgaagtatagagagattttcacataatcctaatactacgaataacttttctttgacttgcaaaaatggaaacaataattggagtgaaaaaaatgtatctgaacaaatgactaatgaagacaaatcatttggttgtccatctgttagagaccaaaacaggagtattttttcagttcattgtaatgtacccttagcccatgattttacaaataaagaaaagaacttagagacagataataaaataaaacaaaccagcagttcagatagccattccttaaataataaaatattaaatagagaggtggtcaactatgtacagaaaaggaattcacaaatttctaatgaaaatgattgtaatttacagagttgttctttaagatcatcagagaatagcattaatctttctattgccatggatttgtattctccaccctttgtctatttgtctgttctaatggccagcaaaccaaaggaagttacaacagtgaaagtgaaagcatttattgtaaccttaactggaaatctctcaagttctggtggtatttggagtataactgcaaaggtgtctgatggtactgcatatctagatgtagactttgtggatgaaatacttactagcttgat

SEQ ID NO: 47166 - DNA, 1038 bp, Homo sapiens
gtgtgccacaattctgggccttcccactgctcccttgagggaatggcaccctttttggagatgtgttttattaagcagagcttgactcggtgaagagcccacagtgtcactgcactttaacaggggcagtggggagtggttttctgggaaagagcctgctgcccgcctgtcagtggccctgacctggcacttcctctctccttcctaaccctgtgcctttgggatcagttgccctgaggcagagagcaggagaggccagggctgtggagatcctcctggaggcaggtggaagtcaccaggagggggcagcgcagcacacaccttggtcttctgtttccatgcggaggctgtggagcagggaaagaaagctgttagctgtttgctgtttgggtggtccagggaaccaagaacttgagctcgggtgtgtttgtccactgagtcactgagaaaccctggggtctggctttcctgcagttatttcctttgtatggttgttgcagtctctgtctctctttctttccctctctccctcccaccctttcttgcttgctgtctctttcttttcttttttcttcataaattttaaaaattcaaaaaagtataatgacataataactttatataattacattcagaaataatagttgaatatttttaagctattttttcttttaataaaataatttagcagtttaataacataaatggtataaatagtttctgtgtatgtgtgtgtgtgtgtgtaaccccagacccattctcctttcccaaggccaccttccttggaatcatctttctatacttggcatatctacttgactgtgaacactatgtgatattattttttgtgtatttttaaaagttcacacagattgttttatgttacatgtacgtatcagtatacaattttgcttatcttctttctcacttcgcatagcagtgtctttctgttcaaatatgtagatctgatttaatctaatatatatatatatatatcaccttattttaaacaatgtctatttctttatggatggacac

SEQ ID NO: 47167 - DNA, 1043 bp, Homo sapiens
cgaccgctgagcctcccgagactccgtgggggccgctcgagtgacaggtgccaccgtcccctcaccgccgctggcgcccgcactccctcccggggagccaggcgctcggaaatttctggagcaacgacctgactcgttgttttctccctttcaggttttgaagccgcttctctggccgagttaggtttcgcccagcgcaatttctttctctatgtactttgcgaataagtttcggagcatcggttaacagcctatgggtgaaatttggctttcattcatgaatgaggtatagtgaattactttttgaatatagtgctcctcgtcctcccccgccagctattgaaaagtgatttttttttctgttattgtttggaacagccttaccgaatttttgtcagatttcgagcattaaggtgcttcataaatattgaacagtaacgacaaaaatagtttatcaaattggctgattgccttttctcttcctcctctttttcactctttaccttcgccagatttttcagagtagatgctaatgctttcattagaaggactaatgaaagatcgtctgtcttacactaaaaagctggagacacttttcttcaacatttagcattgcctgttgtgtagtaaatgtgcttgggattgtaactggaatcacttaataaatgtgacttgtagctataaaaatatttgagaagctttttggcaaattaaaatattaaagatcttcatacaaatctagatttcttttctcaacagatttataacactatagtagcttcaattctggagtaagagcaaaacccagaagttgaccaaaagaaccttgtgtgaaaatagatgtattttactcgtgggagaatccctcaggtcctcactgagtacctgcttgtatttttttgtttaactttcttggcctacagaaagtgggagctgcagattggagaggggtctcagtacttaactgtgaggaaaaaatggagtttggggcatacccattgggtttacatcacttacagtaagtgtgtttggagcagagtttt

SEQ ID NO: 47168 - DNA, 1052 bp, Homo sapiens
tgtctgatgaggtagattactaggacttggagcacttcccttttcatagttgacataactccagagcagcttgtgcaggagctacccactgaggagcactggatgaggtttcttgtatctggaagtgactggaacagaggcttttactttttcaggggtttcctggctgccccaaggcctaagggaaactttatctaaggataccctggtaagatagctctgccttatgctacagaaagaaaatttctgtgagccttggagagatgtttcagaatagacatttatgaataacgcatgcaaataatccatatatgaaattcacagttttcatatcagtcctagaatggaaagaaatttttttgtgtaagatataagtcttgataaggcttcagtagcaatctgaaaatctcagcagctgaaagcagcaaagttgctttcttgctcaagctaccatgtccaccacaggttggtaaaggggctttgttcattgtggttcactgcgttccagcctagactccatctcaaaaaacaaacaaaaaaagtgtgtacagttccttacttatctccttgccttaactttctaactccctggttatttaatatttagattaatgaactgggaaacattattactgtagaaataaaggcccaatggaatcccatgtacttatcacctagcttcatcatttatcaactcatggaccccacacctagattattttgaagcaaacccaagacatactagtttgtctacaaatttacgatgtattttacaagacaggtttactcatttcaactatgttgtattgaaacaaaacctgttctaattgactttgctttagaaggtggttagtttattgggatacaaggaatcagtaattaaaatttgctttttatttttgatacacaggaatccagatcttacataagatggaagtctctcacactagatactgaacattaaatagaaaatctatttagtaaaatctaagttgccaaggaagaaataccagtaaaagttgctgtaagaattagacctctgctttgcaaag

SEQ ID NO: 47169 - DNA, 1033 bp, Homo sapiens
aaaaaaatcagcagagtgaacagacaacccagagcgggagaaaatcttcacaatctatacctccaacaaaagactaatatctagaatctacaaagaactcaaacaaatcagtaagaaaaaaacaaataattgcatcaaaaaatgggcgaaggacatgaatagacaattctcaaaagaagatatacaagtgacaaacatggaaaaatgctcaatattgctaattatcagggaaatgcagatcaaaaccacaatgtaatatcaccttactcctgcaagaatggctgtaatttaaaaaatcaaaaaataatagatgttggcatggatgtggtaaaaagggaacacttttacactgttgttggcaatgtaacctagtataatcactatggaaaagagtatggagattccttaaataactaaaagtagatataccgtttgatccagcagtctcactactggatatctaccagaggaaaataagttattatatgaaaaagacacttaacacattacacttgcatgtttatagcagcacaattcataattgcaaaaatatggaaccagtccaaatgcccatcaaccaatgagtggataaaggaagtgtggtatatatataccgtggaatactactcagccataagcagcaacctggatgcaattggagactattattctaagtgaagtaactcaggagtggaaaaccaaacatcatatgttctcacttataagtgggtacagcatacactgctagggtgatgatgggtgcaccaaaatctcataaatcaccacaaaagaacttatccagtaaccaaacatcacgcgttccccaaaaacctactgaaatgaaaaggaaggaaggaaagggagggagggaggaagcagggggcggggaagggacgggaggaggagggagagaaagacaaagaaagagaaaaaaaaagggagggagggaggcagaaagagaaaatgtgactgggctcagtggctcacgcctgtaatcgtagcactttggaggctaaggcaggatgatcccttg

SEQ ID NO: 47170 - DNA, 1078 bp, Homo sapiens
aggctagagtgcagtggcacgatcttggctcactgcaatctccgcctcccaggttcaagtgattctcctgcctcagcctcccgagtagctgggattacaggcgccctcaaccacgctcagctaatttttgtatttttagtagagatgaggtttcaccatcttggccaggctggtctcaaactcctgatctcatgatacacccacctgggcctcccaaagtgctgggattacaggcgtgagccaccgcacccagcctctagtctgtcttttgcattcctccctaagcactcctctccctgcattggcttagcacatcattcccaacaactctcaaattctaccctccatggtttaattgaccactgtgagagcatcccccaccaattccctacgtgactgctggacgaccctcatagagcctgtcagcattgtgggcaagaccctggggaagtttctcattttacatatgaataaactagatgcagagatgttaagtaacctattcacagtcacagagctgaaaagaacaataataataataattgctattatttattaccatttgctgaaactgtgctgaacaatttacatacattttcttagaatgagaaacctaaggtcagttctggctttcgagtgccaccccaaaatatgctgcttcagcttcagtatgctaattagttagaactgagggctttgaaggaagaataggaagttacgaagagggaagaaggaaatgggagtggataaatggaatggagggctttgcagccaaaaggaagaaaatgaaaaaaggatcagagagttgggacaaagagctttctgaaggactttacagtaataaagaggtgccatctctagatggagttagtggggagaaacccagattcagtatatgcccttgggtaggtcttgtcacctctaaggactttaggtctctcttttgtaaaacaaaagatctgaaaaataaacagaagggctggactaaacaatctctaaggtagttttttttgtttgtttgtttgttttttgagatggagtctcactcttgttgctcaggctggagtgcaatggtgcg

SEQ ID NO: 47171 - DNA, 1052 bp, Homo sapiens
actagccagccaaaaccataaactagccagctgacccatagaataatgagaaataaaaacatttgttgttttaagccattaagcctcgaggtggtttgtaaaaccccaaaaaagcaaaagctgactgatataaaaatatgtattttttcttttttaaaattattttattgttgttattggttttaagttctggggtacatttgcaggatgtgcaggtttgttacataggtaaacctgtgccatggtggtttgctgcacctaacaacccatcacctatgtattaagcccagcatacattaactcttttccctaatgctcttcacctccgccccctgctctccccgacagactccagtgtgtgttgttcccctccttgtgcccatgtgttctcattgttcagctcccacttataagtgagaatatgctgtctttggtttcctgttcctgcattagtttgcataatggcttccagcttcattcatgtctctgcaaaggacatgatctcgttcttttttatggctgcatatattctgtggtatatatataccacattttctttatccagtctatcattgatgggcatttgagttgattccatgtctttgctatcgtgagtagtgctgcagtgaacatacacgtgcatgtatctttataatagaacaatttatattctggattgctgggtcaaatggtatttcctgttgtaaatctttgaggaatcaccacactgtcttccacaatgattgaactaatttacattcccaccaacagtgtaaaagcgtgcctaaaaaatatgtattttaaagataaaatatatattgacattaacactttaaactaaaacccaaatctatagcgttttttaagccctttattgatctttcactgaaacttctttctcctactctaaaaattccaattgtaaacaaaataaacagaataactcatttgttttatctcgatctacatataaagaggtctcagaatgataatactaatacaacctctgtcacaggttacattttgtggagcagacactgagatggaatttg

SEQ ID NO: 47172 - DNA, 1071 bp, Homo sapiens
aatttgccacgcagttgggggatttcactgcacctaataaacagcacacttcccccacccccaaagtttcgaatcaattgagaaataggcaatatattagtttgctagggctgctgtaattgagacataaagaaggaagaaaatgtgacagttaataaaagtggactcagagatggaaaagatgttggaactagcagacaaggactttaaaataacaatagtatatatgtttaaaagattggggtgcagggaggtagacaatatgtaggcagggaatttcattccaggaatggaaactacagaaaagatgcaatggaaatgctaggactgaaaaagtacaatattagaaatgaagatttcatcagttgggcttaatggccaacttgacaagagtggaagaaatgatcagggaatttgaatacaaagtgtctaaaatgaaatgtaaagagaaaaatgaatggaaaaaccgaacaaatctttgagacttataggtaataatcaaatcaactaatagatgtgtaattggagcctaagaggaacaggaaagggagagtggggaaggaaaaatacctgaagaaataatggccaagaattttgcaaaattgatgggggattgagggtggtggtggcaactcacagatcccaaatcttaaacaggggaataataacaaaatttttggctgacttctcatcagaaagaatggagatgagcaaacaatggaacagcatctttaaaatgctgaaagaaaaaaaaaggctgaacctagaagtctatatacagtgaaaatatccttcaaaaaattaaggccaattagatacatttataaacaaaaatggaaagaatttatccccagaccagtgccataagacatgctaggggaaggggaagtctttcggttgaaggacaatgtagtcagatggaagatcaaatctgcaataaggaatgaaggataacagaaaaagtaaattagtacataaacattttaaaaaccttttaattttttttttttttttttgggacagagtttcgttcttgtcgcccaggctagagtgcagtggcacaatctcggc

SEQ ID NO: 47173 - DNA, 1040 bp, Homo sapiens
actgtttgtcgagaaattctcatttctactgcttcccccccgccccactttctgaccatccctttctttttatattgacattaaatcattttccttagaaatatgtaaaatttattcatttgttcattcagcatttattgattgctagtgtgtgtacttgtattaggtgttttatatgtatagttttcacttatgttttacatgagctttattagatatctgtattatcttactgcctgtgattacattgcttgggaggggcctagccagaatcttaatcctgatccttcatcttccaaagctgtctctttaccccctcaaagatttctttattaccttttagcagtttacagtcctagtgggtggagtaaagaaaggagtcaaaggattgctgggaacagacatgtgaataaacaattctgacaacatgtaaatgcttttatgacggtgccgtgggaacagagaggaggagttaattatgtctgagagagtaagaaaggctgtagaaaggaattaatactggtgtgaggtactaaagaatggtaggcgtatgacaggaagattcatggtttagtaggcaaagagggtatattgcatgggcatgacaatgtgaaaatgttcattttggaaaatcataaatagctgcttaagtctggcagggagccaagtaggaggagtgtgggattagtggagagtggtggagaaggaggaaaggataaacagagggaggatttttgccaaagttgaggaactattctgtgagactcttgggactgtatttaaaaatttggactttaaaaggcagatggtttttagtctggaaagtctgtcttctgcacactagttaataccaaatacacaccttaattacagagttttccacaaacatttgtcattttgcaatgcagtagcgtatgtcttactctactgcagaattcttgggcttaaggtaaaaataactataaacttgggcaaatgatttaaactcttactctgtttctttacatataaaaggagaaaaataccacctttctcaaagt

SEQ ID NO: 47174 - DNA, 1035 bp, Homo sapiens
ttaaatgaagcatatgttttccaatttgccagtctctaccattccctagtgtatgttgtagctagccagatgtatttaggaagataacctgccttttgagttcatgacccctgccctggaataagtcattcgttgaacacatatttattgaatagaagtctgtttagcactattctaagtcctataggtgaagtagtaaataaagccgtgatctcatggattatacctttcttgggacagatagtcaatgtatatgtaattaaatacacatataatgtcaggtggtgattaagtgccatgaagaaaagtaaagcaggctaaggggatataaaatggtggatggtgctgtcttagaatgcatggggaaaatctctatttgaggaattgacattagaacagaggctggaatataagggatgaaaccttgtaaatattttgaagaaaatcattttggtgtgggagccgtgagaggagaacgtgtttggtatgtttgaatgacaagaaagacctgtcagactgcagtgcagtgaatgtgaagtggtaggaaataaagttggcgagggagaccgggccatgtgatgtagggccatagaggccatggtggacttagggattttgctatgaggtagaaaactattgaaaggttttgaataggaaatgacatgatgtgacttattttcagacaatccttctgccttctggtggtatataaattatagcagggactagtgtggtaggtgggggagttgtctggaggtggttacaagagtgagcaatagtggtgacttaaactagagagagctgtgaaagggtgaaaagtagttagactagaatctgaagatagagcctacagtgttttctggtagatttgatacaggatgtagaaaaacgagaggagtagaggccaggttttcagcctgagcaactctagataggtagtagtgccatttagtggtatggtaaacactaggaagtaggcgtcaagctcctttttggagatgtaaaatttgagaatcctgtttgatgtccaagtag

SEQ ID NO: 47175 - DNA, 1051 bp, Homo sapiens
aataatgttagcacaggtttttgaataaattttgcttctaagagaagttactatttattcctaattagatggggaggaaagtctttgaagaggaacttctactttgctttttacacacagtctactctgaacaccaggcaggcgttagatattctccctgttttggaaaagatttcactctgtatttttcctgtgctctcacaccaccacaacagtcatcagtacagaagacttgagtgataactgtgtaggtttttccacacacaccagctggatgccctctaattaaactcccattgaaggagtgtttgtggtagtgtggaaaacacaaactccaacctctactatctacccggaggtaatgccagatcccacaggttgacggctcagtccccaagactgctcttcctccccaaacaccagttccatgtctgggtttccagaacttctgacccactggctttaagttgggattcccacgactctctttttggtttcagctaattggctggagcgagtcacagaactctgggaaacacttggtgtgtttactggtttattgtggaggctataggatgtgaaggatacagatgaagaaatgcatagggtgaagtatgggtaagggtctcggagcttccatgccttccctgggtgtactatctcctaggaacctccacatgttcagatatctggaagctctctgaactgtgtcctcctgaatttttacagaagtttccttacataggcatgattgattaaacctttggccattggtgagcaactggaccttcagcctctctcccatccctggaagttgtggggtggggctgaaagttccagccttgtactcatgcctgtctttttggttatctgccctaccctgaaactatcagtcattcgcatatcaaaagacagcactcggagagtctaaggattttaggagttaacgttaggaaacaagaaggaagaccaaatatatatttcataatgtcacaccctctgtgttctcactgcattcatacaggcctctgttacattttcttgtactttg

SEQ ID NO: 47176 - DNA, 1029 bp, Homo sapiens
tcagtttattttgactattttaatattactactcttgggaggtttttatttctgtacattttttatcctacatcagaattcaccttcagtaaggattaataagtaacactcattgtggagacagcaacttataaaaaattttcacaaactttttatattttaatcacttgcgtagtctgtggcatttataagtatactgattttacactaatgacaattctgtgcgtgacaccgtaactaatatataacatttgttttaagaccactttcctggtggataacaaaaaggtctttggaactcatctcatgcaagacatggtgaaagatgcacttcggtcttttgtcagtcctccggtgctttcccccaagtaagtattgtaagacattttagagttgtatgtatgtgctcctttaaaagcccaacttctctgtactccttctttatagccaaagtatcaaaattgggaccaaatctccatgtaaagtaacttaatagtgttaaaattaattgatctctgccacattgtttagattaaaactaaggtttttatgaggttgacaaaatttctgataactccaagttttttgtctccagcgtaagtccttaaactttgccgtagtagaggcactgccccgaaaacatgctgccatcagaggctgaaaggattgcatgcagaaagaatcatcatttgaaagctggcattctgagaaatgtcaggcttttccaacagggaagggaagaaaggagtcatcatttcttaacaaagcacttacactttgttaaaaaaaaagatacacctaacagtgtatctttttccactgaaagatacacgatggctttctatcacaaattacttcatggtagatctaattaattatatgtaatggctgccaaatatttcataataaatgttgagtatcttttatccaaaatgccctggaccagaggtgttttagatttctgatatttttggatttttgaagtatttgcatgtacataatgttgctcaggctggagtgcagtggcat

SEQ ID NO: 47177 - DNA, 1016 bp, Homo sapiens
cagggccaggaattgtttactctccatatgaaattataggccttattatgttatgaaatgcatatatatttttatatatatatatatctcgtagatttgaagacttttctggcttagcagtgttaaagttctgaaaaattagtgtctggtagagaatgttctgttttatatttcatttattaaataaactcaagtaaattgtaaatgtgaatgttcttaatttttaagaatgattttatataatgccgataattttttatctttttctgattttatttgctttgtgattaaaagaaaatatttatagactgaactgaactgtgttctgatataataaaaacttaatgggcattcatttgatttgcatatgtacatgtataattatcaagaaatcttctggaaagttgtaaaatgtagaaagggaaaattaatccttatgttcatttcttgtaagatctaatctattatctaatgaatgatctgtttttaaagacctaaagcattatttgaaatatctatcgttaatatatgtgttgataaagctgtctcatttagacatctaccattaactaacattttgtatcctttaaggtatctctctgaattcctttacgcatggttgatgtcaacattgagtcgtgccgatggctctcaaatggcagaggaaaggataatggaagagcagcagaaaggccgtagtagtaaaaaaacaaagaaaaaaaagaaaggtgctgtggattatttttaaacttaagaacagagtgtactttaatttctacagataaatagatggagagctactcgtgagttggtcattatattttagttcttgttcctcttttcagaaactataaggtagagactgagtcccagtatcaatgacataagctttttggttcctttctttgctttcatttctttgctgttctgtgtatcagagaatctttgatcaagaagtagccacgtggagtgtgcaagcaagatatcggtgagggaacaagacagcaggaggccag

SEQ ID NO: 47178 - DNA, 1035 bp, Homo sapiens
gtgcgagtataaaatatctttataaagataatatcagaattggtagttttgtttccttccttggagggaagcagagtgcctggaagagagataggagagacactttttaaaaattatatgtaccatctaagaaaatataaagggggagtctaaaaatttgaggagctacctatgatgacatatttcatttagtgaaacttcatttattcaaagatgagtctgtgctcctaatactatgctgtgctgccttttcaggactttgcagcctaatttttttgttattcaggaaagcaagataaggtagccatttcaattcagagttaattgaaatgaagttctatattattaaaagaaatatatttataattttaaattgcttttatttaataaaacatcaacacttccattatacaaagtttctattagtatctgtaattaataaattttgactggccacagtggctcacgcctataatctcaacactttgggaggccagggtgggaggtctgcttgaacccacgagttcaagaccagcctgggcaacacagtgagatcttgtctctataaaaatttaaaaatgagctgggtgtggtggtgcacagccatttgggaggctgaagtaggaggattgcctgaaccaggaggttgaggcttcagtgagccgtgttcttaccactgtactccagcctgggttgacagcaggtctcaaaaaagaaaaagagaaattttgactatgaagttaatgtttcagtagttttatgttcatgtttcaggttaatagaattttaaaggttgccaaacccaactttgtggttatgaagttattggcaggaggacacaaaaaggaatctaaagtgagtacattgtgggaaaaataagtggtcttagattattgtgaagtttcataagttttgcaataagatgtgtaaatattacaggaaaaattaaaccactgaacaaaaatcattctaaaaattttagttcagcagcaaaaaattagagcttgccattttgtcttgagatgtgtattttgt

SEQ ID NO: 47179 - DNA, 1050 bp, Homo sapiens
agggctccaccctcaggcttgtgcccatggacctaatgagaacaaggactcctgtcttcttgcccaaatgttgcattttccaagaccactctggcctgccatgccacccattctgtgcctataaaaaccctgagaccccagcgggcacacacacaagcggctggacgtcaagaggaacacactggcagaagaacacatcgaaagacgctggcaggccattgatggtggaacgattcggacgccaagggaaattcggccaaggacagtaggagatcccggctgctgagcagccagactccagaggaagactaccttcccatgctatcccccttctggctccccagccatctgctgagagctacttccaccactcaataaatcttgcattcattctccaagcccacatgatctgattttttcagtacactagggcaagaacctgggatacagaaagccctctgtccttgcgataaggcagagggtctaattgaactgattaacacaagctgcctgtggacagctaagctgaaagaacgcactgcaacacacacccagtggggctccaggagctgtaaccactcaaccctagatgctgccgcggggttgaaacccatcctccccacaacctgtccgtccgcatgcttcccctaggggtttgagctgtggggcactgaagaagaaagccatacccccattgcatgccctgtgaaggggataagggaacttttttttttttttttttttttttgagacggagtctggctctatcacccaggctggagtgcagtcgtgcgatctcagctcactgcaagctccacctccggggttcacgccattctcccgcctaagcttcccgagtagctgggactacaggcgcccgccaccacgcccggctgatttctttttgttgttgtagttttagtagaggcgggttttcaccctgttagccaggatgatctcgatctcctgacctcgtgatccgcccgccttggcctcccaaagtgctgggattacaagcgtgagcaaccacgcccagctggaactcctccc

SEQ ID NO: 47180 - DNA, 1032 bp, Homo sapiens
ggaagtctgaagtttttaaaaatgaaatgtacagactcatctatcttgtataactgctattgtttttgccaaaaaatgagtgaatgattgttttttggaaaatttttcaagtcctgattttatgtctgccttggatgtagccacttcctgaaaacaagtcctaatgtaaaatggacatgtaggaagatgctgcttatatgacatcacgtgtcactgagggaagattgggagtggaggcaggagtttggtggcaggaaaatggaaatgggcagatatgtggcacaaatgcaaggtcattctaagcagtgaattactagtagaccagtatctaagatttaagactttacttggccaggcgaggtggctcacacctgtaatcccagcacttttgggaggctgaggtaggcaaatcacgaggtcaggagttcaagaccagcctggctaacatagtgaaaccctgtctctactaaaaatacaaaaaaaattatctaagatttaagactttaattggccaggcgcagtggcgcgcgcctgtagtcccagctatttgggaggctgaggcatgagaatcgcctgaacctgggaggcggaggttgcagtgaatggagatcgcgccactgccctccagcctgggtgatacagcgagactctgtctcaaaaaaaaaagaaagaaaaaaaagactttacttatatatctttagcagtcatctaaataataacgattcacttaccttataaatgtagtgagacaaagtacatagccaggaggaaagatgggtttttgaagaagtagagtacaagtattattgttaatgttattttacttttaggaaaattgaaaatgttcgtatttgtgtgtactgcctaagacttctgtaaaagctctctgtcaacggtcaggaactttatagagtattgcaactattgcagcagtccatctgcagcagtaatagagcagatgggccactggacagataccctggtccaaaacctggctctgcaacttgccagttttcttgaacaggccattta

SEQ ID NO: 47181 - DNA, 1035 bp, Homo sapiens
tagagacggggtttcaccatgatggccaggctgatctggaactcctgacctcaggtgatctgccctcctcggtctcccaaagtactgggattacaggtgtgagtcgccgcactggtccaacttttccttttcaccttagaaagattgtcaggatttttttttttttttaaacggagtcttgctttgtcgcccaggctggagtgcagtggcgcgatttcggctcactgcaacctccacctcccgggttcacgccattctcctgcctcagcctcccgagtagctgggactacaggtgcccgccaccacacctggctaatttttggtatttttagtagagtcagggtttcaccgtgttagccaggatggtctctatctcctgacctcgtgatccgcccacctcggcctcccaaagtgctgggattacaggcgtgagccaccgtgcccggccacgattgtcaggatttttgagaccttactacaacccctgacacctgacccacagtatagaattttccaggtgaaaaagacatgtagagaaagtcatcaatgccattcttttttttccccattcatgaaaatgattagattttcctttgagctgcctgtctgtctgcctagcacctcatatgtctatccaggactgggctgcctcagagaggataggtacacctaaagcaatgcaagaaaaaaagtggcggaaggataccatgggacaggcagagagaagaggtcagaatttagtgttgattcagttccgatatttccaccctcctttgagaagtttttcgaaattgttttgcctcctctgtgtaaagctcaatttttgaggccatctgtggtttatgggtaagcagcagaaatgtgtgtctctgggaaagtgatgaaaggctgcaacctttggagtgtaatatttaatagactaggaattacaagctgtttggctttataaaaacaaagctacaggcgctgcaggtatacgtatcctgtagagaacagacttttaatgggtgctgctcatgttggagatgctgaatg

SEQ ID NO: 47182 - DNA, 1023 bp, Homo sapiens
tcttctgtgcacttgggatgggaatatagaaaattgtcttcctagatattggctttgccattcaaagtctctacagtcagtgtgtgaactgctgggagtgatgccagaatctttcacagatttcattcctgggagctcttctggcgtcagatgatcgcggtttcttttccttctgcaccacagcacatggaggaggcctctttctcacttgctccgttcctttgccattcatggaggcagtggcaccagtgagctcacggccaggccgcttttgccctttttctgactaagtcactatagatggactaaacagaatatatttacagttcgcccatttagaatcgataagggtgtgccccaggctccatcgtatattccattacatacagcctcaggcatccgtttcaattgtttgggagaggaagtgaattagcacaagtggaatatctacaggatgaaacgttgtcagtctgtgcgttcctccccaccccttcgttggctggaagagataacgcttgacacgtatggagcagacagggtaatgtcagcctcgtggccatggagaagcaggaagtcccttggttttgttcagtgtgatttgggcattgaatgagtagatcctgttttaagaatattactcattaatatgaaccatcattttgtaggtcttttagaagcaacattctctttagtgcagataatgcttatctgcattgagagaagttataataacctggagaatgagaaggaaatacacatgcgaaatggcccagccggtttctcctggcaacctctccagagcatgtcctaggctactcctccaggaaggctcctgctctgatttcctgtattccttcacgatttggagtagataactggccacttggcattcttattacaggggacttatgcgtgggattattggcttcccctgtggactgtgagttttctgagggtagagaacatggccttttgtctctggtgttggttggaattcagctaagtgcacggtaagccatgttt

SEQ ID NO: 47183 - DNA, 1065 bp, Homo sapiens
acctggctgattgtgacaaatactaaatataaaaacaaaatgaagcaaaattgtagactgactgatgttcggaatgagaagaacaaggatgggttggacacgttggttggactcttggaaggatgaaaggaaagcagcaaacactaacaagctggtcatctcaggccaaccgtgtttctttgtctgagcacatcattgcactgatgaaacagaaattttatcacagcatacagggggttttggcaggtccctccttgcaatcactatggaaagagcatgaactgataactatacattcgggtgcctggttgcaaagaaaaatagcaagaaagctcattaatgaagggttgctaatgcagagagaagctccccagaattcacgttggcagttaatctgaagatatagatggactgctcatgaaatctagagttccttccaaaacaaattattgtgagattaaaatattctctttctgttggcacagcaagtgaaggcaaagtcatgggaacctggtggactttagaaatgcttggcctctcctcccgtggtggctggtgccaagtcaatctgtagctgattattgtctcgaatatgtactcaaatgagctgtgtagtaggccatctgctgtctcctcgactcagctgataggccctggaaaagggaaatcctgccaaaatgcaaatatcctacttaactgataatatagggagaggagatacaggctgtgggggaatgggggtagggaagggaatggggcgtggggaagaaataagtgactgtcttcacccttcctcgatgtctttccatcctcctgtgtttcttcctgttagagaaagaccaggtgtggatcagtagaccccgctcacaattggagttgcggggtcagactggaagtagccagggaattaggctcggttgtgaggatgctttttgtagcctcttcatttgaattcaagaacctatagcctcttggtttccactggcacgcttgccatggtaggagcccttgttaggattaagcttttctcagtgctggagatggagttgttgcactcatagggct

SEQ ID NO: 47184 - DNA, 1047 bp, Homo sapiens
gggagagaggaccaaagcacaccttcccaagaaaactggacttcagaatgcttcaaaaccaaaaatatgtaaggaaggaaaaaggttttgtggttaacagcaaccccaaaccatgtgaaatgccgaatgctattgcccctcgtggaaagggccagttagctgagtcctgcatagagcaccctgttgtgactctgtttacctacttttgcttaaacttgcttggccatgactccctttctccaagcagcatctctttatatgagctccagagacccactttgggaaatattcttccagatggatcttggaccttcctcctgcaaagaggtatcataggaacaagggggagtgaatgaaggcacccactgctatctttctaatctcccctcagtttaatcctcagccgctctggtttgtaaatttcttaatgataaagaggtatcttgagctacctgactctcagcatatttggtttccttgtccccacgtgcaataccaaaccagtgcgtggagcccgacccacgctggccttgggtcctcggttatgccaccttcttctcctttgcagtcttccaggagaccttgtccttgggaggatgctttcgccaagggaccgacctctcctctgctctccttggcccattgcgctgttcgcccttctctttctgcatctctttcctacctctgtgtgttgttctggttcccagggtgacggactgctgtttatcccctcagtaaactctgcttctccctgttggtgccgtggcaacctgagctgcttgctctacaaatcacagcccatttaaccgagcccttgtattagtttaaaatagtttttggagggttgtacttttttttcatgataataataattttttaaaaatcaccgctttgcttttttttttggtaaaaagtattgctttcctctgcctcgtagcttcttgaagggcagaaagagaataactccaggtgtgggctacattccaagggaattgtgtaccacttggtgctgaagtactgagttcccatacagggtttgccttcatc

SEQ ID NO: 47185 - DNA, 1099 bp, Homo sapiens
cttcagtctccctgtctctgcttctctctgggcgctcacgaaccacaatagcacacactcagacttcctcaatgcgttcttttgctgccacatttgttctctcttttctgagctcgagccagctcttttgactttttgaacttttgtctttattcacaaaggtaatttcaagagctcttgtgggttccacttctggcatcccgctcctcagatacctactattaggcaagagcagagaagtaaagtgcatttggcagcagtctctgcctttcaaagcagagctaaatcatgtaaaataggttattttccatccaggcattctcttgagaaagaaaaccctgtgtgtgtcttcccccatactctcacttcttgccagttcagttgaaaagtgttcccttaatgttattaaataggtattttcactcactgaagtggattatttgatttctgcacggtcttaagaaaaagtgagacaataggagtcttacaaacaaaccctatgtggtatctgtgagctcatagatctgtagtttttaggatatagtcataactttagtatctgccatgatgttctccatgctgaatacatgagctataagtaatatttggaatctctgtttatctccaagaaagacccatgatcgtggttaaagtttgggaaactgaggcaatgctgcttagtcacagctccaggcaggtgactattcttagactccttcccagggactagactcttctgcatcactctctggggtggtgcaggtcctgcaaattgttcatacttcctcttagaaactctccctgatctcatatcttcttcttcctgttttggccaactgcttccccaacctgcacatcaagcgggtgtaatggaagagaactttgtggaattgcggctttagctgtcccctcacaggtactggttttgcctcttgcccagttccctctcttcgctgctccagtatgttccccatccttgtcgtgggctccccggcactgtggctgccgccatcctggccaggcagctgcctctctccacccagagccaagtcccttccaggccctgggactgcctgtttggtggtcaggctccactcaa

SEQ ID NO: 47186 - DNA, 1028 bp, Homo sapiens
cattagggatgagaaggatgagtatatatgtagggatgaaggaggatgagtatatatgtaagatgaaggaagatgaatatatatgtaggaatgaaggaggatgagtacatatgtagaaataaagaaagatgagtgtacatgtagggatgaaggaggatgagtatatatgtagggatgaagggtgatcagtatatatgtagggatgaaggagattgagtacatatgtagggatgaaggaatatgagtccatatgtagaaatgaaggaaatgtagggatgaagggggatgggtatgtagggatgaaaggggatgtgtacatatgtagatatgaaggaagatgagtatatgtgcgtatgggtgaggggggatggagtgaatacatagggccttctgggcatcagttgataagtcctgacctagtgggatagggactctcctaacctttctaatgtctaactgaaggacttggttgcctggacagccatgacatggactgcttcataacaagttgagatttgaacagggacttgtgagaagggtcaatgatgaaaactaagaggatcaactagtgctctccttctcccagtcttgatcagtcactacactttgcagtcctggtccctaactcttggggttccagggttattcattgtccttactcctgtggagttgagtttctgaggacgcaaatactgaataaggcacgagatgaccaggccagagaagggcaagcctaatttccattggctgagcctagtaaacaagcccagttcaagatggtgcatgttctagccttctatggctatgtaaaaaactatcccagacccagtggggtgtagcttgggttccctgggaagcagactctgagatggagaagagtgtgcatggtgtttattaagaactatacttaggatcaagatttggagaagaggagaagggggcaggaatgggtttagtggcagccccagttggccaacagggagttctggggccagaatgacccttgagagttgccccaggttgggctg

SEQ ID NO: 47187 - DNA, 1031 bp, Homo sapiens
gccgtggtagggatgaggaagaccacagcactagattcccaaaagtccttagaattaggcttaaaatagagagagagcaaccatttctctttctcgctctcattctttaactgtacttttgccttagagagtaaatgcagagatgtttgttctatagactaagaggtcccccagctgttcacttccaacagctgttgcgttttggttatcacattgtctaccatcactgcttatgtggcacaaaggacacagagcaaggcccctgcagtctgtgcttctctgagggtgatctgcaagggtcagatcaccttctccaaacagcagagaagaaaatatagagagagaaaggatgtggggtgtccagctctgtagttcaataatgaaacatggaaggagaatctctatatcctgttgtcttgatttataagacctttaaaattattctttaagcaaatacaacccattctgctgtaggattgcccaccctgggagagtgtgtgctgatagcaatgaacacgatctcgcaggctttgtcgtttgtactcatttgacaattgttacataagctgtctctcctcctctcaccctgcctttttcctccccgccctccctttttttttttttttttttaaaaaaaagcaatccgttcgcttgatatcactgtgccaaagattatccaggtcattcctgtccagaagtaacatgagtgttgccagaagcgatgatactctggtaagcaaacccgtgagccctggtgctcctttcttagcactgggtactcagaatgaccaagctgttctatttgttcaacctcccaggaacctgaagttgtggaaatggcaagcttattcttgatcccctcggaggggtttgggggtgctgattgatgcaccctcttgcttctttcctctttttttctctttgatttggatggtgctgtcccccctcatagccccatacctctaacactaccctccacctcgatgcaaacataagcacagaccacccccgcaacacacacacatacacac

SEQ ID NO: 47188 - DNA, 1035 bp, Homo sapiens
tgagttgtgattaaacctgtggacctgaaaggtgtcgctattggacaggaagacaccaacatgtgctttgttcctgcgtcttaccttcctgtcctggacaatcaagtgaaataaggattgcacagccagagaaacacaccgagacgtgctctttgtccacctggcttgcttctcacacctgctatgcttgtttctgcctcagacccacggaattggcgtatggaacacacacagctctccttttcagagaaaagaaactaatgcatttttctccaacaggacggaaagacggcagaagatcttgctagatcggaacagcacgagcacgtagcaggtctccttgcaagacttcgaaaggtgagaagttctgttataggtctgaagttctctacctgtgtttatgtgaaaaagtctcagtctttttccttatttgagaatgagcaaaatgaggctctagacagccaggttttaggaacagtggtccctgtcctgtggtttacatgtcagtcggtataaatgcatcagctccctatctgttttcttctctatttggacttggaaatcatttagcatgtttgcagttgccgtgcctggttttccttctcccactctctctataataaaccactcccacaaagtagcgggggatgaggacgctgactctgcctctttccttcttatgtttgagctccaagatggctgttaagctcctatttatcaaacattgttgctctgaggcttaaagaaacatgacaaaaataagtaaaggcaggtgcaccctttccagcctacaacatgacagttgtgtcaggagacttcacaatagccataccctttaatctaggaactctgttttatgcttaaagatgttcactgcagtattatttataatacagtaataaaaattggaaacacagataacccacgataatgtctagtaaagggtcctacagccatagaatagaatggctttggccttttaaatattttaagaagttttactaataggagtttattgcttggggtggggggggg

SEQ ID NO: 47189 - DNA, 1094 bp, Homo sapiens
gacaggcctcatagctttaccgagtgcataagcctgcttggtcaggtgtgctcaggtttccacacagagaggctgcaaacccacctgcagcacctggcacctggcttgcatccctgagtccccatgctgtgccctcccaggtgtatgatgccctggctcagctcacacagcgccagcacttccaccactaccgccctctggaaatccgcttaccacattcactctcaacttcgagtgctgtttaccatctaagaaactgtattacagagcaggggccagggggacctgcagtcagctcattgtgaggcggacactcagctgcagcaaggtgacctgcaacaccctgtcaggtcactcgggaaacccacctcatgcagagggaggaggcgtctcgtgggctgtgctgtgttctgctgcccatgcccccttagcaatggtcccttctttgacttaaaagtagcttactgtgcgagatgcaaacccactgtttggacgagtctgaaaacagtgaaggaatgctcagaaaaaggaccgagggagagcagtgttgcactagccggggatggtcggatcggtggtgggtggaaggtccttctcccgtcctctgtccccgttatctgcagcctgcttagatgactggcatagtgaggagtagagatgcaaagcaccttgctgcggcgcttcctccaaatcctcagtgaaaggggcttgttcccatttagaattctgagtttctgggggtgggctctcaccctgtctcagtttgggattttcttttcttctatccattggtacctttgtttttggtgcctagatttttaaaagagatgggaagtgaactattacagctataaaatacaaaatacaaaaatataaaatatattttatagtttataaaatagaaaaaactataaaatacaaaatattattttgtgttttaccattatcctgtggtctttttctctaaaggagaggtcaaggaaaagaatagtcaccttttttttctttgtttttttttgagatgaggtcttgctctgcggctcaggctggagtgcagtggcatagtcagggctcactgcagcgtcaaactcctg

SEQ ID NO: 47190 - DNA, 1050 bp, Homo sapiens
tgggaggtggttgtgcaaatgcactctccagtctgagtgacagaatgagaccctgtctccaaaaaaaaaaaaaagttcacatattagatggcagaatatatatctgcaaattgtcagtactgtcattataaattattagcctttgcacaatcctgtgattagatgggtaacatatagctgttcttgcttctatgtaacgtgaagaatatacaagccattctaaatatacacatttctctattgtgaaaaatgtcttatggaagtaaacccagaggtctcattgaagagactggagtcaattttcagtttcagattaactaatagcatttcacttcctgggatgatttataacagtggtgacttggaaatactaagctgcacactgctgagtgttgtggttctaactcatgttctccaggaggaggacagcagtaatcaagtcttttttttccctttacctttgaaaggaagaatcctgtaagtacaatcccaagtattctgttgctaatgacaccggctttgtggacatccctaagcaggagaaggccctgatgaaggcagttgcaactgtggggcccatttctgttgctattgatgcaggtcatgagtccttcctgttctataaagaaggtaagcatatttttctttgtagaaattgatgcagaaaaagagtatcatgacatacgagcatgatagactctggtttgcaagtaaagttcagtgtagatatttaggtgcttagcatcatagttgttcattctgtacatgcaatatttatacctgatgtttccatttgacattatgttgcgtatatctccatgaatataagtacttcataactttttataaatagctatatttactgtgtagtttaatatacttaaaatattctgcaattgttggatttttataatttttccaaagatttttacttctattattaaatccgaaaagagccttttgattcaaggattttagtgttctgtgctatttttttagattgatatcctagagtagaattacaagcttacaaagaggggtctttttttc

SEQ ID NO: 47191 - DNA, 1044 bp, Homo sapiens
tatcaagtacaatgtactgtacgtaattgtactatacttttttttgtttgttttttgagacagggtctcgctctgtctcccaggctggagtgcagtggcaggatctcggctcactgcaacctccacctcccgggttcaagcgattctcctgcctcagcctcccgagtagctgggattactggcatgcgccaccatgcccggctaattcttgtatttttagtagagacggggtttcaccatgttggtcaggctggtccagtactcctgacctcgtgatccgcccacctcgccctcccaaagtgctgggattacagtcgtgagccacagtgcctggcctgtactatccttttttttttttttttttttccctgagacagagtttcgctctcgttacccaggctggagtgcagtggcgcgacctcatctcactgcagcctccgcctcccgggttcaagtgattcttctgcctcagcctcctgagtagctgggattacaagtgtgagccactgcccagcctgtactatacttttgtatgactttgaacacagtagttttgtttgcagtgcagtgggtttgtttacaccagcatcaccacaaagacggctatgaaatcactagacaataggaattttttagctccattataattttttttgtttgtttttgagacagggtctcgctctggccaaggctggagtgcagtggtgccatcttggctcactgcaacctctgcctcctgggttcaagtgatcctcacacaatctccctagtaattgtgactacaggcgcatgccaccgtgcctggcttgtgtgtctgtgtgtgtgtgtgtgtgtgtgtgtgtgtgtgtgtgtacgtgtacgtgtagagatagggttttgccgcttgcctagtctggtctccaacccttggactcaagtaatctgcccaccttggcctcccagagtgctggggttacagatgtgagccactgtgcctggctctattataatattatgggactaccattgtatatgtgatccattattgactgaaatgtctctgtg

SEQ ID NO: 47192 - DNA, 1026 bp, Homo sapiens
cgcagactcggttcactgcaagctccgcctcccaggttcacaccattctcctgcctcagcctccccagtagctgggactacaggcgcctgccaaccaccctcagctaatttttttgtatttttagtagagacagggtttcaccgtgttagccagcatggtctccatcttctgaccttgtaatccatccacctcggcttcccaaagtgctgggattacaggcttgagccactgtgcccagccagtatatactagaattttaaaaaatcttgtgtgtttcttatgattagagcatctgtctattggcatttgacaaagtaactgacgtttagtttcaatctgttaataagtactttctgcctatcaaacctgttttttaccttttcctgtcctttcttgccttcttttagatgcttattttttatgtttgttctgctgttctaacttggaagttacttaaacatgaatcttttactatcaaaatctaatattatttgatactttcctcctctcctggatactctgttgagctcatttttattcacattgtcattattgcattgttttaattctgtctgtattttatcttgacaggtttaatttgtattttcaatagccatttagatttacccacaaaatttatccttttcatttcctaactagatcctccatcttgtaacattttcttctgcccgaagaacaccctttatgcttcccaccttttgtgtaacttctagtagtgaatttcctatgttagtctagacatgcctcaaattgatcttcctttaaaaaaaaaaaaaaaaaaaaaagatggagtctcactctgttgcccaggcttgagtgcagtggcgtgatcttggctcactgcaacccctgcctcccagttcaagccattctcctgcctcagcctcccgaatagctgggactacatacaggtgtgcgccaccatgcttggctaattttttttgttattttcagtagagacagggttttgccatattgcccaggctggtcttgaactgctgatc

SEQ ID NO: 47193 - DNA, 1022 bp, Homo sapiens
cctcacacccctgtctcccacccccatactctgtttctttgtgtcccattagacagatgggccatgctgtctaaatcttctgtgaaatcccagcatccacccttttctgatttctagcagcaggatgctttaggataataatggggatgtcagacagcagctgtattgtgttccagttgatcttggaagagcttcacttttgggtcttgcacatgtcccaggcttctttttttaaagagtctatcacctctttttctcctttctactttgtcatgtcctaagaacccaggtcttaggaaataaagttaattgctttgggacaaaatgcactttagctaatacttttgcttaaaattttatgtttaatggctcactaggcataattttgctctcttgatgctctagtaatgaactgtttcactattttacagagtgcttgtgatttcacgtatttttgctgaactcgtaaaagagacacttggatggtggattaaccagaacactaacattctgtgaaaagtttcaaattggagaatattgaattttcaccctagtccagcagctccgctgctcacttaaatacagatgaatgaagaccccattcggaaagacacctggccagcggtccagagctgatgcaggtaggcattgcggttctacacatatttaaatatatactttaatataattcatttcaaacaagtgtaaaattgggtactttcacataatagctagtgaaaaactttgtcatttctagtatgttatacacatatgcatatattaagaagcagatttaagtttcttgaaagggaagtagtcacatgaaatttctgtataatcctttagcaggttataaatgtctagtaaatttagcaagtgaattgtaaatatctgttaataggattatagtaaaaggagttttttccggaagagttaaagtgaggtgacatgagttggatttagtgagatttagtgtactgagagcaacttttaggaagaaagataaacttggaatttcttgt

SEQ ID NO: 47194 - DNA, 1035 bp, Homo sapiens
ttgcaaaaatctagcgtttgtattcctgaactttacctgaaagaattaccagaggatgtatctagaaagacagaatatacatgagaaaaaaatgtgaaaatactacgcaaaaagcaaccaaaaaacctttcttgtttctaaattaaaaagttactaagatagtagcaaaatgaaaataccaatttgtaacaaaagtctacatttcagcaatgcagtagaattagccaggtaaggttttaagtttttcttttactaaggattttttcttgtttggttttagtgttgctttggctgggggatgaaaagtataggttttgattaatcacagattttaatagaaaaatgaaagtttaggtataatatatgcaaagttaaagataattgttggaagactagaagcaagttacatcatttgcgttagaagctttatttagtgaaaagaaacttcaatcattctagtggcacagatgaaggaagagaggaaagtgaggaaatgaaaacagaagacaggtagacaacacagaacaaaatgttaagtatgagactcatagtatcatttaccacagcaaaggctaactcttaataagaagatgaggaaataaaatcagttcaaaagggaggaatatgcattcccagaattaaaggaccccgggtccagtttgaggaggactcttggccagatacaagccccttgtataatgctcaagagggaggagaccttatttgctccttggaggtgtctagtatgaaaactgcttattttgaaatgtgattctagccattatcaggagcaactgcagataattcccatttacagaggaatgctgctaacaggtgtgggagggagcagcgacaacgaaaaattctgctgtcataggtcacgtttatgttggttttcttgaaaatcaagggtagaaaatttcatgcctctagagagagagagaaaaacacatgaggagggaagcggggaagatttatattaaggaattggctaatgcagttgggactgaacaagttcaaaatctatagggtagg

SEQ ID NO: 47195 - DNA, 1122 bp, Homo sapiens
gattttattagtagggtgggatacacccaaactaatattacttttttttgaagtatttattttgaaatattttcttattacagtgatgctgctcttgtttaaaatattggtttatacttttagaattgtctttataagtctataccattaaataataaagtttcagcagatctagacttgggaggtaggaattttgggatcaaattgtcacaggaagaaattagttcagtctcctcgctttgtttttcttcagactgtgccattgtgtccctgggatataacgagtttccttaggaagttaattctgccttagtagcaagttattttgttttactcttctctttagatatcaaatgctaaatccttgctcatctgtataaatatggttcagttttcaaagaaatctttctttaaatttaaatctttattattactcctaaaagtaatattaagtctttgttattttcaacattctcatctattcttaagtgtgactgatcacctgctcttcctcttgatgcacatcctacatttcttcttgatcatggcattaatccatttcccatataagaaactttaacatattaaaaatcttaacagcagaattttagtctctgccccttctgagacgacagctagctcacttgaaggttcctgcatattgctgcatgacctgtggttgttggtccttttgtcatcgaaggatagaaactgtacaagtatctctggtgatgggactaagggttccatgttgtttgtagtttggtattatctctgtttccaacaatagtaattttgtaaacattcaagcaatataaaaagaaacccaagagcttttctgtaaatcagcaatatatatgcctaattcagctaatagttgttattaattttagtattcgtggtattaggttggtgcaaaagtaattgcggtttttgacattgaaattgaaagtaatggccaaaacagcagttactttggcatcaacctactttagtctaaaaaattacttgctcttcacttacgttttacgtcggaagcaattgcttcaggcagtacattagagtataattaaaattatgtttttcttaagctaaagttagagaaaaaagtcagtcagccag

SEQ ID NO: 47196 - DNA, 1050 bp, Homo sapiens
attattgctaatgtatgattatggtcagagactttcaacccaccccttcctgcctacccctggcttttcctcacaaagaatgtctagacaaacagcagcttagtctcctgacacctcttgtggggtgcatgttcctgctccaggtatgctgttcatgtggattcattccattcagtggccccttggggtttgcatgccagtgaagcgttaccatagaagagccagccgtttgtgttcgcttggtaggtgtaagtaatagcagcccttagccacggagtctttatgtggtttattcctgcaaggttgttttaaactgaaatagaactgctagtgtgattggttgatcagcaaaacagctgctctcattttgttttggaggaaccctggtggtttgacagccaggagaaaggccatatgtgaaaccagtctcttgtggagattggaaatcctccctgatatttgggcagagcctaaacgtgcatgcttgtcactcaaacaccagaagtttgaatcagaggtctgagtgacctcttttgtggctgttcttgatggtttccaggcctcgttatgcatggtttgcttgatgcccattttttgtgccttgtgctgttggatggtaacgaccactcaccatgtaaacacagtacctcagttttctgtccacagctgcagtcgctctgtccctcgtgcttcactgtgggcagccagggacaagcttctgaaagcagtgtgatacccaagtcataggtgcttctcgtatgtgaacaggtgtcattctacagatctgttatgtgttttcctgttgactcttaagagtccctgcatgtaaatctcaaagctgagcctggctcccagagtccagactgacattacagcgcaagagtttgcaagtgtgtccagcatgcaccaactgtgcagaacttggctcggtaactttgcgtggaaaaataaagtacattttgaagtatcttgagggttgggtcaattgagacatttctagcattacttaatgacttgcattgtggtttttctgcaagcaactttaatgac

SEQ ID NO: 47197 - DNA, 1136 bp, Homo sapiens
tatgtataaaatttatcggcctttctcatttacctgctctagtattattgtattgtgtgtgcgtgcgtgtgtgatgtcaggctgccacgtaaaacttcagagaaaaatcttaaaagcagaccatccttttttgcatgctctattctaagtagaatgttcaatgtaactgactaaaattgcatgttaaagatatttaggtttttttgttttctttatttttatttgttttcagtttcctgtatatttgcttactgtgccgttttagtggttttaggataaaaatgcactggtgaagcaaatgtagtgccaacagaaggtgattttccagttgtaaatgtcatgcagcatttgaagggactgtgttttcttaaaaaaaaatcacagttacttctaaaccagatttcatttcttttattgttttatgtgccaaaccacgaagtgcattgggcttcaatctctgaacactgtagacccattagaagactgttccgattgttacaaattgtagtgcctgaaaacactcttaagctgattgtcttaacaaaatgaaagttctccaaagacaaaacagaacaattattataacaaaataattatggttgaaatgtctgtggttccttggaaatgctgcgctctttgtgtttttccatcattagtgcagttggaatgaatgtgtataggtcagaggtcttcgtgttcacattttaaaattaggtaaatgacctcatctttcaagcttgaattcatttttaattttaattttattttatacaatgtgtagacagttccctgttctctgcatttagaagtatacacaatataaatctgttaattctgtaagtaatttttataattatgatgtaactctatcttatccttaaaacatttaaaataaaccctttatgtgcaactcctgactgtaaagtttgtgctgatgagcaacatgtgatgtgttaaacttgattctgaaaagttttttgggccaagtaaccttttcaccacatgtaaatgtcagatatgcatagaaagaaatagaatttttatttgataacattcaataatacctgaaagaagaggaggcagtcatcaatatcacacatatattaaatattgaagtttgcaatttgacattgaga

SEQ ID NO: 47198 - DNA, 1050 bp, Homo sapiens
tatttattgcatgcgtcgcttccacaggggcccctcaagagctgtgactcgggagagctaccttactttgaccaacagcctgcccagtgtggatgtctcttacagagggggcccaaggaatcaccaccccgcttcagtgtaaacaacgtgccttgtccactttgggctccagagtctttcagatgtactaagctgctgacatcatccactgccttctgctgcatcctagacaccctccctgttgttcacagagagggaaggtcgtgggccacacaatgctgtgtgaccctctccgtgtgcctctgaatggtgttttgatgattttacactacatttcctgtgcgtagaatggatgcttgtatattcgtacatctctatgttacacagaatttgtgttgcaggtgtttgccatgtggtacctacatagaatctccatacaacacacaggtaacaggttatacaagtggattcagactgaacccccagtacaaggacattgttttgaactaggtggacatgccatccctggtctccttagactgacatgattctcatgttaaccaagttttaaaagttcaaattccccaaaaaggcttgtccaaggctggccccagatgtgtgggtctgacccacaccagccctgtgtcctgtcctttcagtcatttgtccctgcgtaattttaatcgtattccaaagcccaattatgtgatggttttcaggtttctgcaaattacagaagagccagccaagatcacccaggagcttgtgcccccagatgggccaaagaaagagcctatgaaggagaagcagaagcagacggctggcctggctcaccttcccacgccagtggggcaggggtctgcttcaggaaatggaagctgtccaggaaatgagcagagattcacaagacagcactttgattctatgttgagtttgtttctatattagaaaagcagcaagtcagtaatcccccgtggcatcacagctaagtagctgtggccaccggcagtttcacagcatcctgaaagctggcactgatcgtgactatca

SEQ ID NO: 47199 - DNA, 1047 bp, Homo sapiens
tgtggcccacgcttccggcctcgaccgactacgtcatcaccaaaccccgtgatacctcactccaccttcaggtcctccgtcccaacggttccgtgtcctggaactttccacgttcctgcgcacgcgctctgcggcccttaacgtcccgacttcgccctcctctggccacgcccctgcccgttaagggccctgccacccccgtgacgtacctatcttccctcgggcaacctcgcaacagatctctgattggctgacccaggaagcggactttgcgaggcggcggcgacgataggctggcagccggccgacttccgcagaaggtgattggtcggcgctgctgtccaatcggcggcgggctgtcggattcaaatccggatcgttgggactgcggtcgttagtctccggcgagttgttgcctgggctggacgtggttttgtctgctgcgcccgctcttcgcgctctcgtttcattttctgcagcgcgccagcaggatggcccacaagcagatctactactcggacaagtacttcgacgaacactacgagtaccggtgggcgcctttcttagaccccgagccggctccctcagccggggcccccgcgggcggggcgacccaggcatagtagggtcgggggtgggggccggggcctggggggcggagcccggggccggagggcgagggccggggtttggggtcgcggccacctggcgccccgcgcagtcggacatggttgggtgcctggccgcgccgggccggttgggcctttgttcggtgtgcgcggagggtgagggaagagtgcccaccgggccgcatttagtacctgggtaggaaccggcgcaacttgggggtcatggggtcctcggcgacgcggagtgaccatcccgtcacttttttctcggccgtggccgaagtaattaggccgttcagtagctggtctcagttccagttctttgaaccagtccaggaaaacccacctggtgccgtcctttttcctttagcaaccgtgacacactttccctgtcgctgacggggtgatgcagctttta

SEQ ID NO: 47200 - DNA, 1047 bp, Homo sapiens
tgatgaaaactctacaaattatggtagtaagctatgacttggtggccttaaggcaatctaacaacacagtagaatttttctgaggctcactttgccctgcaaataaattggtacttaaccacagactaaaatttaagttgatgacagctgggtgcttatagcgggttagggattcagtttactgtgtctcagaaagtgaccagattgcacctcattcatccccagccagctgactcacagacagatatcttatactggttaaaaatttgggttggtggttatggatggttcagtataaaactgttgctactactgcaggtggtaaacatggagctgagaattgtgactttcataaagtcctttttatggtaattgagtaaaaattcttactcaatttggggaaagagatttgttaggcaaatctttgatagaatgctttgggatactgttaatgatacagatttgtttttgagaatctcgtaaggctacaattatacatattgatggtttaactttgaaggttattccatgcttgcctaagaaactgaacaatgtaagttttggatataggtcagtaaattaactggaaaacggtgaggttgcacacaatgtgtatgtacagttagtggttttctgtttttaattttgaacaaagtacttgaagtataaagcaacttctggagcatacaaggactagtagctactacaaagctagtgttgagtaagaggaaacccaaattaactgtaacttagattttttcgttacataaaagtctaataatctggggcagggataacagctttacagtcaaggactaggctgggtccttacctcttgttgctttaccgttctcaatttacagttgcttctatggtcctagattcctgctctggctccctgatcatattaatgtgcattcaacaagaaggagaaaaagagttcagcatgttctttccctttgagaacacttttcataataagttacacattttcttatatcttgttggcttatgatttggaggctggtaaccatatgttcaacttat

SEQ ID NO: 47201 - DNA, 1056 bp, Homo sapiens
atgaaatgtggagggaagggcaaagaaaggaccaaataaacgtactcctcctttttaaggttaacattttaaaatcttgttgagcgaaggggaggggactagcaaccatagctgcctctgtgtggataattttttggaaattgttgacttttgctttccacctttttactttatatctgttaatatggagatgaattttacacatttcaggcttaagttcttctaaatttgagttgaaagaaggcttacatttttccttacattttctttttccttctcaggattcattctctaggtttacaaaatggcttcctcttgcagctgaatttagacaaaaaaagtattaatctttcacataattgtgtagatttatttgtagatctgtttttaagatttgcatcaggtgtagttctaatctaagaatcctaatgcttttttcttctttgatatgattctaacttgtttccttttatttgtgcctgcatgatgtaattgaaaatagtttgtactgtatataaattctagaattatatttgcaagaatgagaattgtaatgaataagaaaatgattgagttgtcttttgtgtttaggaaatactgaaagttgtatttttttgacgaaagttgaaacactacctttatatgctggaatttggtctttggtaggaataccctatttttccactgtatttcatccactgtaaaggggagtttggcatgggtctcacttgagttgttccctaccttgagtgtctcacataacaaaatacaaaaatatatctcagtgacaagagctcaaagccatctgctaggtggtatttagttactcaaaatagtggtggaaaacattcacatggctaaaggaacattttggcagtaacatgagtggagactaatcagagactcaagaatgggcagtgctgaatttaaaaattagttttcttggccgggtgtggtggctcatgcctgtaatcccagcactttgggaggccaaggcgggtggatcacgaggtcaggagttcaagacgagcctgaccaacatggtgaaaccccatc

SEQ ID NO: 47202 - DNA, 1033 bp, Homo sapiens
gatcatacatgagaacagaagttgtaaatggggctgttttggggaatggatgttaaatttgggatttatacgtgctgaattgggaaaaagtgaaatagtaagtggaaatgacctgaaagttggagatggaggcctggactagggaaggtgctggattgtttatatttatgtcaagtcctaagcagaaagataagaggttctgacccagaatgtgtcagatgggtgagataaggagggtgtagaggagactgcactagggaaagagacagagatagagccttggagggcaggtgagagccaggcgagcaaagtccaggccagggagcttttcaagtcatgtgatggtcaagccagacccaacgggtgcctggagggagaggcaagaaggaggtcctgggagacctggaagccgttggtgggaaaggggcaaagggaagtggagccaggagaccagcaggtattgcacaattactcagacagtttgattttagtatggatggggtagcttaggacagtgaatgagaaacaggtgtgttactgtgggtttagggtcatctgggccactcctggcatctggaatttcccagacatgccatttgaagccacgccagatgctgtgagttactgctttgatgttttgtattttgtgttgttttctgcatgtaattgtgtttgcactggatggaaatggaaaataccaactttccagaggaggaaggaccagtgaggggacagaaacccaaatgacttacccagaatagaaaactggattgtgattgagctaggaccccaaccaaggtctcctgactcctggatgaaaatttcctggatgacagcagccgtcaaaaccaatggaacctgtccctgctttcctttttagctacatttcatttgtctgttcatttatctatttattggacttgggacagtctttttcacatttttttttctgtcaactcatcttttatgaagaacagattatccaccttcagtgacacttgccccccactagcttttctcaactacaaacaaa

SEQ ID NO: 47203 - DNA, 1039 bp, Homo sapiens
ctttttcattttatctttacatcagttttttgtaaaaagaaaagcacagtttgtatagttttataagtaaacttacgaattttgaactttcaggataattttaaaaataatgtaaagaagagccagcttccagtgcagttggacttggggggcatgctgacagccctggagaagaagcagcactctcagcatgcaaagcagtcctccaaaccagtggtagtctcaggtaagagagtctttccatctcaggcaagtgattggaagtctttttcagctagattattatgttaccattttctcttgttatcaaaagttatttatagataaaacagtgtgatgctagaataagcatagataaggacctgtggaatagaattaagagtccagaaataaattcatggatctgtgaccaattgatttttcataagtatgcaaagtccatgaatagaacaaagaacagtctctttaaaatggtattagaacatctagatttccacatgctaaagaatagtcatacctcctacctcacaccatagatccaaatgaactcaaaatgaatcaatgagctaaatataagagctaaaactataaaactcttaaaagaaaacgggtaaatcttcatgatcttttattagacattggattttcagatatggcaccaaaaagatgggcaacaaaagaacaataaactttggacttcattaaaattaaaaatttttgcataccgaaggacattatcaagaaagcggaaagacatcttacagaatgggagaaaatatttgcaaatcatgtatctgataggggattaatattcaaatatttaggaactccagctgaatagcaaacaatccaatttaaaaatgggcaaaggactggaaaagacatttctccagaagtacacaagtggtcaataagtgcgtgaaaagatactcaatatcattagtcatcagggaaataaatattaatcaaaagtacagtgaaatactatttcccacctagtgggatgattataatccaaaaacagaaaataacaggtgtc

SEQ ID NO: 47204 - DNA, 1044 bp, Homo sapiens
cagaggtgaggatcctcccttcccaccaggtttgatctgtgtgatgctggatggtcctctaacttgaagtggtcatgagaattaacaccgctagctgcacagctgcttaccagcaagtattggagacgtgggggcgtgaacacaattgtgtgtttttaaggaaacttcatattcagttatacattcagaaaagtgcacaaatatcagtgtacagcttgaagacttttcacagtgaccgccgcattcagatcaagaagcaaaacacagcccagcaattgcttgtgccctcttgtcagaggcctcccccaggagaccctgccccatggcaaccccaccaggggctgtggctgtggctctagtgcaactgtgtgttacgtgctgctctctttgtcccctttccttcagccttgctggcaacatggagatgccgtttattttcattactgtgtaaaattcggttggacgaatgtacagggttgcggatgggcattcaggcattttccagtttgggtaattagaaacagggttgctgcggacagtgttgtatgtgtcttaaaggacacaagcactcgttcctgtggggcattacctgggagcagaattgctttagtagctcctgcccaatgggtttctgactgttctaccagttacagccccagggaggctgagagttgcaggtgctccccatctctaccagcccacggggcactatgtttttcaaccttgccattcttgtgggtgtggtatatgttttttcattccttcatttggtgatctgttactgcaattgcattttgatagtcggtagaagtaactagttggggacagtaagctatcactgcatcagatctggtgtgtttaaactaaacacacctcttgagtttctcatagtttagatgttggagttcagctctttctaaaggattatttcaaaaagaaatggtctcaagcatttgagaaaaaacttagaactaaaatcctgttttttaaagctccctgataagagattcttcaaaatcaaaaaataaatttggccactgaact

SEQ ID NO: 47205 - DNA, 1029 bp, Homo sapiens
ggtgttaatcttctctaaaagcctggtgatacagctctggctttctgagcacactacggatctggaaaatactggaaaatgtgatacttagaatactttggctgctaaggaaacttcctctccattgcagaatagctgagccaagtgagtgagtttgcagaaagcaggtggtgagctcctgcctgctggaggttgccatggagggccattcctgcccggcaacagcaccgtcctgcagggagccacttggcagaagggtgcagggctgctggtgtcagagcaagagggctacagggaaagggccctttctcaggggatgtagcttttttaaaagatttgggaacacttggaggatttgctaaaatgagcctcagaaggaaaattggttttctaacctgtgactttttgaaatgaattattcctttcagtctttatttttcaaagaaacaatgtgtattgaagtacctagatttgtttgataatcaacaaatctttcctttttcaatgaacatattctgaatgtggtttctgtcttagaccaggaggacagagtttgctttcatattttccctgtaagtaagagggcttatttattttaaataaagagtaattattaaattttgtttcagactctggtgattttaggcttctcagtggtctctgtcttacttgatgattcctatgtcttaatttacctcctttggacagtctgggccctgaaataaaagggggccgcgtagtgggggttctgctatccccagcactcctaggtctggaagtagtgattgtcaaagcctccagcactgcacagacctgccggagccagatcctggctcaatcccaacctgcacttgcgttttcaccacagccaatggcaggaaagaattttcactgctttttgtattgttttggctttgaaagtgctcttaattgaattcagtcttggcaatattgtacctcttgagaagcggcctgtgatgagcacataaaattggaatagtgagtcagaaatgacatgctatgagcagg

SEQ ID NO: 47206 - DNA, 1062 bp, Homo sapiens
aagtgttttaagtgagaaatctttgtcagttgaaattattttatcaaatcatttttgttctgaacggcacttttgttttaacgtatttagaaaactcttgcattaaaacagaaattgatttgtattatcccctgtatttgaagtgcactttaaagtgtatttgaatgagagattataatcaaattacttgatttgtgtcttatcctcttactcttctaccttggatttgaaaaggttggatttgaacactaggaaaaaagagatttttctactgagggattgtgggaagatttttttttaagcctctgtatttgaagtgaaatataaaataggattttataatagtcttaataactagaaagttttaagctaggataaaaatggggtgtatactttaggtctttatctttcctgagagatgaaattggtagaaacgttattttattgctagatttcactttagaaatgaatcaccctgatctttgttaggcccctatttaatattctaaatgcaggtctaatctctctgcttttttttaatggaagacttcttagtagaacttcacttatttagcacattgtttgcccatggttataatccaatatgcttgtgccaagacgtattttggaattcaagctttttcagaatttggaattaaaatttagaatctaaatttcagaactgagaaagacattgctcagaatttagaaaggtaaacatacatgttgaccctgctggttacatgccattccaatatagtctggagagaatcctgtaattccatgcattaatatttctgtacttttacatttaagaacatgaatattctcactaagtggaataaataaagactataaagagctgtgtgtctgtttagagcaggtgttatcactacgagagcttctctaagacttaccaaaaaaaaaaaaagtgttgtttttcagagctttttagagctgcagctgagggactgagtctgtattagactccactgaactacggtttgcttttaaaaggaaagtgcatttatgttgttcaatacttcacactttccagtaatt

SEQ ID NO: 47207 - DNA, 1051 bp, Homo sapiens
gaggctgaggcaggagaacagcgtgaactggggaggcggagcttgcagtgagccgagattgtgccactgcactccagcctgggcaacagagcgagacttcatctcaaaaaaaaaaaaaaaaagttaagaaaaagttaagtgtatattgaatgcacaaaatatatgtagtctattttttcatttactaccataaaatgtgtacaactctattattaaaattaaaatttatcaaaacttacacataaatacttatatgccattcacagtcgaggaaaatgtaaataaatataaagatgcagtattaaatcataattgcataaaattaactgcagtacacactgtactgctgtaataatttcatagccacttcctgttgctattgtgatgagctcgagagttgcaagtacctgcctaaatcactgtgtgatgctcatcatctctgtgtgagcagttcatctctccagtaaattgcatattgcagtaaaaagtgatctttaataagtgatctcttgcagttctcaagtatttttcataatgtttagtgcaataccgtacaacctgaataacaccatgggtcccatgtgaagggtcacagtgaggctggaagtgctcccaagaagtcatgacattataagaaaaagctgaattgcttgatgaggattgtagatggaggactgtagccatggttgcctgccatttcagatggatgagtcatcttgtaaacagatgacagtaaatttatggtattgataaatacagtacagtattgtaaacatatattctattccttatgattttcttaatgacattttcttctctagcttacctcactataagaatatagtatatgatacatataacatgcaaaatatgtgttaatcagttatttatgttataggtaagccttctggtcaacagtagactattagttaagttttgggggagtcaaaagttacacatgaatttttactacagggtgggtggtcagcatccccacattgttcaagggtcagttgtatattcactgtggaaatcctaaaaagcaaagagc

SEQ ID NO: 47208 - DNA, 1051 bp, Homo sapiens
gaagtgctcctttccatgatagctctttaatacattagttaaaacgattcccaggaagcccttgttccaagtatgcaggatcagataaaaagcgcagaaaccctcagagcagggaccgacggtgagtgcagtttgccctcagaggccttggtagtcaccccttcccaacccccatgccaccactgaatccccatgtggcttgttcttatatgccctgcagctgaaattcaggtgccctcctgaccttccttcccctgtccattttgaaaagaaataagcagtgtaatctttgagtcatcccttttgtactagccaagttccaggtgcagcatgacacactcgttatctccacctctcttctccccttcctttccctcatgtctgcacacactcccatcccctcacttcttccccctacagcccgcctctctctctctcacacacacacatacatacacacacacacacacacacacacacacttgagaaccgcggctgcatatcatctcctgtggacctgtgcacaacctgtggggcccaacttaaagtactgcatccattctccgtggtttatcctaatttaggtttgtttcctggtcatatagaatactgaagtatatgtctttaggaactgtctcaatttcttagagaaatgggatatacgtgaataaaatttttatgattcccttatactgagtcccacttgcactgcaaaggattaataacatctgtttccaaagcaaggcgtcacctgccatgcaagccacctgctggggaggggaggtgaagggtgtgagcattggtgagaggtgttgttctcatgttcaaggtgacaggtatgttatctggtgtccccaggctgggtcccacccagggcctgctcctggacgagggctgtatggctctgatttgcacacccctgattctggtggacacaaccctttttcttagaaagccagaatcactgtatcttctagtccttagctgcataaaaaaatggggtgcaaaacttctctggactgtctattcttattgttcattggtttatcct

SEQ ID NO: 47209 - DNA, 1031 bp, Homo sapiens
tgggcaccttatccactgctgtataacaaatcaccccaaacttactgccaaaaacaccaccaggtgttggtttccctgccgtcctgctgtgtgggcagggccaggtaggcagggttcagtgcgtctgctcacacaggggattgcacagtggcccgagggacaggaggaccgtttccactctgctcactcacactactcagccactgagcagctggttagacacagcccatgctggagacctctgcggggctgtcagccagctcacctgcacatggcctctccttggggcccttgggcttcccttgggcccatgcttcccttgggcagcatggcagctgcgggctgagagcagttacccaagaggcaggaagtgggggctgccaggcctataaaaccaggcccagaaactacctcagggtcacttccacctgatcctattggtcagagcagccaaggccaccagcttcaaaggatgggatagatagaaccacccttttgaggagaagtgtcaaagagtcaaagaacatggggccaattctaaaactgctgtagatattaaacagcataccattaaaaagtaaactaaactaaaaagtaaaccaaagattgtctttggacaatcaatgaagaaaaaaagccactagggaaataaaagccatcttggaagcagcaaaaagagacaaaactaccgaaaagatagggtagtggaagatttctgtatgaaaacaaagcaaagtgaaatggaaaagaataaaaagtgggccgggcgtggtggctcacgcctgtaatcccagcactttgggaggctgaggtgggtggattacctgaggtcaggagttcgagaccagcctggccaacatggtgaaatcccgtctctactaaaaacacaaaaattagccaggcatggtggcaggcacctgtaatcccagctactctggtggctgaggcaggagaattgcttgagcccgggaggtggaggttgcagtgagctgagatcgtgccactgcactctagcctggccaacagagcaa

SEQ ID NO: 47210 - DNA, 1027 bp, Homo sapiens
gacttttactagcttaaaagccgcagcatgaagattaggcgtagagtcttgacaaagctaatgtggtttgaatgggagatttcagacagggacatcacaagagttgaaatgcttttttcctgtgagtaatatgtgctcattttagcaaacttggaaaaatatagaaattatgaagaagaaatatcattttaaagccagaaatctaagtagttataggagtttcttgaaattaattgcaagtaattcagcaagagtaatggtaccggaagagaaatatcttgttttttatttttttgttctttttcctttgttttttgtttgttttattttttcgagatggagttttgcactgtcacccgggctggagtgcagtggcgtaatcaaagagctttttgaagtcattattgttttccatagctattagttgggcagacacagtttctgtggtgtgttaatgaatgtagctgaagctaggtaatcaaatgatcttgatttccttcaaaataatcatgtgaagaatgtagactttattgcagctatgcttttatttctccaaacattttttagaactttcttttggaatttccttcagtgcctatgatgattcttttaaattctccattttgattctgtaagagtcggtttacaaactaagtaatggaatttggagtcgaaaattaagtgttactgcaaagtaatgagagtagggtttttttttttttttttgagacagagtcttcctctgtcgcccaggctggagtgcagtggtacaatctcagcttactgcagcctctgcctcctgggttcaagcaattctcctgcctcagcctcccgcgtagctgggactacaggcacgcagtgccatgcccagctaatttttgtatttttagtagtgacggggtttccctacattggctaggatgatcttgatctcctgacctcgtgatacgcctgcctcggtctcccaaagtgctgggattacaggtgtgagcccctgcgcctggccgagagtagtattttaatttat

SEQ ID NO: 47211 - DNA, 1030 bp, Homo sapiens
ttttaaactttttacttcttttgcctttttccatatgttctaagagtctatttcttaatatgtcttcaggttactgtctagtgtcctttctttcactctacagaattctcttgaccatttcttacagagaaagtttaatgataaccaactccctcaacttttgtttgcctgagaatgtcttaatttctcctgcactttttttattttttgttttatttttcttttctccagccacatccctttgatcatctccctcattattattattattattattattattattattattattattattattttgagatggaatttcactcttgttgcccaggctggagttcaatggcgcgatctcagctcaccgcaacctctgcctcccgggttcaggtgattctcctgccacggcctcccaagtagctgggattacaggcatgcgccaccactcctggctcattttttttgtatttttattagagatggtgtttctccatgttggttaggcttatctccgattcccgacctcaggtgatcctgccttggcctctgaaagtagtgggattacaggtgtgagccaccgcacccggccactatctccctcactttttaaggacagttttgcagaatagaaaattcttggttgacagatttttttttttcttttagcactttgaatatatgacctcactgacttctggcctccatactttctgatgaaaaatctgctgatcattttattgaacatcccttgtatgtgaccagtctcttttctcttgctgctttcaagatattctctctttgtctttgtcttttgacagcttgattataatgtttctctatgtggatctcttagttcatcttggagttctttgagtctcttggatgttttatattcatatctttcatcaaatttgggatgttttaacactttattctgtctgcttcttcctctctttttttttttttctgagactcctacagtgcagaagttggtagtttgttctcttgacatgtccccatgtcccacagt

SEQ ID NO: 47212 - DNA, 1049 bp, Homo sapiens
agtagagacagggtttcaccatgttgcccaggctggtctcgaactcttgagctcaggcaatctgcccgccttggcctcccaaagtgctaggattacaggcatgagccaccgtgcctggccaagtttattattttcataccaacttgtcataaatcccttctgtaattcctgtctaaaccccagaatattcaaatgttctttttgtgaaatgttgatcagctcctttttttttggagactgaatcttgctctgtggcccaggctggagtgcagtggtacaatctcagcagttcactgcaacttctgcctcccaggttcaagcaattcttgtgcctcagcctcctgagtagctgggactacaggcgcccaccaccacgcctagctaatttttgtatttttagtggagacagagtttcaccatgttggccaggctggtcctgacctcctgacctcaagtgatccgcctgcctcatcctcctaaagtgctgggattataggcgtgagccactgaacctgtcctgatcaacttttataggtctttaacatgtctgttattcaaagagtgaccaactcaaattaatattttcaaattacaactttaaaacaaaaaaaaaaaggccaggcacggtggcttacgcctgtaatcctagcactttgggaggccaaagtgggcggatcacctgaggtcaggagttcaagaccagcctggccaacacccatctctactaaaagtgtagaaattagccgggcgtggtggtgtgtgcctgtagtcccagccacttgggaggctgaggcaggagaattgctcaaacctgggaggcggaggttgcagtaagccaagatcacgccactgcactccagcctgggtgacagagcaagactccatctcaaaaaaaaaaaaaaaaaaggtgtatctgcttttaaaaagtcctctaagagtcccttaacttctgagttccttataagaaacatcagatgagctctgatgtaactttaaaatgtcccttaaagttgaataaagataccttaattgtaatgaaaaatgaaaaa

SEQ ID NO: 47213 - DNA, 1097 bp, Homo sapiens
aaagtgtagagcttttttttttgtttagttttctttttcagggcatttattctgcagaatgcctttcagttggcagaggtttctcatttttggcaggagtaccatggatcgtcagtgctgtgtgtccaaaagcacatgatatctgtttatcccattcctgataatatctttggtcacttggttcaactagtatttgccatgtttctcactgagtaaagttaatatttttcacttcataacaagtaattctggagaagtactttgagaatctaaatgtctggtgtgacattgtactttcatatactagttttagcatccattgatgattcttacccgaatcatttgtgactaaccaaatagtgattttctaattccatcattccttctacatttgttagttggcactctcttcttatttttatatcaatatgaacttgttttatatattttgatatattttattattttatttacttacttatttttgagacagagtcttgccctgttgctcatgctggagtgtggtggtgtgatcttggctcattgcaacctccacctccccatttcaagcgattcttctgcctcagcctcctgagtagctgggattactggcgtatgccaccacacatggctattttttttttttttttgaatttttagtatagacaaggtttcaccatgttggccaggctggtctcgaacatgacctcaagtgatctgcctgcctcggtctcccaaagtgccgggattacagacgtgagccatcacacctgacctattttgatatattttaaatatatcaaataaacatgtcaaattttattttttgaattttttttcttttttttgagatgaagtctcgcttcgtcacccaggttggagtgcagtggtgtgatctcggctcactgcagtctccgcctcccgggttcaagcaattctcctgcctcagcctcccaagtatccgggattacaggcatgtgccaccatgtccggctaatttttttgtatttttagtagagactgggtttcaccatgttggccaggctgctttcgaactcctgacctcaggtgatctgcccgcctcagcctcccaaagt

SEQ ID NO: 47214 - DNA, 1046 bp, Homo sapiens
ttcaaacagaatcactcaagagttgctgatgctgcattatagatgccagtttgtcaaaaatccagaggttgaaaatgaagaagataatggatttgtgacttctgcagcaccctattcttgcctgcgtggatgttaaatttatgcgatgatatacataagtacttcttaaaaattaattgaggtaactgaaacttaaaccagagatggcctttacatttattaagactattagatgagtcagtcgcactttaacaaacaatatttaaaataatatatgaaaagtaagcctaccgttgtagctgttttgaagttttttgtggttttcctcaatagatgttcatgtctgtgcattagccccaagtgggagggtgaatgagaaaagctatgtcttgatttcaaactgctgagtaaaatttcagggcccagcagctttaagaacagtttccatgtggtagagatctttgccagcattctttctctagggtgaaatgcagtgtgttgtactagagaactgtgcttaagttatttgttgtaactgctgcactcagtctgcttcaactaatttgactataaacttgtgtgattttattattgtgtaataaacattcatgttttggtgaatattagtttatgaaaaatgatatagttttaaagtcatccttttcattttggtgatttcccaggagatcaaacaatctgctttttgaatgaaataggacaccaaatgacaacatagtccatgttgttaattttatgaggattaaaaatattgccctaataccataattaatatatagccagtgtaatatatttttccagtgtaaaaattagttttagcacaaattatttgatagttttgtcatttggattttttctcccctttattttagttacatataagaaaaactgatgcataaaaattagctttttaaaagtaaatttgatttatagtttttgaggttgatagtaaaagatacttttgtttgctgaatgaaggaaactttataaaattactttaatattgaaattggcttttaaaaattaaa

SEQ ID NO: 47215 - DNA, 1046 bp, Homo sapiens
tgcttgttacttgcttctacttgttacttccagtgatgctttatttaaaaaagtaaattccaaacattgatcttcaagattggggatgatctgaccttggcctactacttgcccattcttggaatgttcagtttgcagcactgctggtttctgcgctgtacccacactggcttctttttgaccctcacattgccatgtttctgtctcactatgacctttgaaggagcttctctgtctcttgaggatgctaggcctctgtacctctcaatcttgttgttagctaactcttatctttaagacatcagcttattccagttgcaattaattatgaatgtaattatttgtctgctttctcctttctgataagactcttttatgagctaccatgtccccaaactgtctgtcaatagtgggtgctcaataaatattgtttgaatgaatgaatgaatgcacagtaccctccaatgtgcatcttcttctccattttctgaatgtttctattttcctgactgttggaggaaagatgcctccagacaatggcctctgtaccaattcaggggaataatcttactctcacctcccagaccttacctggtgaactcatcagcaggcctcatatggcctatatgtgaaacaaacttttattaacataaaagcatgaatacagaaacactgaaaacagaagacaatcagtgaatacttggctaaagtctacagaacacagagaaggtaaagaacaaatgactgttatccttaactcagcatctgaattacctgaatataatcttgtcattttcaggccaagtgcagtggctcactcctgtaatcccaggaccttgggaggctgaggagggcggattacctgaggtcaggagttccagactagtctggccaacatgatgaaaccttgtctgtactaaaaatacaaaaattagccgagcgtggtggtaggcgcctataatcccagctacttgggaggttgaggcaggagaattccttgaacccaggaggcggaggttgcagtgagccgagattgcaccattgca

SEQ ID NO: 47216 - DNA, 1126 bp, Homo sapiens
tggcaagttgaacatttgctgggtttgatgatagtaaggaaatattgtcaattattttttggtatggtaattgtattgtagttaatgttttaaaaagtagagagaggtattctttctaaggccgaaataacccctaccccaaaatttgacaggtgcatcacaagaaaatagaattacagtccagtaaacacacaaatagtaaataaaacattataagttaaaatttagatatatataaaaacaaggccgggcacagtggctcacacctgtaatcccagaactgtgggaggccaaggcgggcaaatctcctgaggtcaggagttcgagaccagcctgaccaacatggagaaaccccgtctctactaaaaataaaaaaattagccgagcgtggtggcgcatgcctgtaatcccagccacttgggaggctgacgcaggagaatcagttgaatccgggaggcggaggttgcagtgagccgaggtcgcgccattgcactccagcctggacaacaagagtgaaactctgtctcaaaaaaaaaaaaaaaaaagaaaaaacaaaaaaaaaccactccattatgatcaagtgggatttgtatcaggaactccaaattggtttgaaaaagcccagtgtgattcataatattaacagaataaaggaaaattatatgaacatcttagtaaataaaaaacatttgatacagttgggcacagtggctcacgcctgtaatcctagcactttgggaagccgaggcaggtggatcacgaggtcagatcaagaccatcctggctaaaacaatgaaaccccgtctctactaaaaatacaaaaaaaaattagccaggcgtggtggtgggtgcctgtagtaccagctgcttgggaggctgaggcaggagaatggcgtgaacccgggaggcggagcttgcagtgagccgagatcacgccactgcattccagcctaggtgacggtgcaagactccttctcaaaaaaaaaaaaaacattggatacaattaaatacaccattatgatgaaaatttttaggaaggtgacttaatttgatagagggtatctacaaaaatatctgccactaacataacatgaggaaatactcaactctcttctccccaaaaatt

SEQ ID NO: 47217 - DNA, 1036 bp, Homo sapiens
tgaggtaagtgtttgagatgtggattttgaaggactcaccctaaaggtaatgattacaatggatgaaatttttagggaataaagagaagagaccaaatgaaggatattggggaacactagccactaaaggacaaccagaaaagcataatgtgtgttagcaaagttgtaaccacccaagggtttcttccagcccactgcacaaatgaagactgcagcattgtagtaaagaaagagtttaatagacacaaggctggccacaccacgtgggagatggagttagtactcaaatcatcttgtgggttaggggtttttctcttttttctttttttttttttgagagagtcttgctctgtcacccaggaggctggtgtgcggtggcatgatttctgctgactgcagcctctgcctcccaggttcaagcgattatcctgcctcagcctcccaagtagctgggattacaggtgcccaccactatgcccagctaatttttttgtatttttggtagagacggggtttcaccattttggcaggctggtctcgaactcctgagggttaggggtttttcaaaggcagttttggagaagtggtcagggaggcaaggcttgctgctgattggttggggcagagatgaaatcctatgatttcatctctaggggggtgtaagccgttctcctgtgggctgaattgcttctggatggggccacaggaatgggattggaaggtccaggtgaagccgtaggtgtcagccatgcaaaaaaacctgaaaaggtatcccaaaaagccagtctacaatagttacgttatttccaggaatggctgacaatctatgtctacaccttagcagaatcgggctcctctcttcacccagttcatggccttccattagctttacaaaataagctgagttttgggcaaggtctattacatttaaactatagcctaaatgtcttccaaagttagctcagcccaaaagcacagtgataatttaaggaaagggaagatggagggtaggttagtcagatcttttttactgtca

SEQ ID NO: 47218 - DNA, 1076 bp, Homo sapiens
attttaatccccaatgttggaggttgggcctggtgggaggtgattggatcatgggggcggattttccccttggagcagttctcatgatagtaagtgagttctcatgagatcaggtcatttaaaagtgtgtggcacctcccctttctctagccaagtgaaatgctgctcccccttctccttccgccatcattggatgcttcctgaggcctccccagaagcagactctgccatgcttcctatacagcctgcagaactatgagccaattaaacattgtttataaattacccagtgtcaggtatttctttatagcagtgtgagaatggactaataaaatcagctattattgtttaatgttatttgtataagataattttgggaaaatagattaaggagaattgttaggtcagccacaacagattaaggtccatgtgaatagaaaggtaatacagactgaggtaaggcaattctttctttttattattattattattattatactttaagttttacggtacatgtgcacaatgtgcaggtaagttacatatgtatacatgtgccatgctggtgtgctgtacccattaactcgtcatttagcattaggtatatctcctaaagctatccctcccccctcccccgaccccacgacagtccccagagtgtgatgttccccttcctgtgtccatgtgttctcattgttcaattcccacctatgagtgagaagatgcggtgtttggttttttgttcttgcgatagtttactgagaacgatgatttccagtttcatccatgtccctacaaaggacatgaactcatcattttttatggctgcatagtattccatggtgtatatgtgccacgttttcttaatccagtctatcattgttggacattagggttggttccaagtctttgctattgtgaatagtgccacaataaacatacgtgtgcatgtgtctttatagcagcatgatttatagtcctttgggtatatactcagtaatgggatgtctgggtctaatggtatttctagttccagatctctggggaatcgccacactgacttccacaatggttga

SEQ ID NO: 47219 - DNA, 1033 bp, Homo sapiens
tccatgaaatattttggaacccacaaaatgcttgcaaagacacttttaaatatgggatattatcttttgtgaaataaaaaaaagcaaatataaaaaatccataaactgtatacttacaaacactcataaacaaacaaaaacaaacctggcaggaatatacctgattgatgataaactctgggcactagaaccatagatgacttgtgttttcctttttcctttaactttcataatgagcaatgagtattacctttataatgaaaaagctaataaacatcgtaaaaacagaaacagattatcttacctaactctgtattcccaaaatctttctattgccttaatgtattcagtgtccctgaaggaggaatatcttcattgtctccttagacaacatctggaatttttccttaactgatttctctccacctttcccaacctcactctcatagttggtcactttttccacaattggtatctttttccttctaatctgttccattgtctaatatttgatccaaactgtctgatgtccagactattctttcttactcatctttccactgagttcggtttgcttgttttgtttttggggggccaggttgttttcagttgcatttttaaaatgcacacaaaacagaactatacaaatgagaaccttcagagcatagatttattgccatatttacatatcctaatttttaaattattacctgtgaaatgtgtatattctttgaaaatttcaaaaattaaaaacattatgaaattattcaaaatagatgcatcctagagatgctcactggtgaaactgagtcctggcaggagggcatccactcaccaccacagcagagggctccgcagaccctaatagtccaccaggctacagtcacctaaatagtcctccaggcctgccattgcccgagtgccagagagcagctgagctgcaaaagacttctatagtcagccaggattggcccagcctcgggaagacctacccctccaaatcccaactggttgcaatttcccagaaccaaaa

SEQ ID NO: 47220 - DNA, 1035 bp, Homo sapiens
cttttttaatcaccagacgagggctagaatgtcctactgtcattagttattaacctgataattactttatttaatttctcatatgctccaaaaatctaaatggtggcatgaacatttgcccactgggtagctggatggcactggtcaggtatgtgtgatattcctgtgataatccacactaacttatgctaggaaggaggttacaggacagatctgagaatggcaagagttttttatattttaataatcctatgctgattccaatttcaaaactagccctagcctcccatctgtacactactttgtggaggtgttaattcagatgttattctagactcatccctcataggaaatgaggcgtaaagagcttaagtgacttgcccaaagtcacctaccaaatataaatggagccagagctagggctcatgtgtcccaactccctgttctgtgctgccttctgctccagctcatgtggggggactcagttgttttatccagaaatctcgtggcttcatgggcatactctgtcattttttcttatctaaccagtatacaaattactgttctgtacacatctgtacataaagaagcacctgtgtagcttggattggaaggtagagaacagaatgattgtgtgatcagatttgtgtagtactgggtgagagattgtgctggcaacacagggttcagtggcttcttttggagagccccaggtggaaatcaccaactgtggctgactactgttctgtagcaggcatggggtgtccctgctggcaggcaggttgatgtttcgtattccagtcatcctgtgaatgctgtatggggtcctggtaaaggttactgggggcttccttctcaatatcactttgtccctggcacattgtctctgtgcctttgctgtctgtctaactttgactcattatgtgttttgacttagggctgttgtgtggctcctgactccttaaggtttagtgcccagctttgcctcaaccttcaaaatactcattccctagaaaattcagctcttggtcctta

SEQ ID NO: 47221 - DNA, 1039 bp, Homo sapiens
ggttcacaatttcttgaggcttaatcctatttgttctggtcaatgggaaatgaagattttgacaaggttattttttaagttggttgattgtgcttttttgtttgtttttttggggttttttgtttgtttgtttgttcgagatggagtctcactttgtcgcccaggctggagtacagttgcgccatcttggctcactgcaacctccacgtcccaggttcaagtgatcctcccacctcagccttcaagtagctgggattacaggcatgtgccatcatgcctggctaattttttatatttttgtagagatggggtttcaccatgttggccaggcaggtcttgaactcctgaccttaagcgatccacccatctcggcctcccaaagtgtgccactgtgtgagccactgcacccagcctgaatgttttagtttaagttttttcccatagaatctttgaaccaaatgggctttagattcccagtctggaccggaaaaacctatttaacagataatatatccaaaatgtagaaacaaaaaaactatggaacttaaaaaaaaaaagtaaaacaccaggaatgtgttagagatccaaagtggggtgccaagaacacatcgtggtgttccttgtggcctggcagcgggagcaaggactggcctcagctcctttgcacaccacgtaatggtttcccagatgccttcagcctcgtgccaccgtcaagagaggcttccccagtactgagctgaggttcgagatgaggaactggatcaggtatgaggagcagaactgagagttgagaggagaaggagaaggcacacagggcagggaaggcagggagcagaacagtagtggtcctgcttttttccacatccctgcctcagggctgctgaccagtcccccagtggcatcaggagaagcatcagccggggccccttcctttgtctctcctctttctgagactgataagttacaggagaccctccctgcctttaatcaaaactgcggtaaaattaaaatatgaaatggagacttctgcctgcaagtt

SEQ ID NO: 47222 - DNA, 1060 bp, Homo sapiens
tagacaaaggaaatctttgaaagtgttaaattctgactgtatacatgctgtgaaaatttcctaatctttcatattgaatatagtgctagctaaactattgctgataagtattctttcttggaattgaatagatttccatttgaacttttcagtgccatttcattataataaggaagacatttatcaaggaaaaaaatgaatattcaaatgtataagtaaaattgacatttcagtaattcacacattttaaatacacattagaaaatattttaaatattgaaaaatatatttactgtttcatttaatatagctgtgatatccccaaacttcatgatcattattatagcaatgttattttcctagataaacatacaagatgtttatttagatgacttttaaaatcaatcatgttaacatttatggtaaggcataatgacaggttttcacttagctgaaaaaaaaagtcacataattatatttaaaatacattcattataggtaagacataaaactagaataattttaggtacaaatttaggtttgtatttaaatgctgatttttaagaaattatagagataaactttggactttatcctattatttataagcatttattaataacattaatgtctccttagtattgactgtaaagtatacatcgatacttgtaagatagacatgaaacatacctgtcagaagagagtagtcctcctaaaagtagaagttatccaccatgtactacttatctataatgtaaatgttctcagacactgtgtaagaagaaaagatgaggaggtattacatttaaaagaaaaaaaacacccttcaacacagtcctggtgtggctgcaccctgggtgatactggaataaactgctcccacagattagtccatgttagtactgaggagcaagattaaaacttgttactgctcatgtgttttccatcactgtttgtatcgtagccaagacttctagctaaactctagacgtctactggaagattctgaagaagaaaaaaaaagaaagtttaataatgcatggcaactggccattgaaag

SEQ ID NO: 47223 - DNA, 1021 bp, Homo sapiens
tggacccccactggcccacagagtccaaggggtttacttctggccctttacagagcatgtgtgcagagccctgtcttagtgtattagacccactcctttttccactatattcaataccaatctaagaaatcagttattttaaataattaatattcaccacactcagaggcctggaagccttgagcgagttaagtaacttcctgctcaccagtttcctgtagtctgtccctggaaacattgacactcacctttattatgtctaccctgtgcccagcacctccacaggatatcaacttgtttagtcttcccatcagccctgggaggcagatgttgtttcctgattttgtgcacgaagaaactagaactctaagtaacttggccaggtccatggctagtactgattctagttgagagccaagatactcattattgtttttttaactacaagagatgaatctccatgtttcacagactttgggggcttaaggcctgtaatggtcatttggtgttaagttagagctgggcagaaacttcttttcatgggtacttttaatatttttgaattttaagtctatcaaggatctgaatttacgttcaaccatggatagataaatagttcagtcatctgtcagtctgtaaatgtttctgccatgaggacattttctatcctttttctaaataagggaaagaggtggaatcaatatcataaagggttttactccgccctttggaagtttcacttcaacagcagaatttgagtatttcattcttttaagtcagcatcttaggaacatagtaatttatggtatgtttaaatgatggctttggaaggcatagtcagtgttgctattatgcagagcaatcagattgattactaagtattaccagttgtcaaagcataacttaattgtttaaaaaatttacttagctttctgaggtccttgtcagaaatgttaataacataaatgattcccttttacttttgtgaccctgtataaatctttttctgctcagtttctaa

SEQ ID NO: 47224 - DNA, 1469 bp, Homo sapiens
tcagagattggctcaactgcccttctcttgtaggccccttcaggtatactccttgcctgtgcattcagctttgacctcataccttcccgtctttactgtcctctccttgtcttgcctgacccccatggtgacaccccaagttcagcattctctcacagatggcccctggctctcaacttcttagcagcattatgagaatcagagcagtttcttctttggtcccttttctgtgtgccccttatctgacaagataactattcactgaattccttttgatgtctctcgtatctgtgctgtgaaggctctcactctctagatttttgcagtgagtaattctttttcctttcttaaactgctgctttcatggaacacttcttgcttcagcatttttcagtggtatgctgcatttctcatcgccttgaatctggtctaattcctggcctgaggagccctcgtcttgcctctcctttcctgccatagtgaggctagactcctgaccaataagcccagacgtgagtccctccatctgcttccctcactgattcacattcctgtttcaaggtccattgatctttctcctctgaactacgtgtatgtgttgtatggtttagtgttaattatatcctgtattatatcacagtcatcttctgttactccccacctaaattagtaaaattagagaaaccatttttgcctgaagcactatgcctaacacaaatatgctgccaaaaatttggggttttatcctttagctatatacctgtaatttgtggcttaaattttcatatacttatgccgagtctaaaataatcttaaaacaaacattgtcataatttgttaacatttccaagtcactttaaagatttatactacatattattaaacagttactggaataattatgtgtgagtgggaataatcgtcttgatgacccctggaggtgtccgtgacaactagaggacactgtgcatatttcaactgtacaacattgtgggtagtttctttgtgttttaatgaaagcagtcatcttacggagtaattaactttgacttaatgagaatggcttctaaggagatgtacgtggagccatttgatgatgccatttgaaggagaggtggttttgagtatctttctcccctcgttggtaacacctgccataccacatgccctataccctccggttgagcatcagccgcccaggttcggaccttttattaggcagcctgccactcttgggtcccctagactttccatccaaattctaagggagagacagcttggttcagcaggaggagcaccagcctcagagtcagaagatgcaggggaagtccagactcagccacatattccctgttgttctcatgtgccacctgccctcactgagccccagcatcatcacctgccctgcaaggaggttggtgagcttgcagcactgtgctcgttcctacagaagcttgtcgactagccat

SEQ ID NO: 47225 - DNA, 1036 bp, Homo sapiens
ttacagaggaattccagctaatgagcatgagaagcatggcaaaaatagaaattcatcattttgttacctctaatgaaataagaattcaaacaacattcatctgtgagtgaaaccattggttcaatgatggaggagtaaatttgtcttaggagataccaggctgtgaccacttcaatccagtgatcaattttagaatcaaaaaaggtgggacaaacattagacgccttctgatgcaatgcagtatgaagcatatggcacaacctgtgaagtatttttgccaaaaaattttgaaactgaattttacaaagtcttcccaaacccccatctcttcctccagtacctttaaaaacacgaacttttctgtgtttttgttttgtctttgtaggcatttagtttatttggacttttagagaaggggaaagactaagaggcataattctcagggacagaacaacaaggttattgtctccctcactgccaatgataaagaccttactaacaaaatattctggattaattctcaagacactcatgccatctaggcaggagtgatgattcagtatataagctgaacacatgcagaaaaatgtgttcccaaaagtagggaaagtgagtcttaataaatgtattcagaaatctgacttcagaaaaaactagatagaagcagttttaattttagcatatatttacgttttatgctttatagattagttttatttatttatacatggaggtaggagtagtaacataatctattgctttgaagactcatttgaacctctctctaaagttctaagtgttatatataataatctgttaatcttttttttgagatggagtctcactctgtcacccaggctggagtgcagtggcaccatcccggctcactgcaacctctgcctcccaggttcaaacaattctcccacctcagcctcctgagtagctggcattacagacacgcaccaccacgccctgctaagttttgtatttttagtagaaacgaggtttcaccatgttggccaggctggcctcagac

SEQ ID NO: 47226 - DNA, 1006 bp, Homo sapiens
tgtacttactcttgatttatccaggctaaaggagcaatcctattttcttcaattttgttataacgtagtacaatgacattgatctttctggtatgattgaaacaaatttcagttatttcttcaatttggttattttctaggtataattcctataattaagagagaagactattatttttcttttgtgttagttgatacgttcaatttcatggagactaaaatagtgacatagactattatcattagtattatctaaagagtcttactgctctttcaagtaagctcatatttttaagttgtctttttttttttttttttttttgagacagggtctcactttgttacgcaggatggagtgcagtggcacaaacatggctcactgcagccttgacctcccaggctcaagtgatcctaccacctcagtcccacaagtgactgagactacaggtatgcgccatgaagcctggctaatttttgtattttttgtagagacagggtctcaccatgttgctcaggctggtctcgaactcctaagctcaagtgatctacccgcctcggcctcccaaagtgctggaattacaggaaagttgtcaaattttataactaattagtaaaataaaacacactgccatggttatggaatcaaatgaattttatttaaaatgtattagctataatatgttgcaagaaatggcataccaaaataattatacaaggctctctattttataaaacttattcacataaattatctcatttgggcttaaaaactctgaaaagtagacagatattttaatctctacttaccagtggagttaagttgggcctggagagacagggaagcccacccgtggttacatgactaatgctgagaggggcttgtcctagccgagcctccagctcccaggctgcctgtttcctactatttcatgtggtctataatattttaggctcatgtttttagatttgcttttgttataattaattaaagttaattaacagcctt

SEQ ID NO: 47227 - DNA, 1029 bp, Homo sapiens
tactcagatctgactaatgtatcataattttaatctaaaattagtaacaaaaacaaatggaagttaaagattaatcacacactgatattttgcttagctaaatctctgtaccagtagcggagcagaccgggcagcattccccttcaggtataactgtttgggggcacctctggggatggcacatggtttcatcacaaagaactcttccatctgagcagaggcaggtagtgcagggctcaggcgaccacacagctttgttgtacatggttatgccctttaccaaacagtgtcccttctttcctagaagaaaacaaaagcacaaatttaaatttcttatgtgattatcagtaactgtgaatggaagtaaacacaatgtgaagtcaaactgctctaaccacacaagaatagaattctatgtgcattcatgtatagggtaaagatgtcgtatagacataagaaatgctgaaatgcttttcacaggctctcctctcagccctttcacgtaggctctaagagtgaactcctcatggtaacttggggctgaactgcgcttccattttgtatccatcaggatagattaaattatacaacatcaacaaacaatccccaaatctcagttatttttcatttatactttgtgtctaatgtggggacacaggggctcagctcatcatattcactcaggattcatctataagcaggctgtcctgatcactgcggtagtggaaatgtgaggttacaaatcacacatgagctcttaaagtgtctaattatactgaccaaagcaaatcgtatggccacaccagacttcccaagccgccagccaatccagttccctcatgtgaccagagagctgagctagcactaatgatgagctcacagcccacccttgatatgcacatgggaataggtgaaaccagacagcatgcttccgtggtgcttctcaatgagacactgagctatgtcttttatggtttattatgctattgaaatatgattcacatactataatattcacccttttgaagt

SEQ ID NO: 47228 - DNA, 1063 bp, Homo sapiens
cattgatatacagaattttgctttgcacttaatatttgctttcataaacaacttcgtaattgagtgtttgcctcctagaggtaaattttctgggattccaatcatagtatcatttttatcaagtaatttttttccttctagcacttactgtgtttatcccaacattaaatattatttataaaccttgattaacttatttttcttcatttaaaatttcttaccagttatcttaagtaaactttaaaaatattaatttagaattttaaaattctacatgaagtcatgagatgtctattatctattttcacttcattcaacagatttaaaatgaaaaatattttgaattatttatgttcttttaggacttaaaaattaataatattttcaaaccaatttatacttctattgaacacataattccacctaaacatataaaaataatttaatactaagtatacaaggtctgaaatacttgggaagtacatcgtgaaaaaaacaaacagaataatgcatactttgaactttaaaaatctattagtaacgagctaatttactcaagagttaaacagttgtgaaataaaatacccaaatattaaaaccattccacatgctaagtagaaacttaaaatttaaaacttttttacctggagatctaaactaagtaggctttgcttggtgtcatttaagtctccagctgaaaatgaaacaaaatcagagctttctttaaaaacaaagaaaggacagaagggaatgttgaaaagtatttgctgaacttcttagtaaaatctaaaataactgcctcccttggggataaatgcctttcagttctttgtgcagaaaatcagccaagaaagtaaccagggaaaatggttaccaagggaaatattttttttaatcataagaaaagtagaaaacagcagtgggtgtgggggaagagcattttgtttgcaggctgaaaaggcagagttggaaacacaaaaatgagcttgattaagaaatctgtggttttcatagactattcgcattaaaaatgttaaagtttatactagccaggatgatgtca

SEQ ID NO: 47229 - DNA, 1033 bp, Homo sapiens
aaaggaataacagatatgaaggtcctaactcagtgcctatcctagactaggtaattttagaactattttttaaattttttttttttttttgagacgggagtttttgctctgttgcccaggctagagtgcaatgtcgtgatctcagcacactgaaacctccgcctcccaggttcaagggattctcctgcctcagcttcccgagtaggtgggcttaaaggcgcctgccaccatgccagattaatttttgtatttttttttttagtagagatggggtttcaccatgttggccaggctggtctcgaactcttgacctcatgtgatccacccacctcggccttccaaagtgctgggattacaggcatgagccaccgcacctggcctgaaattcttatatcgttatttcaggggtccaaatcatttggcaaagaggagctaaatatttgtttaaatgacgtggttagactgaatcaggattttgtaaaatgacctagatagactgaatcaagataagggactaaatacataagccactcaacttcctaaaaataaggaaaatgatatctatttttaaaaatgtaaaactagctgagtgcagtggctcacacctgtaatcccagcactttgggaggcagagacaggtggatcacctgaggttaggagtttgagaccagcctggccaacatgtgaaaccccgtctctactaacagtacaaaaattagccgagtatggtagcacatgcctgtagtcccagctactcaggaggctgaggtaggagaatcacttgaacctaggaggcggaggttgcagtgagccaagattgtgccattgcactccagcctgggcaacagagcgagactacatctcaaaaaagaaaagaaaagaaaagaaaaagatgagtacaaatgagcaaacaccattaaacaggcagttcatagaagaggaaatgtcagtggtcaataaaacagaagaggaagatttctcaatctcagtaacagtcaagaaaagtaaattaaaacaggaaggttattttttc

SEQ ID NO: 47230 - DNA, 1065 bp, Homo sapiens
caaccattcccctattgatggacatttgggttgtttcccctttcccccctcaaatagaatgggctttttgagtttgtgtacgcatttccaggttgctttccaaaaaggttatagtaaataatgtatactttcaccagaaatatataaaatgcccatttccctgccactttattttttaaacagttttcacatttttgaatgggtaatacatataagtggcataaatttttaaagtgcacagttaaaatttcagttttctatatccaatactgatagtttgataccaaccttcccattgaagtaagaaagaaatgagatcagccgggcgcggtgcctcatgcctgtaatccctgcacttcgggaggccgaagctggtggatcatgaggtcaggagattgagaccatcctggctaacatgatgaaaccctgtctctactaaaaatacaaaaacttagccaggcaaggtggcatgcgccagtagtcccagctacttgggaggctgaggcaggagaatcccttgaacccaggcggcaaaggtcgcagtgagtcgagatcatgccactgcactccagcctggacgacagagcgagactgtctcaaaaaaaaaaaaaaaatgagatcacatataaaaacatcttaaaataatcaatgaaggctgggggcagtggctcatgcctgtaatcccagcactctgggaggccaaggtgggtggatcacaaggttaggagttcaagaccagcctggccaacatagtgaaaccccgtctctactaaaaatacaaaaattagccgagcatggtggcacgcgcctgtagtcgcagctactcgggaggctgaggcaggagaatcacttgaacctgggaggcagaggttgtggggagccgagatcacaccactgcactctagcctgggcaacagagcacgactctgtctcaaaaaaaaaaaaatcatcaatgaagtgagaatataataaggaatcactggacctagatcaggagataactgtgagcagccttttgccttgcgagtgtttgctaaaaatattaaagagcaaaaatatcgataa

SEQ ID NO: 47231 - DNA, 1008 bp, Homo sapiens
taccctctggccctggggttgcttgcactagcagtgtggtctgtcttcagggtgatagagccagggaagaggaatgcataagccctggaaacaaagttatttgggcagagaattccaggctaccagatactcagagcatttcctggggaggtggctgtgggagagcacatagacatcttgcttagtggccaagcggagcccatgtcacaaacccctcttgtccaggtttaagtgtgacgctgggattggaagccaggaattatcatgagtggaagccacagtttcaggcaagaaaatttgggtgagaaatatatagtactgttatatagtaaggagttaagtatagaagtcttattgtgatatagcatacttccccaaaatgacgtctgatgctttttgttttttgagatagggtcttgctctgtcacccaagctggactgtagtggcacaaccatggcttactgtagcttcaacctcccaggctcaaacaatcctcccaccttagcctgtcaaatgtctgggactacgggcacataccaccacacctggctaatttattttattttattttattgttttatttttccataagttattggggtacagatggtatttggttacatgagtaagttgtttagtggtgatttgtgagattttggtgtacccatcacccaagcagtatacactgcaccctatttgttgtcttttatccctcaccccactcccactcttcccttcaagtccccaaagtccattgtatcattcttatgcccttgcgtcctcatagcttagctcccacatatcagtgagaacattcgatgtttggttttccattcctgagtaacttcacttagaataatagtctccaatctcatccaggtcatccatggtgtgtgtatatatatataatggaatactatggagccataaaaaggaatgagttaacagcatttgttatatatatggtgtgtgtgtatatatatatatatatatatatatatgatata

SEQ ID NO: 47232 - DNA, 1107 bp, Homo sapiens
tcaagatttagagtttcttttagcagttcttgtagtggtggcttagtagtggcgaattctctcagcatttgtttgtctgaaaacgactatatctttccttcacatgatgctgagtttcgctgaatacaaaattattggctgataattgttttgtttgaggagtagggtcccaatcccttctagcttatagggtttctgctgagaaatctgctgttaatctgataggttttcctttgtaggttacctggtgcttctgtctcacagctcttaggattctttccttcatcttaactttggataacctgatgacagtgtgcctaggcaaagatcattttgcgatgaatttcccaggtgttctttgtgcttcttgtatttggatgtctggctctctagctaggctggggaagttttcctcaattattcccccaaatatgtttttcaagcttttagaattctcttcttcctcaggaacaccaattattcttaggtttggtcgtttaacataatcccagacttcttggaggctttgttcttattttcttattcttttttctctgtctttgttggactgggttaattcaaagaccttgtctttgagctctgaatttctttcttctacttgttcagttctattgctgagactttccagagcatttcgcatttctttgtttgtttgtgttttgagacagagtcttgctctgtcgccagtctgcagtgcagtggcacgatctcgtctcactgcaacctctgcctcccaggttcaagtgattctcctgcctcagcctctcgagtagctgggactacaagtatgcaccaccacgcccgactaatttttgtatttttttagtagagacgggatttcaacatgttggccaggatggtctcgatctcctgaccttgtgatccacccacctaggcctcccaaagtgctgggattacaggcgtgagccaccgcgcctggcctgcatttcgcatttctaaaagtgtgtccaaagtttcctgagttttttattgtttttttctttaagctatctatttcattgaatatttctcccttcacttcttgtatcatttttttggatttccttgctttgggctttgcctttc

SEQ ID NO: 47233 - DNA, 1030 bp, Homo sapiens
aagactataggccctttgtcttcagctaccagggtggataggaaaggaccatcaggtggggacagggctaggtgtgtttgagctctccttgggtgggtcttgctgcggctgctgtgggggatggggtgagattcccaggtcactggagttgtatacctaggaggattatggcttcctctgctgagtcatgcaggttgtcagggaagttggggaaagccggcagtcacaggcctcacccagttcccacgcaaactgcaaactgaagggcagttcccccgccacccaacagccccaagtctgtttccaagcagagggcaagaggggcttgaaaacttacccgaggctgtccacctcccagctgccaaagaaaagggctcttcccccgcctctgaagtctgcacactggattcgcgccctcccccagttctggccaggaggcttcttgtcccgttcaaattgttacaaagttcggctagagaattcattctccctgtggagttttacccctgctcctctggccgccctcccgatggatccctgtggtgtcaggcaggaatgggctgcttggggacccaacgagctcccagggcttttctgctgcttcctctacccctgtatttcactgggctctctaacttgactcagctccgggtaaaatcggaaacttctcccgcaaacagaccttcagcttctccagtgggggtgtgtgtttaggagagacgggtctccctttcccacttccgcaattggggcactcacagtagttggggtgcctcccaggtcctgcaggagcagtccatttccctcagagggtctgtgggtcctcttgggattgccaatttattcttgcagtcgatctggagctagaattcacaatgcaggcctccagatgatggtctctctggagctataatctagtcctgcctcctgtctgccatgatcccctccatctcttaattttcttttttaattttttttcatagagatggggtctcactatgttgccagggctggtctcgaactcctgggc

SEQ ID NO: 47234 - DNA, 1033 bp, Homo sapiens
actgacttttcttttatgtgtacaaggattattcttttaaagcctcaagtctccactttttggtagcctgctcttttcctcaatccctgacttaaatatcatgccttccaagaagcattctccagcttcacggtgctcccatagcaccccacttaccctgctacaccaggactcatttctctctgctttacgttatgaatggcagttaccatctgttttccccaaacagtacataaattctttgaggatttacacatatgtgtatcagtgtatcatttttattgagtgcatcttgagtgtaataataaagcatagctcttacagtctattagagtcaatagtctatacgaagggatcaaattactgtctctgtgtaaaacagtgtgatcatttctgtgattgcagaaatgtgaagttattttggaaatctataggagagtacacatctagagtttttaaagaattagcaaatggtttagcagcatttaacacagatgatctttcttcaaacactcaattattttgttttttaccaaaagaattggtgagagtgagagaaactccctctctcttgtgtctcccttcttaatctctttggctggttcctcatcctccctccccctcttcctcccccctccctacccctcttcctcctcctcctcctcctcccaaagtggggtggtgtgaacatgattgtgaggctggagggttgagtgcaggaaagaagtggccagatcacaacaggctttggaaatgacagtgaaggtctgggacccaaaggctacaggggaggaacataaccaggtctgcatggtgaggggggaattatttctttgtgtatttatttacttagccagttacatagcaacaggtctgcattttggaaaaatcactgattgtaatgtggtgtatgaagtgaatgtaaggatcaagtctacagggcatcatttaaaggttactgcatttgcctgggcatagtggctcactcctgtaatcccagcactttgggaggccgaggtgggcagatgacttg

SEQ ID NO: 47235 - DNA, 1048 bp, Homo sapiens
aaaactctttcaaaagtgagggagaaattaagacattctcagatgaacaaaagctgagggagtatgttaccactacatctgtcctgcaagaaatatttaagggagttctacagggtgaaatgaaaggaccatagacagcaactcaaaacaacgtgaagaaataaagatctcaataaggcaaatagagcaattataaaagcttgtattgtaacaactgtttgtgatttcacttttcgttttcaacatgattataagagactaatacttttgtattttttaaattgacaattatacatttatggggtatacagttacataagatagatatatatatatatatatatatagatatatatataaagtggttagtgattagattaattagcgtatccatcatctcaaacatttatcatttctttgtgttagcaacattcagtatccttctagccatttgaaactaaatatattaactataatcatcctacagtagtatagaacactagaacttattacactttaaaaatattattagtctaaaagctaatattataattttggtttgtaacttcaaacactgctttctacataatttaagaaactaatgtatttcaaagaatttgtagcttgtgttttgggactcactatgtatacagatgtaattttgtgacagagctgttaaagtaacagagattaggtgtgttattgaagttaaagtggtataaattccatttagactgttataactttgggatcttaaatgtaatttccaaggtaagcacaaagcaaatagctacagaacttgtacaaaaggaaacaagaaaggagcttaaatacctcactacaaaaagccaaaaaaacacaaaggaaaaggtaatacaggaaatggacaaaatagatataaggaatatataaaataaattgcaaaatgacaaaagtaaatccttcccttatcagtaattactttaaatgtaactagattaagctctccaattaaaagacaagattagcagaatgtatttttcttcttttttttattatactttaagtt

SEQ ID NO: 47236 - DNA, 1035 bp, Homo sapiens
atatgaactttaaagtagttttttccaattctgtgaagaaagtcattggtaacttgatggggatggcattgaatctataaattaccttgggcagtatggccatcttcatggtattgattcttcctatccatgagcatggaatgttcttccatttgtttgtgtccctttttatttcgttgagcagtggtttgtagttctccttgaagaggtccttcacatcccttgtaagttggattcctaggtattttattctctttgaagcaattgtgaatgggagttcactcatgatttggctctctgtttgtctgttattggtgtataggaaggcctgtgatttttgcacattgattttgtatcctgagactttgctgaagttgcttatcagcttaaggagattttgggctgagatgatggggttttctaaatataaaatcatgtcatctgcaaatgggacaatttgatttccttttttcctaattgaataccctttatttctttctcccgcctgattgctctggccagagcttccaacactatgttgaataggagtggtgagagagggcatccctgtcttgtgccagttttcaaagggagtgcttctagtctgcccattcagtatgatattggctgtgggtttgtcatagatagctcttattattttgagatatgtcccatcaatacctagtctattgagagtttttggcatgaagggctgttgaattttgttgaaggccttttctgcatctattgagataatcatgtggtttttgtctttagttctgtttatatgctggattacatttattgatttgcatatgttgaaccagccttgcatcccagggatgaagcccacttgatcatggtggataagctttttgatgtgctgctggatacggtttgccagtattttattgaggatttttgcatcaatgttcatcagggatattggtctaaaatgctctttttttgtggtgtctccaccaggctttggtatcaggatgatgctggcctaataaaatgagttagggaggattc

SEQ ID NO: 47237 - DNA, 1007 bp, Homo sapiens
ttctataagacatacattatagtttatgcattataaaaatctgtgtcaagaaaccaaataagatccaaaatatatatatataaagaaactcacacctaaatataatttaatggaactgcagtgaccaaagatgaaacgaagatctttgaagcatccaaaggaatggattggctatattggcaaactctgatccttcaacagcagcaatggaaaccaggaagcagtggtagcttcgttactctcagagaaaataatagcatacttcctatacccagcaaatactgtctttcagaatgaaagtgaaataaagagaatgttagattaaatagaaactgagagaatttacctccaatagacacacattttagaatgaaaggatcatctccaagtagaaggaaaatgatccaagaaggaaggtttgaggtgcaagaaggaataaaaagcaaagaataaggtaaatatgtcaaacagtgactgtataacataatcataatgatgtcatatgagaggctttttaagctagcattcaaaaatacacagtaatacaaggttgcttgaaattaaaatgttctgaattcttgtgttcaagaggaggactgagacatccatttgtttagactttgatgagtatagatgataaaatgtctaaggtaaccccttaacaaaaataaggtatgtgacttttcagctaacacaggggaaaaacacttggtggtgttttgttttgttttgttttgttttgttttgttttgttttgagacaggatctccctttgtcactcaggctggagtgcagtggcatgatcttggctcactgaagcctcaacctcctgggctcaagtaatcctcccacctccgcctcccaagtagctgagactacaggcacatgccaccatgcccggctaatttttttgtattttttttgtaaagttggggttttgccgtgttgcccaggctggtctcgaactcctgagctcaggtgacctgcctgccttggcctgccaaagt

SEQ ID NO: 47238 - DNA, 1047 bp, Homo sapiens
cacaccccagctcacaaagagcactcgttctgtgcacctgtgatctgtgcgtgtgacagctgtctgtgccggctgtgtgcaccagcgtgcaaagcttcctcaggccagtgcaccccaccataccaggcgagagagggttaaaggactgaaagatggaaaagtaattatgtggaacatgtgagcgatgttcccccagcccagtggtataaacgaacgctgaaaaatcactttatcatgagccaagtattacaaaacccaacaaaaagtaaaaagtagatctggccattccagcgccaaatggatggaatgtcgacaagccttcttctttgcctctcctgtctgctgagaaacgcaagctcctttggttcacatttgaagagatctggtttctcattttattctcaaattttatcttcagtcctttgtattttgcttctcagggcttagttttgtggttttaacctcagaagtcgtgtgcttataacaagatgtgattaattatttgccctgaaaaacacatttaggattactccgagtcctgagctctgactgctgtgtgtcccgcttttcgtctccgggcactcagcgcacagcactcaagacactggctaaacaagtgacctaagctcagttcagtccaagagaagtatcctgggttctggtgtcccaatgtttactacgctttgagatttagaaatcaacaagccaaaccccaacttcaaaagctcctgccgaggagaggaaatactgatcagcacgtccctgctctgacgctgctcaccatggccttggcgctcactgctgccctgccccagaatcctgtttgtagaaaaaacaaatccctgactaagctgctggggtaagtaactattctcatctgaagagtaaacagcaaataactcatttacaaattaaggtcatgagtctcgctccagaagctggagtgtgcctgcagctcatcccaaggggccacattttattgggagaacctcagaagcccaaggtactgctcagttctgaggcctgagacccaagctgggtgcacct

SEQ ID NO: 47239 - DNA, 1054 bp, Homo sapiens
aacacactaaagagacaggattatggaggacatccaacagcccttctaaaaacaactagatccctgaaaccgctccttttaacgtgttgttgggcttgcataaggtaaggaaaatccctaacccaaccccctcttctcaccacccacccacaaagagctgcaactagagttttgagcatgaagcaactgggaaggctgagctgtcctacagtccagtgccactatcagcactgattctaggaataagccacagggtagaggatctatctaaaccagagactcttcccttttgccaaagatccctatcctctctggaagaaggcatcccctatttgggtctccaggattcctatagattaagatcaaacaaatcaacaaggcaaacaaaatcaagcaaggcaacacggatgagtcagccaaaataagagattttttttttttaaccaccaaggttttattgtatctgatatcagaatataaaataacttcataaattgcttaaagaaataaaagacagaattttgaaatagacaagccacaaggaactagaaaaaaataccaaggagatgtgaaaacaaaccaaatagaattttcagaaattaaagatagaactactgaaatggggccaggtgtggtagctcacgcctgtaatcccagcactttgggaggctgaggtgggcggatcacaaggtcaggagattgagaccatcctgactaacacggcgaaaccccatctctactaaaaatacaaaaaattagctgggcgtggtggcaggcgcctgtagtcccagctactcgggaggctgaggcaggagaatggtgtgaacccaggaggcggagcttgcagtgagccaagatcgcaccactgcactccagcccgggtgacagagcgagactccatctcaaaaacaaaaaaagaactactgaaatggaaaactcgataaacaagtgaaatggcagattagacacagctgaatgaatcaatgaactggaagatagagctgaaaaaagaaaagcacctggaatgtagcacaaggagacaaagatatgaaaa

SEQ ID NO: 47240 - DNA, 1047 bp, Homo sapiens
ttttacatccctacctgccacgcatgagttccagttgctcaacatcttccaacacttggtactgttgatcattttaatttcattaattttaatgagtgtgtaaaagtgtctcattatggttttgatttgtatttccctggtggcttatgttgaaatcctttcttgtccccattgaccatttcatatcttattttatgaattatctctattgaagtatattgtcatttttattgagttgtccttttacaattgggttataaatttctttacattttcaggaaacaaatcttttgtcagaaatttattgcaactatttcttccccttctgagtctttccttctcaccttcttaagtgctttcaaaggacaagagtttttaattttgaaaattcaaagttatgatttctgtttttatagttcattatttatgtgtactaacttaaaaatctttttttttcttttttttctttttttttgccggtctcagtctttaatcctggcagggattcacgggcgcacacacacacactcaggattcagatcttgttgaaagctgcgatatcgacactctgcacgtgctcctcaaacttggtgatctcctccagcaagtctgtccccaccttgtcgtcctccaccacacactgaatctgtagcttccggataccgtagcccatgggcaccagcttggaggccccctagaccagctcttccagctggatggagcacacacaggcctccagctgggccatgtcagtctcatcgtcccaaggcttgaaatccagcaggatggaggacttggccaccagttcaggcttcttggccttcttctccgcgtactgctgcagccgctcctcctgcagctgtgccgccttcttgtcctcctcctcattgtcgctgccaaacaggtcagtgtcatcatcgtcgtcatcctctgctggtgtgaatggcttcttggccaggggctccacttggcgcatgggagacatgtgctgggtctgtggggccgtggcccggtggccaggcgagttcttctccagcacgttcagcc

SEQ ID NO: 47241 - DNA, 1056 bp, Homo sapiens
tgtcgaaccagatcttctcatgtactaggaagtttgtagccatttttctgacgcctgccaaggacgcgacgaccagggaggaggaatcggcggacgcgggacacctgaggaaagggtactaccttaaaaatcttttcctatagtcttggtaaattttaaatgatagctctataaatgatatttataagttatggttatttttttttttagtttttcattaattttgatcaattgtatcttactaggagatcacccatttactgtaggtagtattctcttcctactatatttcatatctacctactacatttcatatcattcctactacatttcatatctacctacatttacatgtaggtagatatgaaatgattcaatatccatgtctccttttactcattacaaatcttacataattttgctctctcttatctctttaccttactcgggtttatgtgaggtatttagtttactaaggttttaaaatattttcatattcattttagtaggaaaaggacggattattttataaatttcattgcctgaataagtttaggtatggtttcgggtacaataagaaagagataaaatggaatgctttatgccaaacatgtttatttttatcacacagctaaagtctgtagttaagttgctgctacttttgagtcaataacatcaagaccagtgttggtgaatcttttggcctttccccaatgcttgaaagaagatcaccactgctggaggcataatgtacaaggcaggaaaagggatggaattgatggtgacagctaagtctgtcttttttcttaggaaataaaggttttcctaggatacatttaagtgttttgcttctcttgggctgaggcaggtcatttggccactaccagtttcagaagatgatgatgttacagcactattcacaatagcaaagacatggaatcaacctaaatgctcatcaatagtagactgcataaagaaaatgtggtacatatacatcatggaatactatgcagccattaaaaagaatgagatcatgtcctttgcagggatatggat

SEQ ID NO: 47242 - DNA, 1025 bp, Homo sapiens
aagggcatgattgtccttgtccaattgattatctgttgacagactgttggagtggttggaattgctatgaatggaagttcaaaaatcaagaagacataaaatacattataaaagttacagttaggccaggtgtggtggctcatgcctataatctcagcaatttgggaggctgaggcaggaggactgcttgaggccaggagtttgagactgacctgggaaaaatagcaagaccctgtctctaaaaaactaaaaaaattagcaggtgtggtggcgtgtgcctgtagtcccagctactctataggctaggacaggaggatcacttgagcccaggggtcgaggctgcagtgagccaggattgtgccactggactcccatctgggtgcctgggcgacagattgaaatcctgtctctaaagtaaataaataaagtcacatttatgccaagttatatatgtatgcatgtgtgtgtgtacgtaaatatttattttaatagaaaggaaagtgttggatggtctgtttttctccactggtttgagacatgggcttgaagttaaatcagtaaacaaaatgaactatgtttattatgaaatctgcttctataggaagaccttttccaatgtatcaaatagagcttcttctctatttgaattttatggcatttaataagacgatatattcttacaaaacctattcttaacaattacttgtctggtatacagtaagctgtgactcacagatgaagatttttccatatacaatatataatgtacagtaatcacagggcttctctgtagtatgaataatttaaaactggttctgacttctgtgaaaagactttctcactttcaagaaatacaatttcactcgtgtaaatactgaagaatactaaaacctgatttctgtgtgaagctactgccacatttgctcttaaccctgtctccttctggtagaaactttctgatatattccaagtgaagtgttttccagtcactgttcttataggctttgttctccaaattgtgtttt

SEQ ID NO: 47243 - DNA, 1023 bp, Homo sapiens
aaaatttaaaatccactttctcagtcctactggccacatttcaagtgctctgtgccaagtgtggttagtggttcttgtcttgaacaatgcaggacgtttctggcctggaatgttctgtggggcactgctgccctgggccgggggctgttagaagttcttggacaagcagactttggtcacacccctgcagggatagggcatgtttgctgggcattgggcagtggacgccagagagggacagtggtgggaacctggcctgggagggccccagggccaacactgctgcctgagaaccctagtgcagggcctagagacagacagagacgtctttgttgttggttacaaaacatgaacaaacgttgacattaagtcagacaacttgatacgaaggacaggaatgtctgcaccggaacaggtgaaaacaaagtcacaacggggaagaccagtgggaacgagaggctaggaagaaggcagttagtattgcatggtaagaaagttgcgcatttgcagtgaacacctgagcagaaataaatccggtgtgctcatgatagccctcggctcatgtgtcctgaccacagaggtgctcgctgttttttctttcttttgaataagctttttactgaatacatcacgtctgttgaaaatgtccatcagtcaccagttccaggctgatgattcttcccaagcttcacttctccaggccgggctgggtctcagtaaaaagaagtggagggggttgcagagaggtgggaggggcggctgctctggaaggttcctgcggaggtctgactcgggtgtggaaactgaggcttggtgataccatggaaggtgcttgggcccttggagccaggaatgctggggtgccagtgagctgcgtgtttgtcacagactctgctcctcctggcagctccttgtccatgggggcactggtatgtggtacatgagggattcagtgggccacatggtgtaggttacgccgtgaggtcagtgcagggagcagcagtctctcagctggacttcctg

SEQ ID NO: 47244 - DNA, 1015 bp, Homo sapiens
ctctgacagtcccagccattctgaatgaaaatgctccagggctctgaagtcactcctctatgacctgtggtcactgctcctgctgctcacactatgtgagctgcccctgactccctcagagcccccagcatggctgtcgtgagtgtggacacagggaggcctccctgcgctggaccaggggtgatcgagcaggtcattcccagcctgccaactttccttttctatttgaagagctttacatggttgagatttctgcacctgttgggtttatctttgggttcccttcaacagcagctacacaaaggtgtctcggagggaaagggtcatgctgtcttcatcccgtgtcccctcgtccccaatgactgtggctgtccttgcatgcaagtgctgtgggcagggaccctggttggggcccacactgacacactcctgtgtctctttcagatgcccccgattcctgttgtgccccccatcacgcccctggcgggaatcgacggcctccctccggccctcccagacctgccgaccgcgactgtgcctcccgtgccaccacctcagtatttctctccagccgtgatcttgccgagcctcgctgccccactcccccctgcgtccccagccttgcctctgcaggctgtgaagctgccccacccccctggggcgcccctggccatgccctgccggaccattgtgccaaatgcaccggccactatccccctgctggccgtagccccaccgggcgtggctgccctgtccattcattctgccgtggcccagctcccaggccaacctgtgtacccagcggccttcccacagatggcgcctactgacgtccctccttccccccatcacacggtgcagaatatgagggccacccctccacagccggcactgcctccacaacccacactgcccccacaacccgtgctgcccccgcaacccacgctgccccctcaacctgtgttgcccccgcaacccacacggccccctcaacctgtgctgcccccgcaaccca

SEQ ID NO: 47245 - DNA, 1045 bp, Homo sapiens
catacctgtgtgaagtaagcatgctacagatatacaaatttggtccataaaaacagcccagcagccctcctcctcacagcccattcctatcccagggacagactggctccagaggttcgagttgaagggtgggtgtgtggcctgtgggacaggcgctgtttagacaagcttctgcccgccctgtggactgtctttctgtgagtgtgaggtaccagctgtccctgaatgtcccatcagtggttagaggtcggcaggccttgggttcatcattctgaccatgacgaccttgccagccccttagtaaaggtggaactgcagaagtttcatttaattggcgtggattctaatgccaggttttacctggaccttgtatttttagatttttattttgttttcaagttaattttattctcaacatacttgaaaagaaacataataggaaaacattttctagttgcaaaggggttctagttcagttttgtttagtgaaaatttcacaaaattggaacgttgcttaaattctcgtatgtggcactccagtcacagctggctggatgttccaactttggccacagtgtactcctcttagacaacattgcagtcacatgttacactaaattaagtggtgaatcacggaacacagcacaagccagcactttgtctggaggtgtatgcaggtggtgctcctggggttggggtctggggtgccaggggagtgtggagcgcagaggagctctgcttttcagccagctgtttatagtagggcagatgtgcccatcctagaagggatctgagaccacagatgccccaggcagggcctagagcatctcggtgactgcagaggtgtctgcctgggaggaggtgccatggcaggaaaggggcagggtctggaccccactgggtggtggcacaggctgacctcttccattggttatggttttatgagatgcacagcattttctctgcctgaatggccgaggatttagccagagccggtgtgagcccagggccacatgcccactgtgaaagttggagactgtggaca

SEQ ID NO: 47246 - DNA, 1837 bp, Homo sapiens
accttcacagctcaattaaagaaatactaaagggaatatttttagacagaagaacaatgactgcagatgaaaggccagaatgcaggtaggaacaaaaactgatggaattataaatgtatgagtagatctaagtgaattttgactggatgaaaaaataatgtcttgaggtttaaaatgtttggcatgttaaaatgcatgaaaatggggcatatttatcaggaggcaggaaatgcatttaaagggctccaggattccatgttgcctaggcagagagccaaatcaagaatgcaaatgatagtctctagaataacccctgtgagactcgtagaatagcagataacctccacacttgtggagggggcaggtggggaaggaattttttaaaatatggcaaagaaggaaagaaacagcaacactgaacatggagaacacatagaaatctttagtaagatgctagttttaacccaagtagatcagtaattaaatgtaaatggactaaatctcaaagattctcaaaagtgaaaaaaaaaaaacagaacaaagacataagattataaaaagattaagagtaaaaaacaaaaatggaaaaagagcacactaatactcacctagaggaagctaatgtctatatttttatatcaatgtagattttaaggcaaaaacataatggtgaaagattcaactggccaggaagatataataatttaatgtttgcttatatttagtaataagccctcaaaatgcataaaataaaaattaacacaactaaaacaaatggagcaatttacaatcatgggagatttcagcttttggaataggagacactcagtagggatagagaaaatttcaaccacagaattagtatcttatatatacaggacactgtactcagtagctgaagaatgcactgttttttcatgcacacagaatatttttaatttaactttacgcagacccaaaacaaatctcaacaagtttcaaagaatcaaaatcacttgatgcatgcttttgattaaagttggaagtaaacccaagctcattaactagaagataactagaaaatatccacatttgatagttaagcagtgcatttataaatatctcattcggcaaagaagaaattacaatggaaactaataaaacattctgaatgatgatatgaacatcatgctaatgaaaatattacgtatcaaaatttgtgaaatgcagttaacagcatattgagcagaaactttgtagcctttaaatgcatatattggacaggagaaaagtctgatagtaataaaagtatgtagtgcaaaaagttagcataagagaaaatggaacccaaataaagaaaggagaaagtaaaatagataagaacataaattaatgaaatagtaaacaaatatacaatagggtatcaacagagcttagcaacggttctttgaaatggctcatagcattagtaagccccctgtgatgagactgactaaaggagagagaaagacataagtaatcaatattagggatgaaaagggggagacactgctacagtcctacaaacattaagacaaatataagaatttgaaaatttctttggattatgtcttagggaactacaacttaccaaacttaagaagaaatagaaaatctgaaaggtgctataaacattaaaaagtcaaatcagtcattagaagccttctcatgtctacccttcatggtgacaagattgctggaacaactcagtgtgtatagtctttcaggtagaaaatagagaccctttttgaaaggtttcatacatctggccctgactcccattatgcagaacaaggacacattctctaaagcagttgtg

SEQ ID NO: 47247 - DNA, 1060 bp, Homo sapiens
tgtcacaaacactttatttttcatttgaagaaaatgccattgatttctaaacaaggtcttccaaagaaaatgtttgcttatttgagttgataccaacttgaggttggtgtttttctattatctactccaatatcaaccactctgtaaatggaaataaatacataatgcatgtcacatagtagacacgcagagctgaatgattgttctgatcaatataattctatataatgttacataaaaggtaatattccttttagcattactattttttgttaagaatttggacaaagcaagataacttctttgactcagaagctctacctataaaattactgggctaaatagcagttatttccaaggaatacatttgctaaaactctttctattttgaagtagaaataatcgtggccttttggtaacactataattttatcattttgcctcaatatctaatggtattaaaacaattactgttttaaaaagtgataaggattggaaaggaagaaataaaactaccactgttggctgataacatgattatatacatagagatttaaatttacagataaattggaattaataagttagcaaagtagctacagactgcagttatctttctgtataccaacaacaatcagaaaataaagaatattgaaaaattcaatttatagtaacacaaaaatgccaaacaccagtgtatgaatctaacgaaaagtatgtaacatctgtataccaaaaactacaaaacattgagagaaattttaaaaagaaatgagtaggaagatatgtaccatattcatggactggaagattcagtattataaacacttcttcccaaacagatctgcagattcagattctaacaatttctaaatgagcatcaacacactgattatatactctttacagaaatgcaaaaaccagtaaaaaccaagacagcttctaggggaaggataccattctcccagatgttgtgactcatataaacctggagtcacagagacaatctggtcctagaacaagggtagagaaattgagcaatggagtcaagccagctcag

SEQ ID NO: 47248 - DNA, 1030 bp, Homo sapiens
aggggatatcagctctgtgttcctggcagggtttcatctcagaacagagcagccagggaacagcccttcggagctgctcacccagagcccactggtctggatccctcccgctgggctccctcctttttattagaacagtaaagtctgcaacagaacaccacctcacctttccccacactagctcaggaacagacagaatggactaaaaatagttgagctaggtttccaagtccaggatgcacaactcaggccgagcttgggccaaggagctggacgacaagttgcccgctgtcccccgaggcaggaggcatgagcccttctggagaaggaaggcagacgttgccaggttttctgagtccctgcaagatcagagtcgctcctttttaggtctcccgggaacagcgctgaggagcgtgttcctgctgcggagggagtgtgctcctggcaaggggccgtgggctggagtgtagacagagcctctgtgctagtgaggctttgccgagtgaccttggggaagtctgagcctgtgcttgcccgtcccagctctgcctgcctataggataagcagggatggccgtgccttccggcccagcctgccctggggaccttgtccccaccaggctgggcactgactggctaggacattgcattcagtgtataccaggtgccctctgggtagttgggaccagtcggtttagtggtggtcccagttagaaggaggccagaaatgttccaggctgaggccttgccctaccccttgtggatactgacttgttaatgaggcggtagtgtccccagacattgaggtcagcccctagatagaaaccctcgagtcccctactcaacacttgccgctgacctcatctgaggcagccatctgagatccagacttggcctccaacctgcaaaacaatgtatctttttgcacttggaaaacctccgatgggcttcggcggccaagcccagctgtgcccagctccattccagagctcccgtggccgactcagcagggtgtcctgcctccatcagt

SEQ ID NO: 47249 - DNA, 1032 bp, Homo sapiens
tttttaaaaaaattattccattttaaaaatgccaagcgaaggaaaacttggttctaagttagcttcagctcttgtgccaccaatttgttatttgagcactgatctttatcaacaattatcatggtcatctaaatctcttccttttttttttttttactttaaaattaaacctatcaaaaaccactctgtcttttcctgtctgcctccttgaacctttttcaatgatcaaaatgcttccatttcctggggttactgcaatatgatgtttccttaaatgccacaatcctcttggccacttccatagtatattcttcattatatacttctcaatattacatattttgaggtgagtgctaacccacatgtttatttgacatctcaccatttccaaggcacagcctcactgtcctcaaacacttcagcacctggttttacattcttatatattatttatactgtgtcccatcaacacagacactgactcttcacctctctcatctggcatcctgattctgcaactggagtgaatttctaattgcactttagatactccagagcttggaccgtataattagtgagaaaagtgaccccacctttaacacttctgaacgctgtgtccctgtcactccttgccgctcccaccgtctgtcccctgcttgccttccgccatttctcttttcccattctgttggcttcctttttagctgtaactagcttgaacttcatgatcattcacttcagagttacaccctctaccaccatagagtcatgcttggtattccagcatcccatcctcccagtccctagaataatgacacaccaggccaattctggctcagtagtctcctacttaactgttatactcttccttttttccagtacccccaacatttgaattcaccatatttatccaaaaggtcgaagaaatgctttgcaaacccttcagtgggttgtgaaaccaaattattggatgtttgccattacttaaaaataacggagtaaaatagaatgaaaaatagaatgcaaggcata

SEQ ID NO: 47250 - DNA, 1410 bp, Homo sapiens
gttaatgcccaggcctggaggagtgaacagaacaggaaaggaaggaaaccttcagggagcctatagcctctgggttgaggaggttcatttaaatcctttttttcttgtttggaactttctttaatactgtagaacaatatgtttactcagtgaagacctgtgagtggctctcaagtagggttgacagttgagacatttggcaggggacatttggcagtgcctggaggcatttttggttgtcacagctgggggaggatgttaactgaaggcatctattgggtggaggccaaggatgctgccaaacattctacagtgcacagaacagcccccatagcaaagaataatgtggcctaaaataccagtagtgccaaggtaaggaaatcttggtatgagcaaatcaaagaattataagctttatgcctttgtaaagtcatataaatgtttgcgatagagatgtccaagtacaccaggaagaaagtaatcaaaactacaacttaattttctgaatcaaaatacacgcaggtatacttcctcctatgtctaacatgtttagatcgacattgttcttcattttagttttctgaaatttatatgaataggaagaaactaattaacacatattacacattccaaccttaataagcactacaccataggaataaatgtcaaatatcgcgtaacatgaagaagagagattttaggatttgaaaacttagactactttccagtagatttataggcagaattttctaaataaaacaggcatttaaatgaatcacagttcagataaaaatattcttaaattatctaaatgtctccatatagttcatcgtttatttccttttcgcttttttttgagatgaagtctcactctgttgcccaacctggagtgcagtgacacaatctcagctgactgcaacctccacctcccaggttcaagtgattgtcctgcctcagcctcccaagtagctgggattacaggcacgccatgcccagctaatttttgtatttttagtagagacagggtttcactatgttggccaggctggtctcggactcctgacctcgtgatccacccgccctggcctcccaaagtgctgggattacaggcattagccactatgcctggccctatttttgcttatttttatgttttctctagaagtaaatctgatgaagaccttgcctgttatccagctcttagagcgatgcttggtgtgtagtacatgctcagaaaatatttgataaatggatatgaatcaccagttacaggcaaggaagtgtgatggcagaaagatggtaggaagcagaagttttaaagtccccctagagttaattccaaaatcactggtgtcagcttggccacctggtgcagagcttttatctttgagtaaaccttttatgcttctt

SEQ ID NO: 47251 - DNA, 1918 bp, Homo sapiens
atacaaataatgtgtgtgtttcttccttttatcattgtatttttttatttttaaagtttgtaaagtttaatttgcatttcttttatgacatcactcctttattattattaatatttttagagggaaaaatcaagcagttttataattcgaacatcccaaatctgaaatgctccaaaattcaaaactttttgagcaccagcatgatgcacaaaggaaatgctcactggagcattttggatttttgatttttgaatttagaatgttcaactggtaagcataataacaaatattccaaaacttgaaaaagcctgaaatccaaaacacttcttgtcttaagtgtttcagtaaaggacacctaacctgtattattgaataaccattgaaccagactgtgatcacatcacaagcagtgtgtgctaaagagattgcgaaagccaaaaagaagtgtcaccctttgatacagcctggcagatacaaactattacatacatcctaattgtcgttaatcaaaggaaaaggaaaactctgcctttttacaagtaggaagttaattttggagccaaagcacctaggccttctgagaagacagggagatacccttctttttattattattgtttcttaaaattgtggtaaaatacacctaacataaaatttaccaatttaaccatttttaaatgtacagttcagtggcattaagtatatatatttttttgagatggagtctcgctctgtcaccaaggctgtagcgcagtagcgtgatctcagcccactgcaacctctgcctcccgggtgcaagcagttctgcctcagcctcctgagtagctgggattacaggcgtgcgcctgccaccacacccagctaatttttgtatttttagtagagacagggtttcaccatcttggccaggctggtcttgaactcctgacctcaagtgacccaccacccttggcctcccaaagtactgagattataggtgtgagccaccacgcctgtccccggtggcattaagtatattcacattgttgtataaccatcaccaccatccattcccagaattttttcctcatcccaaactggaactgtgtacccactaaactgtaattccccatttcttccatgccccagctcctggtaaccaccattctcctctctgtctctgaagttgtctaccctatgagcctcatataatgagatcgtatagtatatgtaattttgtgtctggtttattgcatttaacacaatgtcttcaaggttcatacatgttgtaacgtgtcagaatttcctccttaaggctcaataacattctgttgtattggatagaccacattttgtttatccattcatcagtgggtggacacttgggtttcatcctttttgtcattgtaaatggtgctgctgtgaacatgaatgtaccgacatctcttcggacccattttttcaacctggaagtgtaattgctgtatcttagggtagttctgcgttcagttttttgaggaatcaccatacgatttcccaagaggccacgctgttttacattcccaccagcaatgcacaaggaatctgtttttctccatatattcttgttgacatttgttattttcttttttttaaaaaaatagtagccatcctaatgggtgtgaggtattcagtgtctcattgtggttttgatttatatttctgtaataatgagtgaagttgagcatcttttcatgtcccactcccttattttaagaaatgtttttccttgtttttaagatcactgtacccaattctcatttattctaaatgagatatataagataagcttattcagctatgatttcagcttacctgaagagagagatttctttttagaggcattgctgctatgtgtcataacatttaaattgccctttaaacagcaacaaaaatctgc

SEQ ID NO: 47252 - DNA, 1026 bp, Homo sapiens
ccttaaggaattctttgtgctgtgtacctagatagaaggaaatctttgagctgatgttttatatattaattttcttacttaaaaattttaattttgtctttaggtagtatagttacttgtcacttagagcaacatctttgcatagttgataaatttcataactaattttctacaattataaaatagtttataaagctttttggatgatgagggagactcaaatggaagtgatccatttgtactattttattaaaacttaatattctttttctcccttttgattcccttcctgtttgtgatagtaataaacatcagagatgaggcacttaattctgattttctgcagtggaagtgtctgtgtttgatgtgagcataggagtaatgagtgagatatgcacgaggcactggaaaacttcagcttggacttgttagtgactcctgtgattgtaatgatcatttgtcagttcaagtgcctttcttgacttggggaattaggaagatggggacctagactttgtatctgcttcccaccctgggactgcttccttacagtaaagagtggcggttaaattgggtgttttccgaagggctgtaaaattttgaatgttgtcgtaattaccctccctccataaacaattttaattggtggctagtttcaaatgggagtttttcttcctacattttaatttacctttaactctggtgatacccaaaagctgaagtagaattcctttcctcctttcattttgttccctgctgtttcatctctggcatgctttttctttttcatctctggcatgctataaaatgttctccttttcaccctaatggggtttggtatggactgttttcaacttcttgttcaaaaattagtttttcttctcttgttagaaattacatttctggccatagaatccctcctgtatgttttcatgaatgaagtgatgtgatctgtcattcggactctaagcttctggtgatgccatgattgaaatgtggattggggaaatgcagcgtgtaatcagc

SEQ ID NO: 47253 - DNA, 1053 bp, Homo sapiens
aacttgaaaagctgtagaatattatacatgtgctgaattataaaaaacattgtgatacacatgaccagtggcacactaatttatgaaggttttcctgcctttatttcagtctagaacagatgacaaagttattcgatttaagagagcaattggatattattcagcgactagtaagcctatgtcatttcatccaccacattacttaggtaagtaaataaaagcctgtgatcaatattgaccatatgataatccaagtaggtttaaatattcaccatataatcttgtaggtttatgtttttgaaacatgattttctgtagttatgccagtaagtatagccaaacttcctgggcagactcagtagcaatccctgaaaatattgaggaggaagagaacttaacagccttcataggatgaagaagaatcagagggcattgtgcagatgaggcagcaggtcgaggggatgttgacgtcttggcagctctgagatatccgcttctaaatacagaattgcctgaggacgtagaagggcctccacaactgcaagtgatttcataaatgcagtgtatttgtagtctctcttttcttgacccctgcctttttttttttttaattcttttttgttgttgagcagagtattgcactgtcgcccaggctggagtgcagtagtgtgacctcggctcactgcaacctctacctcccaggctcaagtgatttttgtgccccagcctcctaagtagctgggattacaggcatgcgccaccatgcccagctaatttttgtatttttagtagagatggggtttcaccatgttggccagacttgtctcgaactcctagcctcaagcgatctgcccatctcagcctcccaaaatgctgggattacaggcatgagccaccacgttcagcctgcaaaagaccaaaagttaattcagagatttgaaattgggaaataaaaatatttataagctgttagcctgaagcctgcttcatattgaacgtcttgtggaggttataaagcactaaactgtaagtagaagtatgagaaatagaccc

SEQ ID NO: 47254 - DNA, 1050 bp, Homo sapiens
gtctgtttctgggctcagttctgttgaatttctgattatcttcatgccacaggattatgccgttctagttgccatagccttgtaataatacttgatgtctgattggggaaatctgcccatgtaatatttctgcaagaggtcgagactgttcttgatccttttcacttttatgtacattttatgatccttgtggagattttgattggaattacaccaactctgtagatcaatttggaaagaataaaatctttattattgagtgtactaaagaaaatgttacatttctttattgatttgaattgtcctgaatatctttccgtaaacttgaattttcttcattaagcattcataacatcttttcttagagatattgctaaatatttatttttgggtgctatttctatgtgtgtcttatattttcaaattaatactgtaagttgattttatcttaacaactttgctcagttcttattaattttcatagtttatttgtatcttgctttggctgattgtgtctcctctagtatctttttgatcttcctgatccactgagccagctgtgacttagggcatgatttttttttttcttcttttttttttgttttcaagatggagtctcgctctgtcgcccagactggagtgcagtgatacaatctcagctcactgcaacctccacctcctgggttcaagcaattctcctgcctcagcctcccgagtagctgggattacaggtgcctgccaccatgcccggctaatttttgtatttttagtagagacggggtttcactgtgttagccaggctgatctcgaactcctgacctcatgatctgcccacctcggcctcccaaagtgctgtccacaaatggacaggtgtgagctaccacacctggccggggcacgatttttaatagaaggtgcgatggtgactgttcttgtctagcccttgatcttaagggggagtctgatgtcttgtcatcttaacccttagcattatctcctctaccttttccatgttaaagaaatatcctcatgaaagagttttaatctggg

SEQ ID NO: 47255 - DNA, 1036 bp, Homo sapiens
catcttccatgtcctgacgaaggtattatcaaaggggccctggagtggcttctgttatttgatgagtggccattcctatgggtgttttgtccttttgtccttttttgaaccatttttctgtcttactaatctacttgaaacaaagttcactttcccctttctaaacattgaatgaaagatgaacatttataactgtaaatagttttaaaataactcgtgaaaagtctcacttttttccttcaacttagtatagaatattttatacttctaatgaaataatgcatcacattattttatgacttgtaattttattctttttacttcaatttcagaattttcttaaaccatatttgtgctgtaatgtcaggtttaattctgatgtcagatacaatatctggttcctttatcatttgtgcttagaaaataatgtttccccctttgaatggctcatagtgcttcatgtgttttgacttgttcatgacctcattgagtgcagttttaatagtgctaagaacaaaaaatataatacaggattttgttaacatacgcatagtcagaaaatgaaactatcattttatacagtgtcataatttcactttattagtgtcttaatgtatgcttaaatatatacatatagtgtggcatcaattattttttaatcttggtgtctcaaatgtatctatgtgtatttaaatttcctcagtgatttgtagtctttatgttggcacttttaatcttagccccacaatttaacaagttacctcagttactagattaatcctgcagaactggtttattgctatcatgtattattaacatgaatacctatatgaccatatataaccagacttttctgtctattctctacaacccatctgtggtttgtaaaatggagtcaataaatgcaataatgaactcctgttctcaaatactcctgaggtggacttcaactgttaactgactaatccaaatattgcttacttttattaattaaaggacatggaaaacatgtagccagtactatttgctcagatcc

SEQ ID NO: 47256 - DNA, 1308 bp, Homo sapiens
atgtaggtggaggaggaaagggacacaggagaacacaaaacaggatggtggcagcaggtggcactgggtcttctcttgagacatggctgagatggacaagggaacgccgtatcttcaaagtgagaacttacaggaactcccttccctcctctcctcttctccttctttttaaggatgggagactgaatagtttggttattgttatgttatttttttggccaatggggaggatttagtgggggagaggtgagtttatcagagagaataggaaaaaattagacagtcctgataaagagtttgtattagtagacttaggtgggaaggagaagcagaggcagaagtccatactttggggccatctttgttggtgaaggcaggaaggattgggggtaaggatacctcagatttggtttgggaaagggagtcaactagcactgaggaaaaggacagaggcccagccagctgcacttattagttgatcatggagcatgggtattttctgcactgtagtttagtacttctttgccaatggtagtttagtacttcttcaatggtaaatgagattttaaaaggatttcataaacatttatgtcttttgctattgtgtgtattacccttagagcagtgtgcagcaggcagtgaaagaatgaataattggtttaggtacacacaacttattggagatgaagacccggtttggtgcgtcagaaaattaaactttgttgtgtgagggtgtgcgtaagtgctgagatgctttgaaaggtcagtgctaaacaaattgcagtcttttctgctcaagtgatttatgaactttgattttgatattctgtagagatggggagccattgaaggtttggtacaaatgatgtttctgtttagaaagatgagttggatagcgatgtatggactgaaccaaaacagaaatgaagcctttacgtgtcaaagatagggcaggtgcagatgacctttgcctagacagttaagaccctagaatttaagtgtttagaaaaatgcattgttaatgtgctatgacaaatacatatttatttctgaatggaaaagatgtgtagatttgacctgagtttagaatttgggagaccttactcagtactgtaatttcagtgggtgagatttttgtaagcagctttagaatctaggtctttatagggagctgataaaattgaacttgtttcatgcgttagttacattcaagagggggaaacaagcctataaaaaagttttttatgtcagtgatatatccatgattatcactgtaattggaacaccagctctccagaagggaaattt

SEQ ID NO: 47257 - DNA, 1382 bp, Homo sapiens
agacagagtaaaaggcctacattttaaaagattgtagagtaataagaatacccagctataattgaagagcgcaaagttcagaaagtaaagctcagtgattcgcacatttttaaaattaacgtcatcttaataaaattggcttttgtttcttgcctcccatttcctacaaaagtcttccctaatacctcaaaattaagtaaataagagaaacaggcttataagaagcagacagataaaaattatacacacatgaaataaatatgtggaatgagggagcaagtttataggtgagtactatttttatgaaagattttcctatattgattcctgtatttttaaaccaccaagaaaagccgaaaggagcattttttcctggtatagtttgcttcagaaatgtttttatttgtgctaataattggaattgctaataaaaagtaaactaagtctgctcactgtggattatactatgaaacagaataatcaatattatggtgctgatttaatattgtgaaaattggtattgtaaacattttccccatgatttctgttaataagtctgtctgaatttctttattctacagagctttctaggagcagcattgaggtttttttcacagaactttgagtagacctagcacaacagatgattgcttaggaaggcaaatgatatgacaggccaatctgtgatattactcttttggattaatattcatttcataagtccttgtactcttttttttttttaaccagtgttacttgccaatccttgagcttttgagtttctaatatattaggaataacatacatggaatgaggaatatgaacagcatttatctacatgtctgtaatactgtgttctgctacatgtcctgtgccttactaagcatttatatttttgtggactgtgggctgctccatcctcaactatcaaagttttaagaaaatatccacagccttttacctttgagaattacagagggtgcttacagacgtatcagcctgaggagaagaacccaacctgctacctacacgctggggctgcttaaaaattagggggcagtttttctatcagaaggaaaaaaaacagtcttcgttgtatccatttttctgtttctctcctgatataaatgaattggaggtttttgttgttgtttatggtcataacaaccccaggaaagctcgtcaagtataatagtagctgctccctaaatacacacaaccagaagtctagtcggccaccatcttggaggccattcatctgcccgcatctcttcctcacctatgaacaggcgtgcatgcatactgcagttctctctcctgcgcccttagtgggcattgctaattaatggtcaagctgtggcactgagcttagagacatactt

SEQ ID NO: 47258 - DNA, 1050 bp, Homo sapiens
ttgtttttttttttttgagacggagtctcactctgtcgcccaggctggagtggagtggcgcaatctcggctcactgcaagctccgcctcctgggttggcaccattctcctgcctcagcctccccagtagctgggactgcaggcacctgccaccatgcctggctaattttttgtatttttagtagagacggggtttcaccgtgtcagccaggatggtctcgatctcctgacctcgtgatccgcccacctcgacctcccaaagtgctgggattacaggcgtgagccaccgcgcctggccgccctagagttgtttttgccagtgtaaaaagttggtttagtgtaagttaaggaagacagtttaatattcagtctttcagaagtaggctacttcctgaagtagtaactttttctgacagtgaaaagagattaatatttgttggtggtgatacacaagatttattcagaggttttcagttagatgagctgacctccaggaatctcttactgttttaataagactcagtaggaacatgttgctcttcaaaactaccagtacggagttcatttttatactaccatgctctaagtcccagatggtacccacccaggatgtgctggagcccagtgccatgggcaagcccacatacccccaggtttctgtaaaaactcagattactttctgtgagctggctactttgtatttgcttatttcctgtggattgaataataccgtgagggctgagaagtccttcctcctgggcaacagtgactctttggaagaaagcagcagcccagagagagaagagcagcagacattctcatctctagaggctaccctccagctgcccctttgcaggggacttgtaaatcagagccaagcatttttctttcctcaacttcttccactcttgaggcagctgtttcaacccgaaaattggatgtcccttggaattcttcataagcactaatttgtaattaatttaatgtaagtgatgtgtaaaatgtgagttcatctcattatctctacataatgaggggtgctaggtgcttt

SEQ ID NO: 47259 - DNA, 1032 bp, Homo sapiens
taaaatgattaaagagaggcgagaacagagccgatgaaagggaaagaaaaaaatgaaaaagttaaaggccaatttagtaagaatgcctctctttataacccctaggggactcctgacatgcacaacctaaacccatgctctgtgtgtggggtatgtttcagtgtgtgtattgtggtatgtgtgtggtggggggtgtgtgtggtggggtttgttgggggatatgttgtgtgaaatatgtgatgtgtgcatggtatgaaatgtgtgatgtgtgtgtcctatgtgtttgcgaggtgtggttatgtagagtaatctgatagcaacatagcatattggcgaacagctcattctggaagctccccttgcctgttttctcttggggtggagcagccttggtgttggatcacaggagggaaggcaggtcggctcacaggaaggcctgtgcatggtagtggtggttgtggagatgatcctgtatgttccgagtctacttctgggaaagcttctggaagctgagctgtgctggagatccacaggatcggggtgggggcagtgccttagattgtgcgtccaacgacaggatatgcttcgtgatggagaccttattggttttatatctatacctaaaagtattgaataaaaacaaataagcatgtatttatatatacatgtatgtctgttttgacttgatggactttaagcatttggagtgtttgaaatattcctttaacatctaaacactaagatattcaaatgtaaatgaaagacatttgcctaatgagagcagtaacatttttgtaaaaggaaaattttcagtgactgccttaacttgtaccccagctctgcccggcaggcttcacgtaaggggacactatctggagttggctccagaagggcttgtcacagagccctatgaggtcttgactcaacgtgttcctatacgtgacactgttacctgacttgtcaggtattgaaatgtatttaagcattttttttctgttgctgagaaactgtgtatccaagtgtctaactcct

SEQ ID NO: 47260 - DNA, 1062 bp, Homo sapiens
caaacatagagaaaagttgcaagtacaatacagaaaccttttttttaacttaaatactttactgattttctaacagttgatggcattttactttataaccaccaaagaaccatcaaaatcaatccgcagtgatgctgtggtccattccacccttcagagctgttaggcttgttgtcccaacagtgtcctttatgacaaggaacctgttcctgttccaggtcgtctctgctttcaggagtgatgccctgcctgggggtgcacacctccttctgtcccattaggcaggacactggctcagagggtttggtgcagggtgactgtggcttctccgtgtggtgctgctctcaccttttgtaaccgtctcacatggaagtgcttagaggccctgtaaaggtttcactcctcagacaggcagcacgtttttatcagcatgaactcagagcctcttgtttctctaggggccttcagctcactgcaccatcatctgttttgatgttccctttgtcaccttgcaaactggccttcgtcatcttctctgagcacctcctttcttctccacagatgttctgcttgcccctgtgtctccctgcctcagccctgggatccccatttctccaagcagccccagttcttccaagtgggggatggcatttagaagccaggctctcagagtcggaggttctgtgctgcaggaactttgccgccctggccctcccagtgcagcatgagggatccaccccaacattgctgttgtgtattcctatatctcattgaaaacagtggatttaccctggtccttccaagctggcacagtccagtgtccctccctgtgttcatagggtacggtctagcatcctgctgcattcgtagcttctggctctggcagtgagaggcttggctgggaagccccatggccccttacttggtcaggatccctgtgtggtgcagtccctattgcccctgtttcttttggggcctgtctcaccctctgggctggcaccgcttttgcaggcatgactgaccatccctcccactgggtcccaactacctgactttaggaag

SEQ ID NO: 47261 - DNA, 1049 bp, Homo sapiens
tcctggcttgaacaaaaaaatgaatgaatcctgaaaattggtacttagaatgtacttccagggtttaaatgtttcacaagagtgaggttgtatcaaaaatcactgactagctagttttcagtatccacaattcagtgtgctatttttaattattctaaagtaaaacattctgacatcctgttttcatttgtaatggtatcatcaaatgaaagtagaaaagtagaaaagctgaataagaaatcacatgggtcttcttagctcacatcatccgggatttacctagaacctcccactggacttgtctatatgacgggcgaccactcagtaatcaccaaccttttgtttctgcccctcaccaggtacatggtgcagtggccgggagcacgcatccttcggcgtcaggagctagatgccttcctggctcaggcgctgtcccccaaactctacgagcctgatcagctccaggagctcaaggtaatttatcagcctcattgcattgtcttggacagtctcactttggattttggtgtaatactgctaactttcaacaggcagaattgctaattctttaaactaattgctttagtccactaaactaataatactaatatgataagaacttgatcaatcgccttcatggcaaaaggaatattcctttctagttatggatttgctatccccagtttggaaatgattagtcccactttgtcagagaatgatttccccttgtttaccattggatgtttattcttatttatcacatcatgaaataaacttgccttttatattttagggggggattccaaaccctgagagggcttgatcttaagaattttctaacatctagcaaggattctttttcttatttcatttcattgttcctaattacaactttagttttctctaaaaaatattctttgcccctcaactattataaaatcccttataaaaaaccacttgaagaacgatgttacatcatcatttctatccctttttaagtcagcatttaacatcatattccttttaattttgccttctagtaattcctt

SEQ ID NO: 47262 - DNA, 1026 bp, Homo sapiens
aagattcctcctccggccccatcttgaccgtggctcatcactcctggggtggggatcctcgccagcccagcccttcttcactggcaccgactggagtgctgtcccagaatgtgggctttgacctgggagggatggatttttgtggcaggacctggcaggaggccgctggaggccggttgccttcggaggtgtcttgtctgcctcatttggtggggatgtgtcgctctgcaccggcactgaggaggacctgtcctctccttttagggatcctactcttacataaagccacttgggccgtacactgtgttcccttgtgcctgtgccttccaactggaggatggagaccaggccccatgccctccactcctgcctgcaaagtgagctggcatctcactttgtcaccaacttactttgaataatttaaatctctgggaagcaggaatgcttctgttaaagttttaaacatccttaacatgtagctttctggccctctttcagctgcttgttctattggactggaagggtttttggaggtgtaatcagtaaaactgacttgaaagaaattgaaagctgttcaggtcacttaagtgacagacatttcattcatacctcagtaaatatttgttgggcttgtattctgtacggagttcagagctggctgtgagggcccaggggttagccaggcagcttctcagattggtggcagccaccctggagggggagtgtctcagcagaggaggggcgagagtggactgaggttttgactgtcccccgtgttgcatgttgctgtggggagaggttgggagaaggttaggggcagggagccagtgaggaggtgactgtcaccctgcctgtgtacccagggggtggggagtgaggactggggtcggtagaagggtcacattctggaagtgctcagaaggtagagtggacaagacttgcctggcatggctccctccaattcctctgtgtccgtctgtctgtctgggctcagcctgccctcctcctcagggccctgtctctgtg

SEQ ID NO: 47263 - DNA, 1112 bp, Homo sapiens
cctctttcagcagtatacaagtcttgcatctcctaggttaaatttattcctacatattaatattttgttatttttgatggtattataatggtaattgctttcttgattttattttcagattattcattgctagtgtgtagaaatccaactggtttttgtgtgttgtttttgcacctacaccttctgaatttatttgttaggtatagaaagtttttctgtgtatggattcctttagagttttctatatgtaggattatgtcatatgcaaataaaggtaattttatatcttcctttccaattcagactccttttatttcaggattttttttttttttttgtctaattgctctggctagaacttccagtactgtgttaaacagaagtggcaacaataggcatcctattttcctcctcatcttatgggaaaagctttcagtctttcaccattgtatacaatgtttgctgtggatttttcatccatggctttcatcatgttgaagaagttcccctctattcctagtttgtagagtatttttatcatgaaaggattttgttgagtgctttttctgtatcaattgagatggtcacgtaggatttttcatcattgtgttaatatggtgtaatgtgtcttggggaggatggggaattggggaaggattgggagagatgggaacataagaatgaggcagagggctgtgccagctcaggagaaagagccaggtgagccctgctgcttcttgtattttacccacttggggagatctgtcctccagggtgaaggaaagagaagcacagcttctgctgtcccatcctccaggacagagccccaggattgcatctttttcttcttgcagtcagacttgatgctttaggtgttgaagcactgatttattttcatgtactgaaccgtccttgcattcctgtgataaatcccacttggtcatggtgcaccgtccccttaatatgctcctagactttatttactggtgttttgttgaggatttttacatcaatattcattagagatactggtctgtagttttcttatagtgtctctgtctggctttgggctcagggtaatgcttaggaaatgttcccccctcttctatttt

SEQ ID NO: 47264 - DNA, 1031 bp, Homo sapiens
ttttggtcatctgagtgctttgcatttttattcagcattccaagtttagtttgtcaatttctgcaaagaagtcagctgggattttgatagggattatgtggaatctgtagattagttttccattgtttcttgaatcccacacctttcttctaagtttgatttccttcttatagaattatatcttttagttatttcagcaaaggcttatgaaaatacatactgtcttgtctgacaatgactgtctttattcttacatgattctaatattctaaaatggatctaaagttctagagtgaaagctgtttttctttaattctttgaaaggtattttattgtcttttgacatctcttgctaatgagatatctgttgttagtctagttgctgtttctttatattgtttgatgtactcagtacatgagtgtacgatattgcctctagatgtacatttgtttttgtttattctgcttagaacccagtaagcctctttaatttggagagtcacatgtcaattctgaaaaatactctgttttctcttttagtagcatttcttctgtattctctgtatcatttaaaaatttttcttcaaatttactattttttcagccatctactgtttagtgcatccattgagtttaaaaaattttgatcattgtattttttatttctaaaatttctataaatttccttttcaatattgcctggtcttttttcttttttaatacatccctgtgccttgccgcatcctcttgatttccttctgaatgtgttgagtatatttattttcaaatctcttttcggttgttctattatcctcagttctggtgatctcttttgactggtgtgtctattgactgaccctcttggtggttcacctccttctgtggggcatggtgcttcagaggggtcacattccattgggactagtatgtccttggctgctgtccacctacaagacggtttgtgtttgccttttgctaaggttttatggttttcacaagattagttccagatccagtttggggttcccaac

SEQ ID NO: 47265 - DNA, 1413 bp, Homo sapiens
ggtgaggcaaggggtgcggagggctgtgagcccggtggcaacctcgagagcctcatggttccagcggcaacacttgggcctgtgtgtgctcccggtgcgtgggacatgtcacctgctgaggccccaggcctggccggagtcagacaggtcccagcaggaggggcggccacttttctgcagcagccactgactaacttggccaggttgtagtttcctcattgaagagatgagaggagaaggcctctttctgggtggtggagaaagggagcagtgcccaggcagagtcttgtgagtgtcagggagctcagggcaacacgcgaggccattcagccaaggggcaggtctgcggggtcctgtggctgcccagcttcatggccctgggcgtgtcacttgctttatctgaagctctgcttctaggttcctgggaagctattaaacggcattcactctgtgacggtgctagggagttgacgatagagatgagaaagagcggtgtgactctagcctgtggacacgtgtgttctgcggcccagcccgtaaggcagcgggctcgccgccccttcacttagagcattggaagccgcctcacctaggcactgtatccaggtgtctgcacttccatttgctcagaattggagctgtgtctgtttgaagttccagacttttctgcctcagcctgttgtccctgctactatatagagagaaacctgtcctcaaacccctgggaaggcaaaggctggagctgcttgcaggccaagctctgaagtagtcctccttcacccaggcagggagacaaattacacactgtttcttagactgttacatctatcctgtagccctggccctgagtttatttttccaacatagctatggagaaaaaaaccaggaaacttgggtccttttccggttaaagaccaattcagcatgtgccaggattcctaggcaggcccgaggcggggcttaagcttgtccagtggccctgggacagttgggggtcactgtcttgagcatctaaactgcctggggaagggctctctctgcctgaatgtggtgtgtggggaggcacagcattgtgtaggaggccatggggttggggagtgtcccctcctgtgggcagatagcttcccacagtggggactgaaggcccagcctggcctcctgtctgcagaggcttgggccctctaccctcctcccatctcaactgggcctgaggcttcttcggatggaaattcaaatagtggcaacgtcacctgcctcctggaggccatcctgccgcggccctggcagaggacccctcgggaggtcctacctgtccgctggctgtggggctatgtggatgctgctgacccactcgcttctgccctagctccaaggctctcaggcccccgacgagccctggtgtgttcggggcct

SEQ ID NO: 47266 - DNA, 1032 bp, Homo sapiens
aatagagtaggaaggtgcagccttttaggaggtgtttaggtcgtcagagctccaccctcatgaatgaactaatattattagtaaaagacctgatggagggaattctttttttgcccttccactttctgtcatgtgaggacacagcatgctcccctccagatgatgcagcatgtaaggcaccatcttggaagcagagagcagccctcaccagatggcagtgccttaatcttggcctatccagcctccagaactgtgagaatcaatgtctgttgtttaagttgcccagcctgtgctattctgttatagcagcacaaaatggactaagacagcgattggtaccaggggagtggggtgttgctaaaacatacctaaaaatgtggaagcggctttggaactgggtaatgggttgaggctagaagagttgtgaaatgaaagcaggaaaaagcttgtattgccacgagtggagcattaagagtgattctggtgagggctcagaagaagaggagagctgtaaggaaattatcactcattcttctgagaaactacgtaagtggttttgaacagaatgctgataaaaacttggacagtaaagaccattccgattaggtcatagacagaaatgaggactatcattggaaactggggaaaaggccatctttgttacaaagtggcaaagaacgtggctgaattatgtccatgtccatgttctaggactttgtaaggggcagaacttagcgatgaaccagaatatttggcagaagaaatttctaagcaggaaagtgtgcaggatgctgtgtggtttctcttttttttttttttttttgaattgtgttgtcttttttttttttttttttattatactctaagttttagggtacatgttcacattgtgcaggttagttacatatgtatacatgtgccatgctggtgcgctgcacccactaacgtgtcatctagcattaggtatatctcccaatgctatccctcacccctcccccgaccccaccacagtccccagagtgtgatattccc

SEQ ID NO: 47267 - DNA, 1048 bp, Homo sapiens
actatgtggagacatagagagaaaattgtcatctacaagccaaggagtgaggcctcagaaggaaccaaccctggtgacacattgatctcagacttctagcttccagttctcttgttcaagccacctagtctgtggtactttgttatggagcccgtagtaaactaatacagaagacaaaattccctgctgttccttaattcttccactataacttgtgtgtatttctttataattctatcttaaacaacatatttcttgattttgcctgtttataaactttacataaattgaacaatgctgtgtgtattctcctgtgacttgccttttcttttcaacgttctattcacatttatccatattgatgtgtgagctgtagcttatttgtattcactgctgtatggcattccattgtgtggatattccacaaattacctcttttacttgtgatggacatttgggttgttcatattttcacatgtctctgggtatacatgtgcaagagtttctgtaggctatgtagctaagggtaaaatttgtgaactttagggtatatacaatttcagtttcctaggtaatgacaaattatttctcaaaatgattgtaccagttcacattcccaacagcagtaaatgagagttcccactgctctgcatccttgtcaacacttagtattgactgactttttgatttttgccagactcagttggtatgagatagtacctcaaatatgttaccttgttatatgttttgagccatttttgtttcttttctctagtgcttgttcatgtatttttcaatttttttactgtagtaaaatatatataataaaatttatcattttattcatgtttgagtatatagtccagtgttattaaatacattcataaatgttgtacagccattaccactatccatctatttaactcatcattttgtaaaactgaaatgctgtacctattaaacaagaactcccccatcctccaacatgccagcccctggtgacaccattctttttgtgtctctcattttaactactctaaatacttta

SEQ ID NO: 47268 - DNA, 1044 bp, Homo sapiens
taattatagtaaactgtggaatctagattaaataattacaccctactttttttcttggcttgtggatgtgtagactacatagtggttttttcaacccaggaacataacagtataatggaggataggaaggcagaagatgtttaaagggttgagaaataatggtatatgtataatggtcagtaagcagaacaagccagccaagttggatattcttcaagactatcttaagtgtctgctatgtgtctaagtgaaaggaaataagcaatagtccttttgggaaacctgacctagtacttagctatttcagacttaatgtgatgtttgatagagtaggaaataagatcttaaattagaattaggttaaattgctttagagaaacttatttataaatgtaaagaatttattatctcatgtgttgcacatgctctatcgaagggagcaaaatactattggagagtttgcttattaatgtaatactcagcctgcatcattgtcggataattttgttgataattcaactatttgagattgaaagaaatctgttaaagtagccagtgttgtaattttgatctgtgtttgattacagcgtatgaaacaaaaatgagactggaggaaatagtttacttgtgaactttttgagctactttgttttaggagtatttaaattaatgtaaaagtgtagggaaatgtcttagctcagaaaatttaaacttactagatattaagtgcttaaaaggtagagtatgcttgcatttcaactaaagtttagagtgttttaggaaattagaggctattttaaaaaatattttgaagttaggagtgtgttcctaagtgttttcaccataagaaaataagtctgtggggatagtacatatgttaattaacttgatttagctataatataaacctattttatgtacaccataaaaataacaatttttatgtcaatttgaaacaaattcattacaaaaatgaaattaggaatgtgaatgttaataagttatgaaaacttacttgatgtaaatgtagatatagacaagtct

SEQ ID NO: 47269 - DNA, 1049 bp, Homo sapiens
gattttgcccacaaggaggtaactatacgacctgctgcctttcttagggccttattattcaccgataacctgtttccttgctactttgctttggtgtaagcagagttctttctgtaggttttttcaaatgaaaacattgcaagaatatcaaagagagcagtgtttgcgttagtgattataaactgcagcatggtgctgacattgataactgaaagtcaactaatgagaatttgagacttctgaagtacacttagttgctagtgtctcccttttggtgtcactggaaagtttagaaagcatggttttgtttttgctcaggtttctctttctgtgatgcagagactctcagctgttcctcctctatgtctacattatgtctgaaggaaagaatttaacaaaacttgaaatactgctgtttttctacaatgtttgtaaatatttatcttgctgcttttctaggtttgtcttctggatttaaaatttggggcggctggggtggaattgcatggtttgggaatgggtaattgagctgctgctcattatggtatgtaacagtgatttgtctgtttaatatgtacaagaactggaaggtcaataaaatgaaagtggttgtcttgactgggtaatagtgttacatattttgttaaaagttatacatcttttcaataaaaacactgcatacttcaaaactagtgctttttaagtcatccttaacccttatccccatccttgcagtagtagatgcatttttcatttgtaattattatgatttgttcttagtttcatttttcattagcaataatttggtgattggatggtcatttacagatgttttaataaagctaacacgagcaatttccagctcttccatttttgtaaacacttgtgtgactttgtacagacaattaactgctcaggatcaccctcctttttgttttgtttttgagatggtctcattccgtcacccatgctggagtgtagtgaaatgatcacagctcactgcagccttgacctcccggactcaagcttcctagtaactgggactacag

SEQ ID NO: 47270 - DNA, 1050 bp, Homo sapiens
attctctgcctcaggctcctgagtagctggtaccacaggcgcccgccaccacgcccggctaattttttttgtatttttagtagagacggggtttgttttttgtttgtttgtttgtttgtttgttttgagagggagtcttgctctgtcgccaggctggagtgcagtggggtggcgcggcgcgatctcggctcactgcaaactccgcctcccgggttcaaggtattctcctgcctcagcctcccgagtagctgggactacaggcacgcgctaccacacctggctaatttttgtgtttttaccatgttggctaggatggtctcgatctcccgacctcgtgatccgcccgcctcggcctcccaaagtgctgggatttcaggcgtgagccaccgcaccccgctcgagacggggtttcaccatgttggtcaggctggtcttgaactcctgacctcctgatccaccggcctcggcctcccaaagtgctgggattacaagcgtgagccactgcgcccggccaagacctactcttatttctaacttctcagtatgaaaacattgcaaagatatccagaagtagttttgaagttccatggattcatcactcagattcaccacttacaaatgactcacctgtcttctttcccccaaatctgcaaccccaagtgtggatctctttggaaattgtctctttcactaggggtctataccaggatttggtgtcttgagtgacccttcatagagtgagttcaaatccaggtctctccctttgtcactgtcactttgagcaaggtacttaacctcgtggagctgctgtgaatgtagaacgaagtaaaacttgtgtatgacacttctctgatgtagttctttaaaacaaaattcaaatgtcatatcatttcatctgtaaatggcaaaaaccacaattacttttgcaccaatctaatacttcagtgttcagtatgcatctctcataaataaggaatttaaagaaaaacaacttcagcattaatgatcatacccaagaaaattaacagaatttatttagtatcacttatt

SEQ ID NO: 47271 - DNA, 1112 bp, Homo sapiens
atgagatcgtgccactgcactccaacctgggcaacagagtgagactccatctcaaaaaataaaaataaaataaaatagttagaagaaactagcttgcaccaggtagcaatttttttataacagcaggaatggactaagtcatccacagagaaaattgttagagctaatgaattaaccaaagttgcaggatacaaagtaaacacacaaaaatctgttgtatttctgtacatttgcaatgaactatctgaacaggaaatttaaaaaaattataacagcatcaaaaagaataaaatacttagtgataaatttaaccgaggatgtaaaagataaagaaaactgcaaaatattgctgaaagaaattacagaagacctaaataaatggaaagactttccatgcttggaatgaattagaagatttaatattgttaagatggcagtactacccaaaatgatctatagatttagttcaatcagaattccaatggtgtttttttttcagaaatagactcatactgatatttatatggaatctcatggtaccctgaatagccaaaacaatcttgaaaaagaaaacaaagttggaggactcacactgcctgagtttaatacttactgcaaagctatcataatcaaaatagtgtcatactggcataaggatggatacatgtagatcagtggaatagaattggcagtcctgaaaaaaaatctcacatatatggtcaattgatttttttacaagggtggatgtcgagatccttccatcagaaaagggcagtgtatacaaatgatacttggaaaactggatatccacagccaaaagaacacgcttgagataaatgaaagaattagaatgcctcagcaaggaaataaaaggttttaagaataagtatatggaaattttagaactgaaataaaaagctacgggatagacttaccagtatattagcggtaacaaagaaatgagtgaactagaagatagaacagagagaaaatggagtggaaagaaaaatgaatagagcctcaagaattgtgggagtacaacaaaagatataatatttatatctttggaggttggaaggggaaacaaaggagggaagggctgaaaaagtact

SEQ ID NO: 47272 - DNA, 1018 bp, Homo sapiens
cctcaccctcctgagtagctgggactacaggtgcccgccatcatgcccagctaaatttttttgtatttttagtagagatggggtttcaccttattggtcaggctggtcttgaattcctgagctcaggcaatccatctgcctttgcttcccaaagtgttgggattacaggcgtgagccaccacgcccagccagtttctattcttaacctggtagcttttttgtgcatcatttctatcctgtaaattctcataactttgtttcttttatcatagattatttaagattacagcaaggtgtgaaaaactgtacaatgagtagggttggggcagccctgtaccctaagagatagcatgttataaaaccaggtaatagccccatacttttcctgattgtgtcccgttcctccgcctctgttttctgagttagcattccatgactgtctttatccttttattccatctgatgggttcttcactcatatagggtgttgttttgcatgtctgtaaacttctctgcacataatgttattaagttgtttccaactttttggctatgaaataatcttgctctgtattcttgtatgcctccttgggaacatgtccaagagtttctcttaaaatatataccggccaggtgcagtggctcacacctgtaatcccagcactctgggaggccgaggcaggtggatcacgaggtcaggaattcgagaccattctggccaacatggtgaaaccccgtctctactaaaaatagaaaaattagctgggtgtggtggcgcatgcctataatcttagctacttgggaggctgaggcaggagaattgcttgaatccgggaggcggacgttgcagtgaactgagattgcgccactgcactccagcctaggtgacagagcgagtctccatctcacaaagaaaaaaaaaaagatatatacttaggtgtgtagtagctggttcacaggcatgcatagcctcaacttatataagttatgccaacttgtgttctgaagtgggcatggc

SEQ ID NO: 47273 - DNA, 1071 bp, Homo sapiens
gccttatttttctcttaccaaatgctttgcttattcactacagcaaacaatttcagagataatgaaagcagacttctctattgagggctgtcccataatgactcataagaacttagtcctgccgagcgcagtggctcatgcctataaccccagcactttgggaggccgaggcaggcggatcacctaaggtcaggagttcgagaccagcctggccaacatggtgaaaccccgtctctcacctaaggtcaggagttcaagaccagcctggccaacatggtgaaacccgatctctactaaaaatacaaaacttagccgggcatggtggtgcacgcctgtaatcccagctgctcaggaggctgagacaggagaattgcttgaaccagaggttgcagtcagccaagatcacgccactgcactccagcctgggcaacagagcgagactctgtctcaaaaaaaaaaaaaaaaaaaagaacttagtcaataattacctaggagttacggtatcaacttacggaagctgaaagcactgccaatttccagagcctttaatttataccatcatgggaattagtgttatctccaattggcagcctatttaaacctagaaacaaaattttttgaaaaagtcaatttgtatagttttaacagtttttgtgcatggataagaatatgcttaagccgaaatatgtataatccctgaaacatctttatgctaatgagaagtcatctattattaactttcaaacgctgagcttctccttaattcaccagatttttttaaaaatcctggattattgagcaaaacagtgtacgtagtgttgtgcaatgctattcggggaatatacttggctgcagtcttcccagaggctagaggacagcaccttcatttgcccggagggcagcatcagggattcctcttcttcaagaggacttaagggtgtccatacagttcaggagacaactcacatcaggctgatatggaagctccctggcctaaagcctattccacacaggagccagtatctcttgctacagcttatctgattcgtgggtgccccttacttgagtcac

SEQ ID NO: 47274 - DNA, 1725 bp, Homo sapiens
ggatttcggctcactgcaagctccggcacccgggttcaagcaattctcctgcctcagcctcccaagtagctgggaccaagtagcctgccaccatgcctggctaatttttatattttttagtagaggtggggtttcactatgttaaccatgctggtcttgaactcctgaccttgtgatctgcccgccttggcctcccaaagtgctgagattacaagcttgagccaccacacccaaccgaaagtctgtaatcttagcaccttcccttattagggaaagtgaaggcatcaaggataacacagaatgaagttttattttaaatgacagaggtaggccctaaatttttttacacatttttacacatttttttctataccattttaagataatagatttcttatatttctttgctaattttcataataactttcttttttagctacaaggctttggccgaccaagtgtgtaccatgctgctattgtcatcttccttgaattctttgcgtggggcctgttgacaactccaatgttgactgtaagtattgctgaactgggtttgtgttttgtaagagaaagagataagttcttaggcacgtatcactgtgtatgtctagatacgtgtttgggagtagctcttgatagtgatttaaaacagcttgtttcattgttttttttttttccattgtggtttctgaaccacatgtaacacaaaacacctctttaaatattcctgggtagcactgcactcttattgaagtaaacttgggggtgctgttatacaaacgaactgtatatgtttaggaagatccttaagatactctacagcagcaactcccaaacttttttagcactagggactggtttcgtggaagacaatgtttccacagaattgggttggttgggggatggtttcaggatgaaactgttccacctcagaccatcaggcattattagttagattctcataatgagcgcaacttagacccctaacatgcacagttcagagtagggtttgcacccctatgagaatctaatgccgctgctgatctgacaggaggcagaactcaggtggtaatgctcgctcgcctgctgctctgtgtggctgggttcataacaggccacggactcatagggtcctgtcctacaggaaattgcagagcattgttgaagtctgtaacttctttaggaggatattaatggtctttgacttaagaacatagtaaatagcagattggtgagtactttgtaacaatgagtaataattgtaggagtgtctaaatttcagtttttcgtagcttatctatagccatttcttcagaggtggtattgaatatcttagcaagaacttgtatgtttcatctatgatgcggttagaaggaagagagatgccaaagaaaagatgacgggggcagatattaggtggcttacaactatttaacacttaattttaataaaatattttaaactggagttaagtttcagttgtcttaattattctttaaaaattattgatgggccgggtacagtagcatatgcctttaggcccagctattcagtaagctgaggcaggaggattgcttgagctcaggagttcaagtctagcctgggcaacatagcaagaccccatctctaaaaaaacaaaaattaaaaaaaaaattggagcttaactcttcctaatcatcattttgccttactaaagaatccctctgggtacggataatctttgtt

SEQ ID NO: 47275 - DNA, 1197 bp, Homo sapiens
aagttttggaacacattgtattaggctgaattatatactaccatttttgatttacagaaacattcatttcatacagttcaagctaactttttacttgctatgttagaaagcagagatatttaggaatttggcacttctgggtttttcagtgtaggtctctagggagataggctggaatacacctgtgaagatgaagtctgcctactggggactggtctgtattcctgacaccagggctgccagaggtgaagggcaagtttttgttgtgaaagcaccagtaaatgaccagagcagggaaatctcagttgacagaaaagtggacattgcctgaaatgggaagatattaaagttttggattgtatatgtttttatgattttatatgttttatatggttttattagttttggattttattttataatggataaagtcttcctaatctactttcattagcatgctttctcttttcctcagtcttgccgaattagtgtatcatggttatgagaaagtactgtgcagctccaaatcttgagatgcctttctgagaagactggcattattttctttgttctgatttaggagttgcccaggggatcataactggaataagaggactatgcaatggcctggggccagcactgtatggcttcatattctacatgttccatgtggaactgactgagttgggcccgaaattgaattctaacaacgttcccctgcaggtaatttggtcataagtctagttttgtaacaacaattatgtatgattatagcaaaatcttgtgaccttaaatttggagagcattctttcttgtatgttactatattttatttggcagcaataagtattgtgttcattgcttctcgggatcagggaggggtcattttagtgatttaatatcttatgtaaaagatatgtcttaactttgttcagattctgttttcacctacacaatcactacactattctctggataagcccaggctagttaaaatttgaaatgacctaaaaatccagctaaaaattgaggtagggtactttttgtactatttatttgaaatttcttcccttgttccctctaagccatatctatacaaagctggaattaatgttcatgtacaaaggtgcatgatctgaagtcataggatgggattataggtaaacagctgttgcttacaagcttacagttttgctt

SEQ ID NO: 47276 - DNA, 1035 bp, Homo sapiens
tccttgcaaataatgtgcaactcccaaggtgaaactcaaatagaaaaagtcatctctctggtagaaaggatggctttcctgtaatgactatagagtaagagtggcagcaatctttccatgcccttttcagcagaaggcacagaacagtagcgggactgccatctctggcaagatttcaggtaaagaatctcttcttaatttctaccttcctgtttctctgaatcagcccataggtgttgatgagtggccactcttaaagagtcactcagtatcagggatctactgtctttgttcaaaggtcaaataaaaacctagtctccttttattctactttctattcttagctagaatgaaactcagcatatatacacttctggacataataatattgaatagtaattacctttactagatgaaagaaattttcattacaaacttaaatcatgtaaaactcaacaactcagattcctggacctggtgtcctggttgggtccaaggtgattttacagaagaaaaaaacaactcaagcattctggtggcaacatagagattgtaggctgcttctaagaaagttattaacaatttggaaattcctaagtaggatgagagttagtaactggatacgagtgaagtttatatccaagttcagactcaaaggcattattatgatttgcttcttcccatgtcttccatgtcctgcttctcaaagtttttctcatccatcacactcctgccttaactgctctgagtatgcatttgttttcaattcatctttatttcaatctgtttaacttttgaatcgcatgggaatacgcacattaagttcctttctaaaataaggttttatgaagctgagtttcacgataagtgtcttgctattttttgagatgttttatggacaaagaaaactttacagatttatatgtattttgctgcaccagtaaatggaccattaactagggcccacctttaacagagcacccctttgaaagttttataggtatgaaatatatgtagatatttgtaaagggtttt

SEQ ID NO: 47277 - DNA, 1066 bp, Homo sapiens
tattgttccatattcgtttttaacatatacatatgtacaatgttaattgggaactaattacagtatactctagaggatgtaagcaacttctagaatatgccttttaatattctccccatgtttgataatccatgctttcagtcaactttttttttttttaccttatctttatgagcataacctacattattcatcaagtaagaatgggtactaattcccatctcttttacaaagcattaaaaacacaactgtcttatccacagatacaagctgatgtaggttttgttgttacatcattagtcttgtcactgaaaaacagtaagtaggtggcattaaaagccttggagttttaacttgattctcatacaaatttttcaggaatctagtctatttgatagggtataagaagtgtcttctatcaaggaatttcctatgataggcagtaaattccctattggtgtttaataatgatattttattaccttattcacatacttaaatatgaggatttctaagaaaaagatattacctcaagaaagagtgatgactaggatttcatacggacctgatttgttttggtgtttaggatctggcacatcaaaggagaaatgggttgttctctccagaccatgaaaatggacatttatactaaatacagaatataaactcaagagcatgacagaagactatgttttatcaaataacttaacactttaaaaagcagcagcattacattctggcagttgctctctagtggcagatagcacagatctgtctgtgtcctatctgcagcagtctctgtgctgtctgcaatcttggccaagtcaagatccttcagtggtcatgtttgagcaagtggatgcccaaggactttgacagttagtttataacaaatttttttttgttttggaacatggcataacatcttttctaataagagagtatttcaggttctggaaatatcatggttactgtatatgctgtgtttaatcattttctttctctttttttttttttttttttgagacagtgtctcactctgttgcccaggctggagtgcagtggc

SEQ ID NO: 47278 - DNA, 1035 bp, Homo sapiens
acagagtacccatgaaaacttttttttttttttttttttttgagaaagggtctcgctgtgttgctcaggctggagtacagtgacacaatcacgactcactgtagtcttggcctctcaggctcaagcaatcctcccacctcagtctccttagtaactggactataggcgtgtacaccaccatgtctggctaactgttatttgtggagagaggtcttcctatgttacccgggcttgtcttgaactcctgggctcaagtgatcctcccgccttggccttccaaagtgctggaattacgagcatgagctactgcacccagcctcatgaaaacttcttcaccaaaaggaattgtgggtctggaccattaagtggtatatcatagtctgtgggcttctggccaatgtgatcaactgaagtgtaaggaaatctcccttccacttcaggtatttagaaacaacaacacacatacagacacacaagtctctctctctctcacacacacacacacacacacacacaccccacatgcatgtaccagggagaaagaacacatacgtatcagtaaatgcatgctaataacaaaattctttcttatcagcaaaaagatatgccaggttacagtggaatcttgtattcaaagtgttaattaaaaataactatcaacaaaagttctacacttagttaagtggtcattcagtagagaggatgtaatacagacattttcaaacatacaactgttaaaagagtttgttacccatggactcctcctaaaataattactaaagataaacttaagtaaaaaggaaattgtggcagattgtattttccaaaaatggccataacaatatctaccatcttccatgcttttctacagtataccttgctactcccccatcaaaagatggagtctaatcccctctccttgaatctggattggccttatgagtttgcacctgaaagcaatagactatggtagcaataataaccatgttgactttgaggctcggtcagaaaaggccatgcagttttcaactggta

SEQ ID NO: 47279 - DNA, 1022 bp, Homo sapiens
agcacttaggtcttatttggaattttatctaattgtgctttccttttttgccaggagactgaaaggaaccataatttgtgacatcagttgttttctttgataagcagctatttatgattctggaagattaaggcagataggaaaccccatctgagattttaataaatccctcaaacaataaaccacatcatggacatacagctggaccctgccagagatgacctgcctctcatggccaacaccagccacatacttgtgaagcactatgtactggatttggatgtggattttgaaagtcaagtcattgaggggaccatagtgcttttcctcgaggatggaaacagattcaagaaacagaatagctctattgaggaagcctgccaatcagaatcaaacaaagcctgcaaatttgggatgcctgaaccctgccatattcccgtgacaaatgcaaggaccttctcatctgaaatggaatataatgattttgcaatctgtagtaaaggtgaaaaagatacttctgataaagatggtaaccatgacaaccaggaacatgcttctgggatttctagctcaaagtactgctgtgacacagggaatcatgggagtgaggattttttgctagtgttggactgctgtgatttatctgtgttaaaagtcgaggaggtggatgttgctgctgtgccaggtctggaaaaatttacaaggtctcctgagctcacggttgtttctgaggagttcaggaatcagattgtacgtgaacttgtgactttgcctgcaaatcgttggagggagcagttagactattacgctcgctgcagccaggctcctggctgtggggaactcctctttgacactgacacttggagcttgcagataaggaagacaggggctcagacagctactgactttcctcatgctatcaggatatggtacaaaactaaacctgaagggcgatcggttacatggacctcagaccagagtggcaggtaggttatccaagcacttcaaagccctgtgcctgt

SEQ ID NO: 47280 - DNA, 1046 bp, Homo sapiens
ggctgatgaggtgaaaccccgtctctactaaaatacaaaaaattagccgggcgtggtggcgggcgcccgttgtcccagctacttgggaggctgaggcaggggaatggcgtgaacccaggaggcggagcttgcagtgagctgagatcgcgccactgcactccagcctgggcgacagagcgagactccatctcaaaacaaaacaaaacaaactgaagcattctctttgataacccattctctttttcgttagaatcattataatagttgtggaagcagtcaagtggtttaggaggtctgagcttaagctgatgacatcactgaatttgaattgaatggaggaaaattcggttatgtataggaaatttattagaaaaactatagctatttggatttttgttaaagataagagagctaactgggaaaatacattataagataaagtaatattaacatttaaacttttgtaaaacattgtgatttttttgtttgtttgttttagacaagactgggatgaagttagcaaaatcctaaggagaactacttttttctgtaatatttcttgctcagctattgggccagggaagatgtagactttgggagtatttttagtttggagtatcaaaaccagatgttaaaacatgttcttcctcccccctccccccactgaattaatttcattattttatatctcactctaaaggaaagttttaaaattaaaagaatgagcagaagatgttttgggagagatttcaggtctaagaggaacatttccacaattagcacctttttttccccttactttcttcaagaaaccaatgcaaaatttatgagaactaaagtggaatacacattaattctatgatattgtatgactgcagagtcggaatcatgagtgaaaatgcttggaagggtcgtgttttagcttctttctctctttgctgcccaggctgtgcatatgtctatttcccagaatcccagttgagtcaccatggaagaaaatacaaggatggactgtatcagtctcaacaagtaaccaacataaccaa

SEQ ID NO: 47281 - DNA, 1049 bp, Homo sapiens
aggccctgggcaagggctttgctttacagcagtgaggaagcacaggtcctgccctcttgggactcacagtttggtgcaggaggcccccatgcttttctgtttatagacctctttttgagcaattacccaattcatatatctatatttatttatttataagttatatgcatttagtacaatgttaatatattaggtacactataaaacacatacacaaaatagaaaatgtaaaaggatgagaaaaaaacaattatgaaagtaaattctgtcacttttatcccaaagaattggcacgtgccctgggctcccttcagctgcctgggccctaccctggagactgactcagtgaattgagccgcagtcttggtatctggaaggctaacaggtcttcccagctgattgtgctgcaggtgttggagagcagtgtgtgttgcctggggactgtgtggactggtatcacccagacagcttgcactgactccagaccctgccgtcatgtcacaggtaagaaggtcaggaagaggctggagcgtgccggtgaatgggtgagaaagctccctggtgaggcttcctgcttttctgttgctcagaaggaggccgtgcttcctaggaactgcatccagtcacaggcggggactttgggcaagtcactgggcctccctggcctaattttcttctctggaaaagtaagggggtgatttagaataacccgcagaatgtcttagggcccctacatttgatttaatcagggtttttttgtttttttttttttgagacagagtctcgctctgtcacccaggctgtagtgcagtggcgcaatctcggatcattgcatactctacctcccaggttcaagcgattctcctgcctcagcctcccgagtagatgagattacaggtgcgcgccaccacacctggctcgtttttgtatttttaatagagatgaggtttcaccatgttggccaagctggtcttgaactcctcacctcaaatgatccacccacctcagccccccaaagtgctgggattacaggcgtcagccactgcgcc

SEQ ID NO: 47282 - DNA, 1032 bp, Homo sapiens
agcagcaagcatgccaatatccatccgaatatttatcctcaagtaaaagttgggaacagaagtgatttagcatggccaataaaccaaggaccttgaaggggccccttaagaactttaggcctagatttggcattccggagggcagtatctaagatgcctatcttgctgggtccaaagagttccctaagctttcatgtgaagtatgaggaagaagcatgagaagagaaaatctcaggagctgagtttaaagaaaatgggaaagagaaaacagttcccagccagggtcagtgttttggcacagctggtcccttgggagaatggaagcctcttcctgggcaaaagtcatcatgctccttggaagccatccagccactgcacagtacaagctataggatgttaccctaccaccctaccatggtgcctcagacctgccacctctgcttgtcgcccaagatgatggagagagagctctgctttgcagtcagtgctctatccccagctctgccgttgactgctgtgtcctgttactccctggtaaggtgccatagaccactcatctccagaactcttgtggataagattatgtgtagatgccgttacatcttaggtcctcagcagatactggttccttgcttcagtaggcttaggaaaatttggtagttttatgggtcaataaacacataagttttgtggcttattagtgtgaatcacagattctacagttcctatcaacccaatgtctaaaataattctctaaaataatagctccagggagaaaataaaaataggtatggtgacttagcatggtagtatgacaatatgaaaggtttgttacagagttgttggtccacattccttacattgtacacattggaatttctccgtttcagaaggagcatttagagcagcacctacatttttgttaggttttccttcaaggctgtagcttgaacttttaatatacatactcacttttcttccccccaaaaagaagggtaaagaaggcagtaaaggtaaagaaaccagacatta

SEQ ID NO: 47283 - DNA, 1041 bp, Homo sapiens
aaacacctccctgcacagcctaattccaacagcagagtatctgattacctcatgctgaataatgcactgttgtttatttgctttgctaccttccagatttttcttttctgggctagataatcccaacagctttgagttccgtttttataacttctattttcctattctttagtcatctcagttgctttctgctggagcattttctgattctcttcattgctcggaaattaagaagtctgaaaccagacacaacaagctggaaagatgtctccatagctgatgataggaactgtttatcgagctctgaactctgtgcctcgtgttgcgctgagtacatgtcatgtatcatcccatttaagacttgcatcctctatggaatagattccatttgggcattttgtagatgaggaaactgagaaaagagtaattctgtatctcgcccgtctcctaagtgatagtgccgaaattctacccagttccctgcctgtggagcctgcagtctgaaccattatccctggtgccacaatttcactcacctgtcccctaatctttttttttttttcttttgtgagatggagtttcgctcttgttgcccaggctggagtgcaatggcgcaatctcggctcatcgcaacttccgcctcttgggttcaagtgattctcctgccttagcctcctgagtagctgggattacaggcatgtgccaccacacccagctaattttgtatttttagtagggacggggtttctccgtgttggtcagtctggtcttcaactcctgacctcaggtgatctgcccacctcagcctcccaaagtgctgggattacaggcgtgagccaccgtgcctggcttatatgaaatgctaacagctgtactgggcagttgactcgctttctatttaaaggtcagtatacctctctaccttttactcctttattaacacatggttagtcatgccttccttcagactagtctgcatgtccttctggaaattcattttgttgaaccacttttccagattctttgaatctcactgaattc

SEQ ID NO: 47284 - DNA, 1101 bp, Homo sapiens
aattttttttttcctatcttgcatctcattcatcaaagtaacaagaaatatgggctgggcatggtggttcacgcctgtaatcccagcactttcagaggctgaggccagtggatcacttgagcccaggagtttgaaaccagcctaggcaacatggcaaaaccctgtctctatacaaaatactaaagttaaccaggcatgtttgtgtgtgcttgtagtcccagctactcgggaggctgaggtgggaggatcatctgagcttggggaggtcgaagcagcagtgagccctgattgtgccactgcactccagcctgggcaacagagggagaccctgtctcaaagaagaaaaaaaagacgaaattttcctcctagttttttctagctcagcaagacacctataggaaacatatggttctagagtcagcaaaagtagtgtctagaatttccgtgtcactttcctcccccaggtctttttgggatgagtttttctgggtatatgaataagtgatcctacaagtgaggcgtgtgtttaaaatggatcgatggcagggcgaaccatcacgcactctggcagagatctaaacgggggcagtagtcattcttcagtcgtgtttttcttttggttggttggtttttaaaggtcatctgtctaacccctcattttacagaggcggaaacaggccaagaaaggttgccttacatcgctactcagagaattacatggcaaaaatgggcccaaacccggggctcatgagtgcatgttctcagaacccctaggagggatttcaaaacccaagtcccacatgattctggatcattaactcaacaagcagcagacatgcctctttaaggcaaaagttctatgttccatcagtgagcttctcataccaccgtgtctcctatattcttcagtaaaagactttaatatctaaaactcctttaacctcaaatcctgttatccccaaatgaggcaataacttactcggtgagatgtgtgcaccatcctgctcagtttgtgaatgcttcattacatttatatggatggtatattttccaagagctagataaaatatttcctcttctcaagtagctgcctactcattt

SEQ ID NO: 47285 - DNA, 1046 bp, Homo sapiens
tacttcacttccagttaaagaatggtatgaaagtactgtttatatgtcttgttaaaataaaaacttagacaaattaaatttaacagagtttaattgagcaagaaaaaaaaaaaaaaaaaaaaaaaaagactcatgaaatcaggcagctcccagagtcaaaatggattcagagacttgggctgccacatggtcagataagatttatggaccagaaaaaggaaagtgatacacagaaaacagaagtaaggtagagaaacagctgaattggtttatacctcgacctttgccttatttgaagacagtttgaatagttggccacctgtgagtggttgaagtaaggctggagtggttggctgagccattgttatagaagcacactcctcagttacgttttcagtttgttatgtactaagattgtagttcatttctaagaactgaagtaggtgagtacgtatgctttctcaggctaaattttagtttgatttcagaattccacctgtttggtcggcctctcagttttgagagattaacctaaattctgagcatgggcaccactctcattacagttgtaaatgactcctttgttctgagtatggaattcacagatgacaatgtgaaactagctgaataattctttcttacttacctagttgaagtgagaccattcaacactcaatagatagctgcatacaaaacatttaagacgtgagaagacacaaggcaccagagttactattatgatgacttccaagaggatgatatcaaaagagcaaggagttcacaagcattcttatgaaacaaaccaaaccaaatgaaacaagtcacaattgaggcaatataggcagttcaacagtatttgagtctaattggtcatagtccttgttcagggtctgatggtgattaaggaccacagttgcttgtataatggcctgattgaaagaggtattcattttcattgttagcctggtaacacaagtcataataacccggagacatacctagaatatatttaaagatgacaaaaccttggaaaacccaagcttgcc

SEQ ID NO: 47286 - DNA, 1076 bp, Homo sapiens
ctatacaactgataccccactactgccaaaagtgagcccccaggagccccaccggagtttcttcttagttgaaaatagtttatctattttaaggttgggggtaatttcagttattgattattttggcctctgatcctaggagctgttatgggaatttgtaggggaagctatttgaatggccggagtgagccaggctaaatagcaacatccaaaccagacaggaagcagattttcctcagacccaatagaagcccatggggattggaaaagagggttacctagttgcatttgtgcaagggtcagttaaatttatttgtctgtaaatctgcatagctcctgaacaaagttcagtgggtaatgtacttttttgggttcgtttatagcatgcggtaagggtgtatagccacatttagtaaaaaaatgaccctactggatttttttttcttttctttttttttttttttgagacagttttgctgtgtcgcccaggctggagtgcagtggtgcgatctcggcttactgcaacctctgcctctgggctcaagcgattctctgccccaggctctggagtaactgggactacaggcgcccagcaccatacctggctaacttttgtatttttagtagagacagggtttcaccatgttggccaggctggtctggaactcctgacctcaagtgatctgcccaccttggcctcctaaagtgctagaattacaggcatgagccactgttcccaacctcctactggatttaatctggtaacattatacaagcaattacttgtatccatatagctaattcccaggtctcaagtgcgtgatgtctagaagcacaatataccttttgcaggcatcacttggataggttttctatgtttggtaacaaccaggttattcattggaaaagttaaagtgctgtttctagcgagtgcaggaaagcaaatgaagcagtcatttttagaatatcaaggataggtttccactccctcctcctttggagtttgaatcactgccattgggaacatggagaggcatcaatggaattgttttctgattttttggcatttgcccaca

SEQ ID NO: 47287 - DNA, 1048 bp, Homo sapiens
tcttccttttggcctccatagtttcagatgggacaaccactgtctttcaaattagtatttacttatagataatgtgtaatttccctgtgttttcaagattttttttctttgtcttttgttttcagaagtttaatcctaatttatcttggcatgggtttctttgggtttatcctatttgggacttactcagcttcttgaaactgtaggtttatgtcttttgccaaacttgagaagttttcaaatctactcccttcctcctctctttctgagacctttatgatatgaatttagatcttttattattttcccacagaaccctgaagcagtgttcatttttttctattttctcactgttgttcaaattgagtaaattttattgatctgctgtcagattcattgattctatctccactatgctatcaagttcactcaaaacacccagaagttggctacatagagctcgctggaagaagcaggcccagaaaggggcagattaagagacagacatgttagtgacagccataaattctctgagtggagcaagaaggaagagtgagggctgaggatagtttctgtgagatggcctcatttggagggtgaagagaaaagaaaccatggagcaggtgctgacttctgtgtagagtgaaggtgctattgtcctgttgtcatttggctaactagaatgttttatgctgttttctttttctttctattattttttaaagagggagggtcttgctctgtcactgagcctggagtgtattggtaccagaatggctcactggagtcttgaactcctaggctcaagcaatcctcctgcctcagcctgtcaagtaggtaggactagagatacaggccacgtcacctgactaattgtttcttgctaggttgcccaggcttgtcttgaacacctgacctcaagcaatcttcccacttcagcctcccaaagtgctgggattccaggggttagctacctcacttggatgttttatgctattttcttgatatagtgcctctctctgctttgtataatcaaatatatgacaga

SEQ ID NO: 47288 - DNA, 1051 bp, Homo sapiens
taaaagattattttctatttattaaaataaaaacttcaagtatagatcttacttgttactcattatcatcaagttccaagaaagttaaatattgttcttgtttgtttcatgttctgtatttatccaaagtatacaaagtatatcttattaaatcttcagatgaggaaaggttgacactaggattacacacttagcaaataaaaatacagaacagaaaaatcagtaaaattcaaatttcagtttaatagcgaataattttttaatgtagttatgcccccaattttactgggcatctcttcttatttgacaaccctagttaagaacaaatcaagattccagaatgaaatgggctggaaaagggggtcacaatattcacagtacaaattaaatataaacgaacattcatattcgaattttttaggtctttatgcttttgtggtatgttttaagagtaaataagagatatttactaaaacctttattgatgaaattatgtaatgtttgggacttggttctatataacacaggaagagggaaagtggatagggcgggatgggctgtgcattgatgggtatgtgaaagttttgtctacttttgattgtgcttgaaattttccatagtaaaggaaaataaaatgtgcgtgtgtgtatgtgtgtgtaagccatgcctttaggtttaaaaaacttatcatctaaacatctcaaatgtccagtgaccgaggacttgtacaagggcatgagaagaggctacagatggaggcaggggcttgtgagccatgcttggagttgtggacatctttgttccttgatggcatatttatcatcttgatatttatctttaccatttggtagagcaacgcaagagagttgcagttagttcctagactctaggagtacaggaatctctagggaaggttcaggaattggaggcgatgggggagtagagagggataatgctttacttgatggccagccttttgaaaatggctaaacacaaaacaaaatagactgttggattaggtcagaataataaacattccactttttaatgt

SEQ ID NO: 47289 - DNA, 1031 bp, Homo sapiens
cctagagaggtagtcccctccccttctcttgcctgctaatcacacagagggccatcatctttcatatgaactcaaagccctttttctgcataagccctctttccctccatgaactttttctgttttgaaatagcaattgcctttttaagcagcctttcattttgcccttggctagggaggacgaggggcaccagtgagcgaccaatagggggaaagaaaggaagagaaaatcagtcagtccccttttcctccagccctcccaaagccaacccctccttccctccctacctcactacttccccgtctgcaacaccacccacccacagggtcgcagaggggtgcacttggccttccagctccttaacagtgtgtgtaacactgtatcttttcataacttctagaattccaaaagggagggagagagcaggtatatagttacatacttttacatatgatgtagtgtataatacattaaaatttaaaagaggcagagcttaacaacttggaagtatcttggtggaaaggtgaatattatctttaaaaggaatgattttaatgagtctacaattaaatgtgcgttcattcattcaaaaaaaaaatgaggatcctctttcataccagggatcagatctcagatggtttcaatccaacgaggagacagtaactaagtctagtagtcgaacaaatagtcacaaactcgggtggaggctgtgaggcagagaacagggcgtgtgacagatgttatggcactggggaggccttgcttcagtctgggaggaggtcaagaaaggcctctctgtaagcagagatcctgggtatgagcaagagttacctggaagaggttgaggggatgggtgtgctttaagctgcattagccaaggaagacaaaaggacacagccggagatctggtgatcctaaatatactgaagacttagtgattttaaggagtactcaagtcagcggggcatgaaagcaaaataatttcagctgactttagattggacatatcaagcaatgataacacctcaaa

SEQ ID NO: 47290 - DNA, 1063 bp, Homo sapiens
agcaaagtcgcatttcagatcccctgctcccctatcaacttcaggctgctccaggctctgggtccaggctggaactcacagtagaactaagattatgtctaaactcatagcagtaaagtgacgttttgccataaaagaacatttttataacgctatttcagtctacttgtttccttggaaatagtttctgtcgtgatgggcagtatctaaattaatgaattattcagctatttgtgcaaaatgtgtaacttaagggcaaacagactcgatgttgttcgcatcacctctcacacattggcaaggcagccttttctgtcctatgtaatgtaggaaaattaaacatttcttgaaatctgagacttctgcccttgttctcctgaaattaaatccattttattttcagtagcatgaatttccttacatgtccaagaggctgttaaggaattaatcctttgctctattcctcataacacttttcacagttaatctagtgtgtaaactgtgtggacgagaatccaaaactgcagaatttggaggaaatgtgactcctatgccttgtagacattaaatcattctgtgaaataaaactgaaactttggataggagattgtacagtactctccacacatttttattaaatgaaaacaacttccattatttttccagcaatccttcatgtagttggactcacctcaccacctcccccctgctccttagttgtggtcggctctccttacaaatggacaggttgctttgtcaacttggtggcagaaaccacctgacaaattgtagacatgtggctaaaatttatgcttagtttggatttggtagaaaataaagaatattagaaaataaaatgtgaccaaaaaaatatttatgttgtcttgactgtgtgtctatgcacaagaaaggacaggaactgggagtaatggaatgttagtgtttccgactccagaataaatacccaagagtgaaaataatttataaattatgtttcctgcttcagaatttgctaagagtgtatgtgtgtgtccatacttgaatcacttgcctcacctgagga

SEQ ID NO: 47291 - DNA, 1049 bp, Homo sapiens
ttgcccagtgtttggccccttcctgtagttgggtgatgcttttggtggtatccaaggtacccaataacgttaaagaagctgaagccagatgcgtgatttcctagcatccctggcaggcctttgacccaggctcctccatctgatgcacctgggcaggggtgtggaaaggagtgggcacaagggcctttctcccggctggagtggggtccggaagggctgggcagcacgactggccttgccagagcatctgaagcaaggctgggactgctgctggccggctcacaccaggcctcatcagcccaatacctttttcatcagttcccctttactttcagcattcagtgcacgtttctgttgcttgcaaccaaaagtcctgggtgaacaaattccctgcccagaacagcaagtgcagtaagacaccatgacaggagcgggagggaaggcctttgctatgagctctccattaccagtttgggcttgaggggtgtgatttggacccatggtataaaccaattgtggaactggattttaggaggaggcttgaagacatgttatgtacttactgtatcttaatttttgttctttggttgtaaaatggcttagcgatgattaatgacttaggatttttcgacaaaatctacggatttcccaacatttggcagagggaagaactttagcacccgagcccccgggctgggggaggtggtcctgggctggaaacagaggaagaaaaaggcgaggggagaagcacggggaactgtttctcttcttccttggaaagcaaaaaaattttggattccttgttgaataaggagaacattcctcacatttgctcccactgtgcaaatcctccagtgcatccgccgtcctctgggcagcgtaaggccaggctcggttttgacttcccagcattttgggtggattcactctgccaggctcaccaaggtcccttcttctctggcttccctgtcaagaccccattcgtaacttctccacttcaacagaaaactcggcttcctcccatcccctggactagctcccatttctgt

SEQ ID NO: 47292 - DNA, 1132 bp, Homo sapiens
aaaatgtcctactctttaaataatctatgctccctcatccttcactgatgtgcatttttatctaaaaggaaccaacttgatattcttacagataaattcattatctatgcaagaaaataatttggcaggaccaccgttcaagagaggagaggcaggttatttcgtggcttcgaacttaggcatgtcagttaatctcctgatgcccagtctcactgtaaataataaaagttattaagaggtcaccggatataagcacggaaaatataaaagtttctatgtattcataatgaaaaaataaaacaagggaaaagcaaccgtatgtcttgaagaaatgtgattcatctaagtttgccagagcaattttcaaagtttgtacaacaacatgcctattgaataagagtgtttaagatcaaatagcactgttatgtgcccacaggcagacagataagagcttggaaatgcgttgatagaaagtaagatgaaacttgaaaatggtaaaattaaatttcttttttctaaatggtcaaactatcccagagccattctataggtttgatgctagtagagaatcattcaatactaattatagggatttccaaacagcaaagaaaatgatgatcagatgtagattagggctactatgaaaaccactgggggagcaaggaagacagctcttactcagtttgttagaagagagtgagagcttagatctgctcctcttctgtgcgctgttttctagcaaaatcgctcaatccaatgttttaaatgcctgctggctgtgtggaatctgcttgttcttccccatacagatggactctcctcttagatttctttctttccaaatatttcagacccttggctactctcagcctgcttccacaacccattttagcttttaaaacaggtaagaggccaggaggcaggggaacctgcagaaacagcaacggcagagattttgatttgaaaaccagtctccttttttttttttttgagacagggtctcattctgttgccaggctggagtgcagtggtgatcttggctcactgcaacctccaactcctgggttcaaaagattctcctgccttagcctcctgagtagctgggattacaggcacgtgccaccacacctgg

SEQ ID NO: 47293 - DNA, 1035 bp, Homo sapiens
aactactgattttaatttctgccacttataggtgagtttaagctattacggagcatgtcaatggtattatacaggaagcacccttttgtgtgtgtcgcatcttttgttcagcatgttttttgagattcattcatgttgaggagtgtatcagtgattgttctttcttaatgttgcattgtattccatttcatcaatattcacattttgttacccattcatttgaggatggatttttgggtttttccagttttggattattatagataaaacttcaaggcatatttgtatgtaagccttttttggacatatgttttcatttctcttggagtagaattactgtattatatggttaactgtaggtttagctttagaagaaactcccaaaccattttccacagtggttttactccagctagcaatgtgtgagagttcagttgcttcgtattctcagcaacgtttggtattgtcagtctttttgttttagctgttttagtagatgtgtagtagtatcttgtagtgtaatttgcatttttctgatccatgtgcacttggaaaacaatgttctatagttattggatgtagtgtttataaatatcaataagactagattggccaagatgttgcttaggtgttttctatctttgctgatttccttttcgattggcttacagtatctgagagaggagagttgaaatcttcagttgtaattgtagatatgtttatttctcctttcacctctgtcagcatttaatttagtattttgaagctcttttatgaggtgcacatgcatttatgattgttattttttcctgatgaattgatccttttatctttaaaaaatatacctatttatttctaataatatctcttatcttgatgttttatctgatatgagcatagccatattgtggtacatttcagtagtttgttcctttttattgccgatggtactattatatagctatcccatattttgtccattcaccagttgatggacatttgaattgtttccagtttttgactgtatgactaatg

SEQ ID NO: 47294 - DNA, 1062 bp, Homo sapiens
aaagtaatgtttacccgatccataacatttttatttaccatttgataaataaatttggttatctgagtagaagttttttttaactccatagctttttttgagggactagggggaggtagaggtcaaagttagcacaatagcttctcttgattgagtaagtgttatattgagtattttttttatttaaaagcttaaatgtttatcattaaataaattgttttagtgtttgtttcatctttcagaagaatttagactttgtatagaaaatttctttttcccctctgtggattgcttttccacattgttctggagctgtcattgccagatgtggaaataaaagtaacagtgtgactgttatacacaaggctttggactgtttgtttcctccctgaaagcactgtgtgtgggggcagattactggcattttgaggtcaaaatcaaatctggaagtcagagcttactgtaaatagagaaacaaaggggagaaaatgagaagaggtgtgtatctgactgattattctaagaaaataaatatcaagacttttagaacctagatgtaattgaacacatttcattacatccatctagggacaatttaaatacttcctaaaaggaatgctgctctataatttagtttcttagcatattgtaggtataaagaaagtgtattttggaaattaaattaatccatttaaatgcatcccataatccaaaatgcttcctttttattaaaaccagatgagatgaaataaaagtctttgggaactttacctccttattgacaatatgatgatgaataacatttgatgtaatagctaatactttatttctctaacttggaaaaaatgaaaggaattagaaaaaatgaatgaggttagtattgtatgaaaataattttaaagaaattctcaagtgatgtttatatgtataaagtgtacttttagttggaactggttcactgattttctgtggttcattttcaggtccttcagcagcttttaaatcattgcaggaaaaacagagataaagttcttctcttttctttttccaccaaggtgagtt

SEQ ID NO: 47295 - DNA, 1026 bp, Homo sapiens
ggagattctgcctgctccagctaaagctgtgtatatacagggaatgccaggaaattctgacatattgttggagcaaacacttcaaaaatgtcttgtgttttttctgttttagcaacttcactgtgtggtggttggaagtgaaaatgccaaacgatattttgaagcagttcaaggatctaaagagcatcaaggagagctttttgggatccataacctcttcaaatttaggtcccaagggtcttgtcttacgaaggacatcctggaggtgtgaacttcttctctgaccttttcaataatattttaaatacagtttttcttcctcaggaaatctgaaatacaattgctgttgccttttcagagaaacttttggttttctttatcaaaaatgccttggaatttttacttttagagaataagaaatgaattattgtacctctaaactaagattttcccatgcataattacaaataatgcacacacacaaatgtatatgctgggtagtatgaactccaaggcaattttaaataggcagagagaagtttatagttttgaaaacagctgctgaagtcaggaactaaaaaaagaggttttcctaaataaacaaaaatataaaatgtgttttaattaaaagttaccaaatactccctgagatgtactctcatgtctcatggagatttttgttttctgttcccaataaaaattccacaccagtattttaaactctccctgttgtgttcatcctcagcatacagatgtttcttattcctcaaacaaaatattttatatccttttttaaaaaaatctttaagttcttttatataccggaatactaaggatattaacctattttctaattgatattcatataggtatcataaaatcctggagtatcatctttttcaacctcctcatggtatagatgaggaaactgagtcttagagaacttcaggatatttctcttgacttccaggactttgtagtaaaatcttaatgtacttcatttattcagtaagtaccataaaggca

SEQ ID NO: 47296 - DNA, 1033 bp, Homo sapiens
caaaaactatatgaaagaagctgagatataagcaaggacattttgctatagaaatcttaatttttgtgtttgattatatacaaatgaggctttctttgtggctattagcattctcgtttaagagttaattatgatttatatcttggtgtcattataaataagtactgaattaccctttggttggtgtgctacagttagattttaggtttgaggaattattgcataaacttttttaaataatcaactcagttttttgtttgtttgtttttactgtgtaaaaggtgtcagtagttaatttggaactaatgctattttgaataatggtaacgtgtcatcaaaattaagaaacatctgagtaaattttctgccatgaaggttttgaaactgtgtgccatgtatagtacctggtattctgaaatgaaggagaatgttatgctagttactgtctcatcatattatttaacaatgttttgtgtttgcatgattggcaatttctgattgaagaggttcaggactaaaacagcacaattgttgaaggtcatacctgaggttcattgccagagctgttgcagggagcttttacaggccttggttctagctttctcttttatgatcacaattcaaaaatgaattataggtgcctagaagcaaagcaataaaaattgtagccattttttaaacctctttcagataaaagccatgagttaatttttttcatttcctaaaaagctctcatcttgacattctctgggcatatgtacaaaaaagacaaaatacaaacagtaaaactgagcaaagccaatcaaacgaaactccctggtcataaaccccatgctctcattccatcactgtaatcaagtacatgtttaaaggaacagataaggttagtttcattctttaaattagtgaacatctttttttttttttaattaacaatgaaaacaaattcatagagaggaccctactcaaccctgacttttcttttggccaaaacctccatttcaggtttaaagattgttacctatcagtagtt

SEQ ID NO: 47297 - DNA, 1047 bp, Homo sapiens
ttcatcaaaggtttttaaaaaatattttcttgtgtttggcttattattctttattattttctaagagctaagtgcctcaggagtaattttactattactttatgggcaagagttcagaatgcatactgtatataataccaatattttatttcaacttagtgctattatacttttaagaatgaaggtgagggtagaattcctctgaactatcaagggaattaatttattcgtacctcactggtttgacaaaggaattaaattaccttaacaataaaaccagagtacaaaatgaaatttaggaccagagaaaatgcaaattaaactgaaagtttaagacagggagaaagttagaatgcaaatgcatagaacataatatgttctacccagatattatattaaaatggctaattttattgactttcctggtagaaaaacaaaggaggtaagctatctatgtagtgatatctcagctagtgcatgtggaaatgtgtgtgggcagtttgggtggtcacaatgactgaatgcctagctggcattaatgtctggaagccagggattccaaatggctatcctggacaggggactgggttgagggggccaatggggaggcactcccatatgcaaagaattgttctgcccaaaatgccataacaccctgctgagaaaggctgagtgaaatgtttgtccttaaggaaaaagaaaaaaataacactggttctaggagaagcaaagcttttcctagcactcactttgaaggaaatttgtcacttggtgttttttggggaccgcagaacgatatagtgaagagtcagttgtcttataatatccctagaataaatctaataacagactttgaaaggctatcctttctagcatttttcagtgtaatccataggcccagtgccagactacaactcgtgaaagcattctttcatgacccaaatatgctttttatactcatcttctcatttgatccaggaatataccatctctcaaccaacactttaaacagcatttctacagtttgactgccttgtatgtgccatc

SEQ ID NO: 47298 - DNA, 1051 bp, Homo sapiens
tgtgggataaagtcaggttttcagtttttgtcagggtacaatgaaccccacctttatgttctgagaattttaaagatgatttattccatgaacaactttcatagtttctctggaaattatctggagatgacattgttcattgttcattgattaaatatattacgaacatagttaatcagtcaggggaatgatctctttctctcagtgagaagtgttttcaggtttgcctggcaatcatggtgttggatggattaacttatcctacacctccagccatatcaactcctatctgatgttccactccaatttgacccaattcaagttccgttttttccacaaagcctcagtcttcagggatcactcagtttcaggttcctttagtgcccattctctatgccagtcatcactgtagatgtggtatacctgtcactgttgttacttacctcatgtggattcgttttttcctcatgtatgttacaagctacttaagaatcaggaccatgggacactctcatatactcctgtaaacactaccacttagccgtgggcagcacagagtgggagtttagaaaatgtttgtgataattcccgcatggaagtactgcgtgaggccagtccctacaaccattttcacaagttaagtctcctcaactctttgcaccacaagttaatgttaaagtgagtatactggctggcagctaatgtaaagttatgagtcacctttgagcagcataaatgctggtgttcttcattgtcattatatgtcatctgttggccataatgctggtataggaaatccattcaagaagagagaacatgaagaatgatgtcagaaagatattcctggaacccatgcatcctcatatagcaataataaatctagagagtcattgtgtggcttccagagtcactttgtatcttccaaagctgtcaagtgtcttattgtgtcctttccgtagtatacgaggcctgtctcaattgggccctagtgtgcttttctagtctcattccaagacactcacctaatcaagattattgacatgaattatgt

SEQ ID NO: 47299 - DNA, 1026 bp, Homo sapiens
caaaatatctacattaacagaagtttggaagaagttgattccagccctcatggatgactttgagagattcaagactttagtgggggaactaactgtagatgtggtggaagcagcaagagaactagaattagaaatggagcctgaagatgggactgaactgctgcaatctcatgataaaactttaacaggtaaggaattgcttcttatggattagcaaagagcgatttcttaagatggactctatcctagtgaagatgctgtgaacattgttgaaatagcaacaaagaatttagaatgttacataaacttagttgataaagcagtggcataatgtatgcacacctaatagactacaatatagtgtaagcataacttttatatgtactgacaaaccaaaaaatttgtggtggtggtccaggaccaaatctgcagtatatcagaggtatgcttgtattatcttttaaattcctattccaaatcattttactgaatcttttattacttgaatcttcattactattgctgtttcatcgtgttgccacagtgtcatgacttcacagctttgatataattggtaatgaacaagtttgagttaagttcacgtaatctagaatcttttcatcctagccttgtatgttgttttataataagttataattgtcactacaatagcaactgcaatgcagcattatttatcttgtaccatttattgtgaaagatttactattttagtgaaaccaacttttctaacgagcaccaaaatgtttataaagtagatattgtttttcaaaagacaagaatattcgaaaagtataccaatggtgctgctgcttaaaacagcggtttttcaactctttctggccatatacaccttttctggccatatacacctttaagaacatgattaaagccatgggctctttttttttgaaaaacgtgttcatgctcaaatgtgcaaatacagcttcaggagattcatagatatccctttctgaagtccctgaaacccatctacagaacctttgg

SEQ ID NO: 47300 - DNA, 1048 bp, Homo sapiens
caaaggaggagtagcatgctgggcctccataattcccaggaaatacctaatataatagcataaatcaaaataacttacaaagctggtgattttgtgagctaaaatacttttctcagtagcataagggtagaggcctcactctactaggataaaatgcgttttcattgtggaattcagcagacgtatgctaaaggaacaagattaccttctgtggactctacatttcctcttactggtgatgagttctttcaaaataaaatgtaatgaaaataaccactagttttgttcatttaatctttagaaaacaatttgaagaaatggcctcttattttaactcgtcttctgtaaacgaatttgctaaacatataaccaatgccacatcagaagaacgacagaaaatgctaagagacttttatgcttctcaatatccagaggtaaaagaattttttgtggattctgtgtcacaattcaacaattcttcctttgagaaaggagagcagcgcacccggaagaaatctgataaaagagaatctcttataaaaccaaggctgtcagattctgaaaccttgtcatttaaagattctaccaacaaaatttctcaagtttgcagcctaaaaacatataaaagaaaatcagttaagtttcagaatcatatttcctatagagaagaggtgttttttaatgatgcagaaactaagaaatcacctgttagttctactcaagagattgacagtgggaaaaacagccaggcatccgaagatactgtgacatcccgttctctgaacagtgagtctgaaacacgtgagagaaggttagaaaataccatgaaagaccaacaggacctcacaagaacgggcatttcaagaaaagaaccccttctcaaattggaaaacaaaaagatagaaaatccagtgctggaaaatacttctgtgataagcttacttggtgatacctctattcttgatgacctttttaaaagtcatgggaacagtcccacacaactgccaaagaaagttctttcagggcccatggaaaaagcaaaacagag

SEQ ID NO: 47301 - DNA, 1064 bp, Homo sapiens
ccatctttggctcatttatacaagaagaaggaagtgctggtgtgtgctacaatggatgaccccaaccaaattgtgctaagtgaaagaagccagacatggaagaccgcatacaatatgattccacaccaaacgtacagatgaggcaggcaaatctatagcgcagacaggaaatgagtggctgccagagctgggagcagagtggggatgctaggggtgatagctagagggtacagcatttctttttagggtgatgagtgttctaaagttgattgtggtgatgagtgcacaactctgtgaatatattaaaaaccattgaattgtgcactttaaatatgtgaattgtatggtattcaatcaaagctgttccaaagagaaaaatagatgaaaactgaaaaacaaaggctcaacccacaggctgctttctctagtgctgaggtttcaatattaaatgagcagactggcccttcgtaagtgagaacacaaaagctgcttaaacaggtacccctttgagtggagacacactcctgctccccagccggagtccccaggtctggatttttggatgacgtgagccttgtacccaggctgacaagtaatattagaccacgtgtattcttttttttttatagctcaaatgtacagacattacagaaaatttgcagaaatagtattaatacaaagaacaccaatataaccttcacccaggttcacccattgttaacattttgccgcatttgctatatcactctctctgttatctatctatttatatctatcatctatgtatctgtcatctttctttttttctggtttttttttttttttttttttttttttagatggtgtctcactctgtcacccaggctggagtgcagtggcacgatctcggctcactgcaacctctgcctcccgggttcaagcgattctcctgcctcagcctcacgagtagctgggattacaggcatgtgccaccatgcctggctgatattttgtatttttagtagagacagggtttcaccatgttagtcaggatggtctcaatctcctgacctcgtgatccacct

SEQ ID NO: 47302 - DNA, 1072 bp, Homo sapiens
atgtgtgtaatcccagcactttggcaggtcgaggcaggtgggtcacctgaggtcaggagttcaagaccagcctggccaacatggtgaaaccctgtctgtagtaaaaatacagaaaattacctgagcgtggtggcacaggcctgtaatcccagctacctgggaggctgagacttgagaattgcttgaacctgggtaacagaggttgcagtgagctgagattgtgccactgcactccagcctggcagtctgggtgacggagtgagactgtctcaaaaaaaaaaaaaaaaaaaaaagtggccaggcacagtgactcacacctgtaatcccactactttgggaggctgaggcgggtggatcacctgaggtctggagttcgagaccagcctggccaacatggtgaacccccatctctattaaaactacaaaaaaatgacctgggtgtggtggcaggcacctgtaatcccagctactcaggaggccgaggcagtagaatcacttgaaccagggagttggaggtagcagtgagccgagatggtgccatggcagtccagcctgggtgatagagtgagacttggtctaaaaaaaaaggcaggtgtagtggctcatgcctgtaatcccagcattttgggaggccgagaccggtggatcacttgaggtcaggagttcgagaccagcctggccaacatggtgaaaccccatctctactaaaaatacaaaacttagcccggtatggtggcacatgtctgtaatcccagctacttggaaggccgaggcaggagaaatgctttaacctgggaggcggaggttgcagtgagccaagatcacaccattgtactccagcctgggtgacagagcgagactctgtctcaaaaaataaataaataaataaatgaaacattatgctccacttatgataacatctttcccatatcctaaacatatcacaagcctcagattatgacctcactacaggatatgaattgaatttaaatatttctaggttatgggaaattaaaattatagtaggttgaatttagatctgttgtgcagctttcacacttgaaaaaaatac

SEQ ID NO: 47303 - DNA, 1869 bp, Homo sapiens
tcaagccaccattctttccagtatactataaccatgattttcttttagaatttttttctggagagaccttagacctttaatttaccagtttttattatatccactccttcctagaccaggtgataggtttgatcgagacagaccgttgagaggacgtggaggcccgagagggggtatgcgcggcagaggcagaggtggccctgggaacagagtttttgacgcttttgaccagagaggaaagcgagaatttgaaagatatggtgggaatgacaaaatgtaagtttctttgtaaatgctattttcactttaagatggtgtcagcacgtggtatgaatctattatgtgttaatatttagttaactttatagtactgtgctgttattcttgtgagaagctgatcctgggacttttatgaaccactctttctgatttggagattgactggagactagcttctggtttaagggactattctttctttccgtagagcagtcagaactgaagacaacatgggtggatgtggagttcgaacctggggatcgggtaaagataccaggtacggtgtaagtgtgtgccctctgagaacctgcaattaagtggaaatctctggatctttgcttttcttgaaaatgatgtcttctgtattgtgctttatacttgtgtgcccctaagtagagattgattttaggcttttgtttcgtgagataagtttttaaaacaggtttgctatgttgcagttagatttaaactgcttttaaaattctattactttagccaaacaaatttgtgacagatgaccatgtatttgctgatgcctcaaacatatggcactgtacatttgcacatgcctcaaaatgctttttgttggctgcacacggtgactcacgcctgtaatcccagtactttggaagccaaggtggacggatcacttgaggtcgggagtttgagaccagcctgtccaacatggtgaaaccccgtttctactaaaaatacaaaacctagcagagcatggtggcaggcacctgtagtcccagctacccaggaggctgaggcagaagaattgcttgaacctgggaggcagaggttgcagtgagccgagatggcaccactgctctccagcccgagtgacagagcgagacacagcatctcaaaaaaacaaaaaaaagctttttgttttgttcattattttttaaaatggtgacaagatctcactatgttgcccacactggtcttgaactcctgggctcaggcagtcctcttgcctcagcctcccaaagtgctaggattacaggcatgagctaccacatctggcctaaaatgctttttaaattcctggatattctatatgtttttacctttcaaagttcatgtggatccttgacacatcttcatttcataaaatcatttgtagattgaagcttagtgacaggtttcacctgaggctcaagttggacatttctctgaggcttcatggtgccttagatctgtgccaattcttctgctagttagagtggatacatggttctgctctgttttatttcacagctggagggatgatgccttcctggtgtctgcagaagaagaggtagggcatgctgcaggcagtgcagtgtgagcagtgctacagggcaggcttcccgctagtgcagaggcttgaggggatccaggcttccacttttcttcttttgaagaatataagcttttttttttttttttttgagacggagtcttgctctgtcacccaggctggagtgcaatggcgcgatctcggctcactgcaacctccgctgcccaggttcaagtgattctcctgcctcagcctcccaggtaggtgggactacaggtgcacgccaccatgcctggctaatt

SEQ ID NO: 47304 - DNA, 1032 bp, Homo sapiens
cctggcctccaagttcttaaatacccatgcgccttcaactctctggccctttggacctgctgctgtaacttgctagcaaaacccctcctgggtgactccactatctgccttctctctgcctgttcccacaagctgagcactacaagtcacatcgtgggcctggttggaaccccagtaaattcccggtcactgatattctgaaaccaggccttggcgatccccggttcttgggttcactctttctctcaccttctctaatgactgttttaatttctcctcaaaaccctgacactgcctcccactgtacccttccgccatcgtcctctttcattttctggatgcaacatttccttctatatcacagagtaattatgatccattaggtggcaacttcatcatcctcccactgccaaagatacaagactgctacacctgcacgcctcctgggctccttccctcgtgctaaccatcgggctgccatcccccccgacctcttcacgcttcagatctttcctactgacttcatgaaaacttcatactgttagttagctccttccttttttggtatattcatctccttcctcccaaccctagtcttccagtcagcatttaaacatgctcagtctctcctgcgtaagtgtcctctggaccccacattctccgtcagctgcctctttcagagttgcatgtggccttcttcacttcctcccctccacttattcctccctttagtccaggcctggcttctgtcctcactgtccttctgaaacagtcaccatgtctccagatctaatggatgctgcagtctgcgtctttcttgacctctcagaagcatttgactttattgatttcttcgtaaacgtgctctcctgttggtttctgtgatcactctgctcttcttttccttctgcctctcagcatctcctttgcaggctcatccttgtctttcgggtcttttaaaatgttaagttcttcagggccctgccttaggccttctctttctgtagagtttctttataggatcttatgcac

SEQ ID NO: 47305 - DNA, 1631 bp, Homo sapiens
tttttagagcatttgctgtatgccaagaactgctgtaaatgctaccatgtcttaattcattcagttctttgccactccatgaaggaggagctactgctattctcacactgggacagaggttcaatacctgcctaaggtcacctggctcatgtgcagagccggaatttgaaccaggcagatgcataggcattcatactcctctagtgagtggtaggaatagcaaaaagtgctgttcagaacacctgctggtaactcaggagagggcaaaagatgttggccctggaaggtaagagctgccaggatctctgagcgtttccctactcaggaatatggagcatcaactcccatccttcctgaaaaatactttattaaaagaaactgtgagcaaacagtaatacaaactatctgcaataaattatttttattgtaatcggtttcctagtgtatttgcttaaacaatgaagattttcttatgttttaggttaaattcatttgtcccagttaaatatccgattagtaaagctttatttctggaacctactttctttgattcactgcactctttcatatattcaggtgaaaaggtattgcatgaatggaaatgtggacatttgaattgatgttttgtatctttcttctgcgcatatcatgactgttttccatctaggtatttttctgtgcccccttattccctgaatctcagtggagcacagaggttgagtgtgggctttggaaacgcaatgacaggattggaacttgcctcttctatttatttgctcactatgtgacctctctctgcctcgatattcttatctgtaaaatgggatattaattatatctaactattgatatcatgaaataatataaagcattttgaacagcatctggcacatggtaagcatacagtgttagctagtctcatccatttctaaataaagggaactgtggttaaagcagtatgatttctataatttcacgtttagaaacaaatatataactatcaaatttgtatatagcattattcacattaccatagatttgaccaccttatatccataagtcattttgatggaaaattccctcccaaaagttttttataacaaaccaagaattgtgaaggtctttgaattactcaaaaatgggggtgttaaagcaatagcagttatgaggctctcagttgttagaaatatacttgcatgagtccttcctagaatcgaaggatacatctcttcctgttgaatatttagtcattgctaaaactgccggtaaaactgtactcagaaccaatcaaatgggaaatggggtatgcgtcacaggattgtcatagtgtgtgtttgctaataacttttagtgggtagggaataaggttaaggagcctgtccttggtgatactatgctgctttcaacgtggcttgttgaaactgcagctgataagcagggcattcgtgcctctgatatggggcatttgtgcctctattcttgaatgaggtgcattccagtcaacagcttcaagctgatactgctgaaggaggctgtaacttgtaactaatctgaattacactatatgctttactttatgtgtctatacacagtttcaagcttgcatttcatatataccttgtccttttttg

SEQ ID NO: 47306 - DNA, 1029 bp, Homo sapiens
ttgatgctgtaattgtgtttcagatggtaaaagatgactatgaggacgattcccatgttttccggaaacccgccaatgacatcacatcccagctggagattaattttggtaacctccctcgtcctgggcgtggagccagaggaggcacccggggaggccggggaaggatcaggagggcagagaactatggacccagagcagaagtggtggtaggtgtctgtattgacggtttggcgaaagaagttaataaggacagtgccctgggcccaggatggtctaatttcagagggtcatgagtttctgcagtcacttctttctgtagctagtgtgggactgatgttggggcatttggacggtgttgtagcatcatggacatcttgcctagagaccgttctgtagccctggcttccagggtctgctgtgaaggcactcccgggatcagagagaaactcactgtcacccgcattagacaagatccccaggcttgggattgaactggagcacctgacgttttgcttactgtggcctgattgtgtgccttgggctcaggtgatgctgtcagagtggacagaatcctccctaagatctcaagccctttgtgaggggaccttcctcaacccctccccggctcacctgcctcacaccgtcctcagccaaggctgcctgattctagctctcaacacagcacgctccttacccctggcctctgcctgctggcctccattcatccttccagcctcacttcctcacaggtttctttgatcacatctcctagaccgatcaaggtctcggagcaaaggagtttcttttcattgaagcctgatctccgtgtgcggctgtattctcactggtgtggctatcggtcagcggctgcttttgctcattaccggtttacgcagtgccacgcagtgcctggcatgtagtaggtgcttcctaatgtggtatggacacttattcattggaaatcagccccgaggccccatggcacagaccccttctctgtggctggtcttggcaatgctcctcctg

SEQ ID NO: 47307 - DNA, 1032 bp, Homo sapiens
ctggatagggaaaaactgaattttttttttagatggagttttgctcttattgcctaagctgtagtgcagtggcacgatctcagctcactacagcctctgcctcctgggttcaagtgattctcctgcttcaacctcccaggtagctgggactacaggtgcatgccaccatggctggctaattttgtatttttagcagagacggggtttcaccatgttggccaggctggtctcaaactcctgaccgcaggtgatccgcccacctcagcctctcagagtgctgggattacaggcgggagccaccgcacccggccaaattacgtaaatgatgctaatgagaaaaggagatgaattttgtcacacagctttattcactgaccgaagagctttaagaaggaagctaaatgttaagccaaaaggaaggtacaagagtaatatttatttgaattctgtgttggattagcttttcctaatttaaaaccatctggtgtttctatcaactcgaaaacttagaaatctaaaactgatccgtattccgtgtatgtttgctagaatctgtaaataactgacaaaaaaccatctttttctttttttcttttttgtttttgtttttttttgaaacggagtctcgctctgttgcccaggctggagtacagtggcacaatcttggctcactgcaacctctgcctcccaggttcaagcgattctcctgcctcagcctcctgagtagctgggactacaggcatgtgccaccatgcccagctaatttttgtatttttagtagaggtggggtttcacaatgttggccaggatggtctcgatctcttgacctcgtgaaccacctgcctcggcctcccaaagtgctggaattacaggtgtgagccaccagcacctggcctggctttgttttttctaatggagaaatgagagtttgatttgctttcttggtcagaagtctgttcattttaagttattaagaatgctgagatgggaaatcttaacaataaggtttttatggagaagtgaagtgtacat

SEQ ID NO: 47308 - DNA, 1032 bp, Homo sapiens; identical to SEQ ID NO: 47307

SEQ ID NO: 47309 - DNA, 1102 bp, Homo sapiens
gtagcacacagggtattatataaaagtcaataaatgttactagtactatttctattattttattttggttatttagatttttattcaggctgtaaaagcagtaaatgcatattataacatatcacagaaaatctggaaaagataaaggagcttaggaagtaatcactcagactcacgactgatgacattttagcctgtttccctcgggataactcattatttcctgatacataggtcgatcactacacatgacacgtactggaatctttttacttatgggaatgtctcttctgattaactactttaagaagaaaagaggctgtgtcctcatgtaccagcactgtttctagctcagagtgggtactcagcaaatatttgaaatgagctgttagaagcttgagagaagacttttcaggtcttcgccattcgttgccattttttgcatttaaaaaatgattataaaaagattttagtttaaaaacaaagaaggtagatgtactagtttgagctcaggaagactgagctattatcagacaaaggaatttgatgtaacaatgaaacgtgcaaagagctcagtaagagtatgttgggaaggttgcattctgaagatcggggaacaattatttaatgagtacagtcttgaagtatatgtttctcaaaagtttgccaataaattgccccagctctttagtctctgggaaagatctcttcatgttagtcagtagtggtaagtggaatcttcccacttaagatggtggtgtctggatatcatgattgtgtaagagtaatgacatctctttaattttgaagtttctttcattggaaaaaattaaactctgtgctatgcagaggagactttagaggtggatggatggtaatacgtataatgttgagaactaatgatccagcacagtagggattcttattgataacccgtgaatactcttttgggatattaacacctcgagaactttcccggtacatatgagagcaacattcaagcaaactaccaaagttttaagttaacttttaaagtatttttgacttaaatgaaaatggaatggtttcttaatggttgcaataaaaacctctgaaattggac

SEQ ID NO: 47310 - DNA, 1102 bp, Homo sapiens; identical to SEQ ID NO: 47309

SEQ ID NO: 47311 - DNA, 1033 bp, Homo sapiens
tgcaattgtgaatagtactgtgattaacatatgtgtgcatgtgtctttatggtagaatgatttctattctttcgggtatatactcagtaatagtattactgagtctcagggtaattctcaggttctttgagaaatcaccaaactactttttacaatggctgaactgatttacatacctaccagtagtgtataagcattccctttcctctgcaacattgccagcatctattttttggctttttaataatagtcattctgactggtatgaaacggtatctcattgtagttttgatttgcatttctctagtgattagtgatgttgaacattttttcatgtttgttagctgtgtgtatgtcttttgagaagtatctgttcgtgtcctttgccctttttctttttaaatgaggttgtttgttttttgcttgtacatttgtttaagttccttatagattctggatattagacgtttgtcagatgcataattttcaaacatttttttcccattctgtaggctgtctatttagtctgttgatagtttcttttgctatgcagaagctctttagtttaattaggttccactagtctgtttttgattttgttgcaattgcttttggcatcttcatcatgaaatctttccaaggtcctgtgtcagaatggtatttcctaggattttatagtgtttttttttttttttcttttgagacagagtcctcctctgctgcccaggctggagtgcaatggcataatcagggctcactgcaacatccacctcctgggttcaagcgattctcttgcctcagcctccccagtagctgggattacagatgcacactaccacgcctggctaatttttatatttttagtagagacggggtttcaccatgttggccaggctggtctcgaactcctgacctcatgatccccctgccttggcctcccaaagtgcagggattacaggcatgagccaccacacctgccctcttccagagattttatagttttaggttttacacttaagtcttttatccatca

SEQ ID NO: 47312 - DNA, 1033 bp, Homo sapiens; identical to SEQ ID NO: 47311

SEQ ID NO: 47313 - DNA, 1035 bp, Homo sapiens
catggtgaaaccccacctctactaaaaatacaagaattagccagatgtggtggcaggtccctgtaatcccagctactcaggaggctgaggcaggagaatcacttgaacccaggagacggaggttgcagtgagaggagatcatgccattgcacttcagcctgggtgacagagtgagactctgtctcaaaaacaaaaaaaaatttaaacatgtacattcttgttaaagggggaaaaagaagttaaccactgcaaacatatagagatttttttccctcattcctgcccacttttccttttttatgggcatatacatttatatatatgaatatatacacatacatagtgtttttaaaataaaggttggattataccgtgcaaattgttccataactacagatatacttccttttttaaatgccttgtagcattcattaatgtagatacttcataatggtttagcaatccctcaattgattagctgttttctattggttccaatttctcaatatgacaagcagttctctgtgaactttcttgcatctttgtgactttgtacagctgattctgtaaggactgttcacagaaatagaacgacactgccaattgattgcagtacttagattcagaaggcaattctgattactttaggcaagtacgtaaccctatgagccttggtctacttctctgagaaatagaagtctggaccttggggcatttgcgagtttgatggaataatgtaggtaccgtcaagttcgaggacagcattaagaccaaagacagagttaggaccctggacagggaaagggagctcatgttacaagcagaaaagtctcttgtgtgtgttttccaaactttctacaaaaagtatgtatttctcgtatgatcagaaaaatagcatagccaaggactgctgctataaaagagcagccacacagcagctctacacagagttgtgtgccagattgcagcccatctccttggggtcaggggtgtggttcctagctggggtctcctgtcttacctacctacctccca

SEQ ID NO: 47314 - DNA, 1035 bp, Homo sapiens; identical to SEQ ID NO: 47313

SEQ ID NO: 47315 - DNA, 1055 bp, Homo sapiens
ctgataagcaacttcagcaaagtcttaggatacaaaaccaacatgcaaaaatcacaagcatttctttacaccaacaataggcaagcagagagccaaatcatgaatgaactcccattggcgatcgctacaaagagaataaaatacctaggaacacagctaacaaaggacatgaaggacctcttcaaagacaactacaaaccactgctcaaggaaataagagaggacacaaacaaatggaaaaatattccatcctcatggataggaagaatcaatatcatgaaaatggccatactgcccaaagtgatttctagattaaatgctattctcatcaaactaccattgacattcttcacagaattagaaaaaactatgttaaatttcatatggaatcaaagaagaccccttatagccaagacaatcctagcaaaaaaagcaaagctggaggcatcacactatctgacttcagactgactatactacaaggctagagaaaccaaaacaagttggtactggtaccaaagcagacaaatagaccaatggagcagaacagagacctcagaaataacaccacacatctacaaccatctgatttcaacaaacctgacaaaagcaatggggaaaggatctcctattcagtaaatgatgctgggaaaactggctagccatattcagaaaactgaaactggaccccttccttacaccttatacaaaaaataactcaggatgaattaaagacttaaatgtaaaaccccaaaccataaaaaccctagaagaaaacctacgcaacaccattcaggacataggcctgggcaaaaacttcatgacaaaaacaccaaaagcaattgcaacaaaagccaaaattcacaaatggtgttaaactaaagtgcttctgcacagcaaaagaagctatcatcagagtgaacaggcaccctacagaatgggagaaaatttttgcaaactacccatctgacaaaggtctaataattatctaaaatttacaaggaacttaaacatatgtacaagaaaaaaacaaccccatcaaaaagtgggcaaag

SEQ ID NO: 47316 - DNA, 1033 bp, Homo sapiens
tggtacagggcttgctgttctggtgggcttctggctggcaaacctgttccagagaatgactgaccatgccacctgaactagaggccaatttccaccatttagcagcagagaccacctccatagacactttctttcagctgttaggaacaatcttcctttccttcatgtagtaatactttttaatcatgtatttgagactataggactttaaagtgatctttcattattaaccttgaagtctgggtttttctcattttaatgatgttgatgtagcttctgtaggggtaagtagattcctgtggatttccttctggtgccttgagctccagatctgaagccatactccacctccctcatactcctctaccttttccaggttctttattttaggtggtgggttgaatcttgtgttttgttctttttttaatgaccttgtcataattaaaattgcaaactttttttgtacaaaactgatttgatctgtccccagcgtgccttcctagtctgacttctcttccattcttccacacattccactctctaactatactggaaggtttgctctgctccaaaacactatgccctctccagtcctctgtgcttttcttctcaagcatttcttcatccccagctggtcctgcttgcctctctctttccatcgtccaagcatgtaccatatccaaacatgtggccatcttctgtccaccctccttcagtgaagggatcccctggctttgtcctggtcatcctccatggtgtttgtttcttctaattaatgatggttgacagtttatatgtctctttccttcactaactccaggggcttataaaagtctcttgaatgagcaaattctatcaaataagacagtggcaaagcagagaatagtaagctttggaaaaaggagcaggaaatgcttttaaaacttttttgaaaatatagttttaaattttgataaacataatttgcattaatttttctttttatcataaaatatttcttgcccttaaagcaggtactgagtttatgtgtttt

SEQ ID NO: 47317 - DNA, 1050 bp, Homo sapiens
ctctgcctcctgagttcaaacaaatttcatgtctcagcctcctgagtagctgggattacaggcatgcaccaccacgcccggctaatttttgtatttttagtggagacagggtttcaccatgttggccaggctggtctcaaactcctgacctcaggtgacccacccaccttggcctcccaaagtgctgggattacaggtgtgagtcaccacgcctggcccatttttaaattgggttatttgtcatatattattgagttgtaagagatttttatgtattctagatatgaaactcttatgagatacatgatttacaaatatttcctcccaatctgtggtttgtcttctcactagtgtccttcgcagcacaaatgtttttaattttaatgaagtccaagtaatctacttttttattttgttgcttattgctttgatatcttatctaagaaaccattgcctaatccagaatcagaaggatttatgcctatgttttcttccaaatgttttatagtgtagttcttatatctaggtctttgattcactttgagtttttatatataatgggagatcacatgctgtttttgaaaacgagttaaagtggtaaacaatcaggagtttaaaaatatgcatctatctttggttttactgacaatcatgtgatattttgttaaacataccatttaatagaaagaaaacaaactttaacctctaatgaggctgatattctcaatatttactttaaaaatgtgataagcttagagttattagaaaaggcctttgacatttttgtttttacaaatcaactgctttcaataaagacttgaataaatgaagccatatttttatgttatgtaaataatatttttgaaatacattaaaaaatctgtattatataacatgttataattatatggctttttgtttaatgcagtggctctcaatcaggggcaattttgcccctcaaaggaaatttggtggctgggcatggaggctaatgcctataattccagcactttgggaggccgaggctggtggatcacctgaggtcaggag

SEQ ID NO: 47318 - DNA, 1039 bp, Homo sapiens
atcaattatgctttttttcaataagtgaatcctggaaatgaaagacctttgtgtgaaatttggcactttgggtggtggaaccttgataggtcctgtgacttaggtttgatctatacttaagaatcaaggtccctgaacctctgtgccacacatgtctacaactttacacaggcagatatctccaggaataaatacatctcagctctcatgctgcatgcgtattatactttttgtggcattatcctttcaaaattatagtcagtggacattcagtcaggttatcatggtaattaatgggttgggaagttgacgtacagagtgtcttaccctgtaacctttataataccccccctcagatcctatgtggatagtaatagattcgttttattcagcttcagttcatgtggtatctgaagatcatttcagtcattcaatagatttaacattccaagcttagaatagccaggtgctgtgttttatgagaatcaccatacatcattttcaagccaagtgttccataggcaagtaagtgattatgaactttgtaacaataattcctttggctgttcagatctgaagattgaagttatatgtaacttgctactgtgtaaccatatatccaactgcagattttcattattaataccgattccctgcacagttacaggctcttgctttcttgtccatatgccgaccaaataattgaatcaatggaagtcgaaaattggattgtattagactagccaaagtgtttagcagcagcatcaggttccatacttaacactattattttaattttttaagctttatgttataccacaaaaggacttaggtgagtgtgttaaggctttaaacaaagtggtaagagatacaaacagcaagggtcttaatagacaggtgtttgaggttaatttttagcacaccttcattcaacttgaattgttgagcaatcaaaaagacagatgcttggtaatgattttagaatggtagatttaaaaaacatagagattattcgaatgatatggtttttaaataaagc

SEQ ID NO: 47319 - DNA, 1009 bp, Homo sapiens
aaaaattaccagtatgtgacacagagacaagaagcaagcagatgccattggaaaaatggtgccagtagacttgcttgttgcagggttgccacaaaccttcagttaaaaaaaaaaaaaagaagcaatttctgctaagcacaatgaaacaatgtatgcctgtgcgtatggaggggcatggggaaatttgggaggtgatgaaaatattatcttgatttcacgagtgtatgcaggtcagattcattatacatcactgatatttcaaagctgtaagaaaaaacaaaaacaagattgattgtgtgaaaagatgttcagcattattaatcattataaagacttgaaatgttttatttctattcttgtctattacaacttatttgggataaaagtggagaatagttttccttatcctaaattcacagcttgcacaggcaactgaaatgctatacatgcgtttggacacaatgaacactacctgtgtagacaggtacagtaatcgctttactgctgagctgagttagcagcttttacttcctgtacttcataaaggaatttgagaaagacatttttaagaatttccatgtttagtttttttcttgcctcccaaaataacctttgtataataaccagactcatacttaatgtaacattacgttttttgatgtccatgctatgattttctttaatttcattctctagtcaagtatcaaagactatactttggctctgccatttataaaatgttttatctgcaatttcttttttttatttgagacagggtcttgctctgtcacccaggctggagtgcagtgggatgagcatagctcattgtaaccttgaacttatgggctcaagcaatcctcctgccttagtctccatcccgagtagctgggattacaggcatgagccactgcacctggcctacaatttcataaaatttttttttttcttgcttcagtttcatcatcttttatatggagaaaataatatgtaccttggaagttgtgagaat

SEQ ID NO: 47320 - DNA, 1029 bp, Homo sapiens
tttaggagccaagatctgggcacttgatatgctcattgccattggggtgtcattggttctaagcctcttggtggacacacatccatccatccataactgtttttatgtccacctgtgtgtatatatgcctccaattccaactcaataccttatttctacacttcttctctaccatgatttgtaaacaccttctcaggcagtaacaaacttggcttccattatcctcaatatttatttatttgatagaatatagccagtttccaaagcgtgcagtcatctccaccatgccccatcatcaccccacatacttggccaccaggctcatgagctcactcacccgcacctcagtgcaagccagtgagttttgcagtatgcctgagatttggtgtgctggcttagacaaaaactcaaaggatttttttttccctttcacttcttggttgtcagctgagttcaagttgttggagatcatgactttccaggtaagtcgggtgttaccgaagaatgggactgataaaagatattttctgaggctgttatttgtattgtaggttgtcttaccatcagcgtatattagatattgttcctcctaccttctcagctctgtgtcctgcaaacccaacctgcatttacaagtatggagatgaaagtagcagtaagtaatgaaactaatccctctgtctttaaaaggtaccagttcaagtatatctgaagttagttgtttaaagtggagaaattgaactttttcttttcttggggtttatatttcctgtatttgaaaggtggtctatcattagccactgttttatttgccctgtcatcattttgaggatttggttgtgataaaattaattactactggcttatcattttttctcttttgaatgtgttaagtatagcaagatgaatttatagttagaacttactaaactgaaaacgtgtatttgtcatggtgatggaggttacttgaattcattatcttgttcaggtgtggtattgagaacatagatgcacatatttgtggcagta

SEQ ID NO: 47321 - DNA, 1026 bp, Homo sapiens
gaggtgaggggcgcctctgcccggccacccctactgggaagtgaggagctcctctgcccagccaccaccccgtctgggaggtgtacccaacagctcactgagaacgggccatgatgacaatggcggttttgtggaatagaaagaggggaaaggtggggaaaagattgagaaatcggatggttgccgtgtctgtgtagaaagaggtagatatgggagacttttcattttgttctgtactaagagaaattcttctgccttgggatcctgttgatcggtgaccttacccccaaccctgtgctctctgaaacatgtgctgtgtccactcagggttgaatggattaagggcggtgcaagatgtgctttgttaaacagatgcttgaaggcagcatgctcgttaagagtcatcaccactccctaatctcaagtacccagggacacaaacactgtggaaggccgcagggtcctctgcctaggaaaaccagagacctttgttcacttgtttgtctgctgaccttcccttcactattgtcctgtgaccctgccaaatccccctctgtgagaaacacgcaagaatgatcaattaaaaaaaaaaatccacaaaattgataaattcatggctaatccagaaataatgagagaaagaaaatgcatattataaatatcaacattgaaagaaaattgtcactacagatccttaaagacagtaaaaggacgatgaagaaatattttgaataaacatatgccaacaattggggctacttgctaatcatctattgtgaagagctgtttaaaaacataatacatataggcaaggcgctgtggctcatgcctgtaatcccagtattttggggggctaaggcgggtggatcacctgaggtcaggagttcatgactagcttggccaacatggtgaaaccccatctctactaagaatacaaaaattagccaggcgtggtggtgggcgcctataagcccagctactcgggaggctgaggcaggaggattgcttgaacctggcaggcagagg

SEQ ID NO: 47322 - DNA, 1079 bp, Homo sapiens
gtagaagatttgaatactggttaactcagaagaatggaaattgcaaggatggcaggaattactttctatattttgggattatttcacttaccataataaccagtattgttctaattaaaagaattgacaactcagaaagatctttaattcctccataccctttcctccttttatggcagagacagctggtataattggagagcatcgccccaccagttaggtaaagttgatcttttttcataatagctaggggagtggcaaatgagcaaattgaagagaatgaaaggaaaaaaaatgtttccatctcctgtggcccccagctccaatccccagggatattcccatgacctagactcatcataacttaaagaaggacctcataggcattttgccatttagaacttaaaatgtgttttgtttttcatagaggtagtgttataaatcattgttatatcctccagtcagatctgaaaaggtatttggctgcaatatagttcaaatttttcaatgaaaaagtagtaggaaactactgtttgctggtaactgtagaaaacaaatatgagttaagtaggaggtagtatggatttttcatttttaagtgtttaccttaaatttgtgtttgagaaaaggcaagtttaattggagcatgagggaagaagaggagtgaatttggccccaaaagttaaactgtccatcttcaagcagaaggccagttaactcttggatcaaatagatccctcagatttaagcacaaatgaacaagtgcctgcctaactttcttcattagatagcagctctgggaggatttgagatataagaagaaactagggccttttctcctttgattaggacctctggtttattctgaatctagattgggaagctgtgggatcatcttgaccccagctccactcactgtctcaactacactcttccaaagctgttatctcctttgcaaggcagtctagatctctatacccaggaaggaatgaaaagagatgaggcttagttacctctgtggagatccactgagaaccccagagttgatataaagattgttttaaactgaagagatttga

SEQ ID NO: 47323 - DNA, 1054 bp, Homo sapiens
tcagaaaacttgacttgggccaactttttatagcttaactgtttttagatagatgaaactgatggttccaaagaaatgaggtattgcaacaaaatttcaaggtatggtaaataaaatcagaagaactttacatcataaaagtctggtaacatgtcagtcttttccccaaatactaaaaaagaagagtgcaatgtttctccgtatttccgaagtttcaactctgcgcccctctgctttttcctcagcccatattgactcctgtcttccctgaaagtagctgcattgccacactttatattttattatatttcatcctctagtgtttcatgtctgtgccctaactaaaattgtaagcaccctaagattgtgttataaatctctgaatttttccctatactgccaccctagaacattaaagaccgcttgatacccaggaagttcttaatggccatttgattactcaaatgttaacatttgtttcagctaaatttattaaactgtttgattgtctcatactgtgaaaatacctggatttaataaaaattattttcaatttatatttctttagactactatgctgccagaaaaacacatagttctctgggagagtagataaaggaagagagggactaaagtctagtaacctaatataaaggttgcaaaagacttgatgtatttttctatatatgaggctgagtgggtagtggaaattgaatatagagcctagaattttacctcttcaagagatggatttgttacttatattcctttggtttaggagttgtggtttttgatccttttcttcagaaaaagttagaatgtctgaaaagcctggacctctttaactgtgaggttaccaacctgaatgactaccgagagagtgtcttcaagctcctgccccagcttacctacttggatggctatgaccgagaggaccaggaagcacctgactcagatgccgaggtggatggtgtggatgaagaggaggaggacgaaggtgagtaggctcagcatctggtgaacctgatgtctgcctttcaaagcctctgataaa

SEQ ID NO: 47324 - DNA, 1061 bp, Homo sapiens
atacccaagagaaggtacatgatttttttttttttaactttttactgtcaaaaatttcagacagtgacaaagggtaaaaataatagcaaaatgaacccccatgttcttatcactcagcttcagcaattattggtcatagctgatcttattttattcctgcatacccttaccttcttccccactccatataattttgaagcaaatcttagccattgtatcatttcatcagcgagaattatagtgtttgtcttatctaccaggacttctagctctctgattttatgggactctatcggacaaagggactgagctgtagcacatagtagaaagaaagtgactgcagttcgtggccttacagcatttgttctgtgagccagcccacagatcctcaacactttgtcccctgtggagcgtcgaggatatttaatgaatcccttttggactatttttagaaggagaagatgaggaagacgaggacgatgaggatggtgaagaagaggagtttgatgaagaagatgatgaagatgaagatgtagaaggggatgaggacgacgatgaagtcagtgaggaggtcagtgcagctgttttctaccctgcttcctatttgtaattacaacaaaagtgggggtttcaaaaagatgacaaaagaaaagaaaaaacaccttttgaagaaattagtatacctgtgaatacatttacaatatgaatctggttaatttagtgtttgtctggctttaaataactactaaatagaatgcctactgaactcaaactagtacggttcctggctgtgcaaggtaagttctggccctctgggggaaggaatgaattgagtattcagtgtggtgagaaaactggacatgttgagaattgatggtatgtctgttccttcattgaattgtagggaagtttatgtttaccaagtctaaactttttcttgtatattcagtgtaattcagtaaatatatatctgctatgttaaagagttgggagtacaaaatgaaatgagattgtggtcctgccctgaaagagcacagtctggtttatgaaatacccaataa

SEQ ID NO: 47325 - DNA, 1020 bp, Homo sapiens
tgagagcaggacatagactatgccctgcgcaggcagccgtccgcctcctgcagggaatgcttgctcctgggtgcacgcacggataccgcgatggtccgagaccacgctctgggacagcaagcctcaagcctcgcacaggagagggccgcggagcttcctcgacccgccccgccgcccttcccgcgggaggccccgcccccgccccccgccccgattggctgtcgggagagaggcggggcctaggggattggctgcccggcgaccgcgggctgacgtggcggggctggcgtgtgggtctcgcagcgttgctcacagaacagagtagaggcggcggcggcggcggccggacccagactggtagtgaggctttggaccccgagccgctgcaatgccgctggagctggagctgtgtcccgggcgctgggtgggcgggcaacacccgtgcttcatcattgccgagatcggccagaaccaccagggcgacctggacgtagccaagcgcatgatccgcatggccaaggtgaggcggcagctcccgggacccgggattcgggcgccgggaggggcggggcggggccgcggggagccagggccacacggcctccgcggctgggtaccctggtccggcctcttcccgcccgccagttccgttttcggaatccttcggatccctcttcctcaccgtgtccgccaccctcgtgacctttctgcattacagcagctgcctcctaacccgacctgtttcctccccgttctggtgccagaataatctttctaaaagtcagacttgatcagaccatcccccctgcctggcaccttctgtggctccctcctgcccgcgggtagagtcgaaaccctttaacatagccttcaagattttaatgactgggccccttccagcccgtcataattcttctctgacattcttcagcgacacagagttactttcaggaatgacagttcctggaagttgctgtggtctctctcacccgccattccctgtatatgaaatatgaagtg

SEQ ID NO: 47326 - DNA, 1054 bp, Homo sapiens
aacaaccttttcttcctttcagactttcttgccttttctgttcctcttccttggaggtccttaaggtctctgtcagtctatgttgtttttaaagatggtgatgtcggctgggcgcagtgactcatgcctgtaatcccagcactttgggaggccaaggcgtttggatcacctgaggtcaggagttcaagaccagcctggccaatgtggcgaaaccttgtctttactaaaaataacaaaaattagccgggtgtcgtggtgggtgcctgtaatcccagctacttgggaggctgaggcaggagaatggcttgaacccgggaggcattggttgtagtgagccgagatcacaccttctgcactccagcctgggtgaaagagcgaaactctgtctctaaataaataaataaataaagatggtgatgtcatagtggttgctccagaattttttcctttttttgagaatctacgacagtcactgaaagatgtcctaatgtgtgttgtaggagtgtggggctgattgtgctaagttccagaagagtgagctagaattcaagtttaatcggaaagccttggagaggccatacacctcgaagcattcctgggggaagacgtacggggagcacaaacgacatctggagttcagccatgaccagtacagggagctgcagaggtacgccgaggaggttgggatcttcttcactgcctctggcatggatgaggtgagtcctctgctgctctgtcatttgtcactttagcagaccaagggtcagcaggcagcctggtgacttccggcttagggccacctccagcccttgctcatcctttctgttcccagctactggagaggctagcaggcgccaaagcccagtgagaatctgtgggaaggatgccattgttttaaaaacacattgtctctggccgggcttgatggctcacacctgtaatcccggcactttgggagactgagggggatggatcacctgaggtcaggagttcgagaccagcctggccaacatggtgaaaccccatctctactaaaaatacaaaaattagctgg

SEQ ID NO: 47327 - DNA, 1021 bp, Homo sapiens
tttttttgggagtgcgagaagttctcagccctgacttcctgtgctggtttagttcttgaattctttgtcttccagaactctgcaacacttaacagtttgtgttgtccatttctactgcctgtgctgctacttaactctacttgaatgcgttataggtacccagaggacaagattcatgccatttctttcttttgtggcctcagaacttagcactgtgttttatattctattccacataaatgcttgttgatttctatttgagcattcctttaatatttatactgttttatgtaagtccagtttatgcaatattaacttgtaattccgtataaataatcaggaaaagttgtatggcgtgttgaaagcaattggttatttgtcctaccttcaccagcagttatgcagaaaatggggcaatacctacttttgcctaattcatgagattgtgaagatcacatgagaaagtggtatttgagtttgaggttgctattctgtgttgttgctaaagagcaggactgatgttcaataagcagttcccactgggccatgtgtgttttggttaaacatcctttctgattggttggtacccttgtagtgccagttgttaaatatttttaatatcatttctatagggaggcattagtattcaaaaagggaaatgattagtgtaagctggaatgattgggggaggcttcttggacactttaggacttacactgactttgaagggtgggtagaattcagagggggatttgatgagtgtgaaagttcttttgaagttgtgtccccaactgtcctggggcctactccaagggaggaaacaaggcttttactgactgactggcaagttactcttcagagttaggttccttattctgtactgtggaatttggatgtattaacctctatcattttttccccaatcctaaaagctatagtacatagctggaaacaaaacataaaagtaatcaaagtggaatgagtgagggagaataacattatgggatgcccagtaggacta

SEQ ID NO: 47328 - DNA, 1064 bp, Homo sapiens
aggattctgaaccactagagtttccttgattcagactttgaatgtactgttctatagtttttcaggatcttaaaactaacacttataaaactcttatcttgagtctaaaaatgacctcatatagtagtgaggaacataattcatgcaattgtattttgtatactattattgttctttcacttattcagaacattacatgccttcaaaatgggattgtactataccagtaagtgccacttctgtgtctttctaatggaaatgagtagaattgctgaaagtctctatgttaaaacctatagtgtttgaattcaaaaagcttatttatctgggtaacccaaactttttctgttttgtttttggaagggtttttgtggtatgtcatttggtattctattctgaaaatgcctttctcctaccaaaatgtgcttaagccactaaagaaatgaagtggcattaattagtaaattattagcatggtcatgtttgaatattctcacatcaagcttttgcattttaattgtgttgtctaagtatacttttaaaaaatcaagtggcactctagatgcttatagtactttaatatttgtagcatacagactaatttttctaaaagggaaagtctgtctagctgcttgtgaaaagttatgtggtattctgtaagccatttttttctttatctgttcaaagacttattttttaagacatgaattacatttaaaattagaatatggttaatattaaataataggcctttttctaggaaggcgaaggtagttaataatttgaatagataacagatgtgcaagaaagtcacatttgttatgtatgtaggagtaaacgttcggtggatcctctgtctttgtaactgaggttagagctagtgtggttttgaggtctcactacactttgaggaaggcagcttttaattcagtgtttccttatgtgtgcgtacattgcaactgcttacatgtaatttatgtaatgcattcagtgcacccttgttacttgggagaggtggtagctaaagaacattctgagtataggtttttctccatttacagatg

SEQ ID NO: 47329 - DNA, 1039 bp, Homo sapiens
gaaccaagtgtgtaactggttagttttgaaaaccattgtgttgaggtatagaagggagagacagttacacagtggccagaaagaaagggtaaaatagcccccaaatacaaatttgagagattcaatgtgttttattaacctttacctagctacccctagggaatgggaagtattttgagtacactttagtatttctaggggctctggttttcaaatactcttctatgttccatgcgccagcagaaataagaaatcttaagagaagccagcctgactcctctggggctcctgtaattccaggaaactttgaagtcaggaactggaggtgtgatattgtggaaatagtaggaagtgcatgcgtccaagtcctggctcagtccatgactataatatgttcacactgggtttatcttctagcttaaaatccttttcaatgaacaaggaggaagatttcagctgcataccccacagatggaatgacatatatctgtgtgtgtgaaaccttttctaagggcatgaatctttctgtaaatccctgtacagttatgttttgccatttacaatcagttttcccataggaatggtcacacaatgaagttttaagttcccaggctaccacgtagtccataattaatgtgtctgaaatataatccttgtagtacaatagacccaaatcatggtttggcactgattgctttcaaagttctggcatgaacacagctcttcctgttagaaccaggactgcactctcccactccgtcatgtagcagggcaggctccccgtgctgtagacagtgcttcctgcattcagaatgtggagtaaagaccgtggttgggtaaaggaggcatgaggaccagaatggggaggaaagcaagaagagatggtagggatagggttttcacttctcttcttttccgtatatgcccttccctttttcaaaaatccagaatcatcagcccacagatactggaatgagattttgagggagggtatactgggatttgatgctgaatggtgcaggcagcaatgagataggct

SEQ ID NO: 47330 - DNA, 1046 bp, Homo sapiens
gagggataatattgttgagtatggaatggcaaattatagattactgtgtataatgtaatccattttttaataaaaagggagaagccttatatatgttaaatgtgtgcatgagccgtgagaaatgtgtgggagtattgagttaagagggggtgggataggtgaagtgagaatatcatttttatttcatatgcttctgtagtgtttgatttattgtgaagagcatttatttttgtataaccacatttaatgaaggaaaaatgctaaataaattcaaagtatgagcatgtgggttccaaagatgctgcatttggccagccagagacatggaaaatgtaaaagtattatgctacaccttctattgtggagatatttgttataatttccatccacaactattataacattacttctgaaaagaaagatatcttatactaagaaatggtggcattaatgatttttttcttttatagcaactccgatccaatatccgagaaattgagaaactttgtttgaaagtccgaaaggatgacctagtacttctgaagagaatgatagatcctgttaaagaagaagcatcagcagcaacagcagaatttctccaactccatttggaatctgtagaagaacttaagaagcaatttaatgatgaagaaactttgctacagcctcctttgaccagatccatgactgttggtggtaatgtattgtgctaagtcttattctcagtcacagtagtgcagttaattaaagatcacctccttgagtagatactgaattatctataggtcttcagagaccattcactatcccaatatgctgaatccttggaccctgatcagtgttcctggaaatgtgtaccctggatattttgcagaataaaaaatttaaggctatgcttatggagtgggacttcagggaaagtacccgtttgtctatttattgaagagaaatttaaatatatttcctaaggataatgtcattcttgtctgcaaagtactctttactcctttccaggtgcaggggtgacctcttcaggcatgcttttt

SEQ ID NO: 47331 - DNA, 1027 bp, Homo sapiens
tctcaaactcctgacctcatgatccacccgcctcagcctcccaaagttctgggattacaggcatgagccaccacgccctgctgcctttgagcattctacagtgagtggagataggcctggaccccagaaactgagctttcaagcatgatggctaaatgcaaaagcaagaatgaagagaggtattatcagctccaaggaaaagcatttaattccaaaggaaggaggcaggagtcataaggtagaaagaagcattaaggatagcttcacacaggtagacagtatttgtatgagccttgaaaaatgagtaaatatccactgggggaagttatggagtatatttgagaagctgaacaaagacatggagtagagaagtgtatggcctgttccagattgacaagtactgcagtataaccaaagcataaggtaccatgggcaagcaaggagggtgagggccagattgtgatggctttgaatgccatgctaaagaatttgaactttactttgtgggcattagaaagcctaatactgattcttgagcaggttagagtcatgcaattcagtctgtgcttcagaaagatcactgttggctttgtgaataatggcctaagagaggaggaggtcatggaaaggaagactggttaggaatcaattgcaagagttcacctggagcaatggcaataccagtgtaaaggtaaaggacagctgagagatatttctgggggacttaacagaaattggaggaagatggagccaaagataaggaacattgtctttattctgcataattgggtgtcagtgatactgttaacatagattaggaagcacaaagtcaatttgttgggaaagatagattttccaccatttttctaaattgttctttttgtctttctcaggagttatgggaaggtaggatgtatgaatacgtgtgtatgtatatttatgtatgtgtgtccacacaggcatacctgtttctgcttgcagttctgtctaggtttagttctttgtttctgatctaaccatgattttg

SEQ ID NO: 47332 - DNA, 1069 bp, Homo sapiens
caacatatgacggctgatggtagagttttaagcctgtgatttatctgctagcatagactgtttcaggcaagagtggaaagtgttgggggtgtcctaaatagaaacaatgatagggtgtcagaaatctagacaagttgtatattattagtgctggaactttttcttctatgggtcagaaaaagaaagctgacttaaataagttttgctattgaggaaaataaaaattgaatgattgaatgaatgctaaaagatacctgaagttttagtgtcctagaattttcaagcaccgaaagaaaaagttaaatatattttttgatagagagatgagagttaacacttccttggggaaattaggataaatttttctatttttcccccctcacactttgcaaacacattttatccccacttcaactctatgaaggtataagtatcactattcttacttgataaatgagaataccaacacctagagagcttgagtaatttgtctaagagcacatagtggcgtttgctgagatttgaacacagattatctgactaaaggtggtgcccttgatctgagcacatataatagtggttcttaaagtgtgagaattgtggactggcagcatcagcatcacctgggagcttactagctcaggcttcatcccaggcctactggatcagaaactccggggattaggcccagcaatctgtgttttaagaagcctccaggtggaagactgagaaccattgttaaagttgtctctcacagagacattcaaaggaaaactgataagggactttcttaggcattgttttagagatgtcaagatagtggtggagaatattggaatgaagggataccacaatggcgaagatagacatattttgtgtatgagaagggaagtaatatcagtaatgctaagaggaaacaaacatggggaaaaagtagctgtgtggtttgggcttcatgttttcaaatgaaataatggttggaattagaaaagtgttgtatgtgtctgcctcaatataaatgaataggccaattatataagggcaatcaaacacttcaggattaaagttg

SEQ ID NO: 47333 - DNA, 1033 bp, Homo sapiens
cctgtggcaggtgcactcatcgggggaatggtagggggtcctattggcctccttgcaggcttcaaagtggcaggaattgcagctgcacttggtggtggggtgttgggcttcacaggtggaaaattgatacaaagaaagaaacagaaaatgatggagaagctcacttccagctgtccagatcttcccagccaaactgacaagaaatgcagttaaaaaccaaatttcagtattattggtgccaacatgtctatcctgaggacctttgctgctgttggacactccgtcaccttttggaacacaagtatatcaagatagtggctactgatgttcaagtgggattgaagtgtgataaatggatatattttgttgtttgctggggtgttcatggagatgttaagagattgaggccctgggctgagggtatataatgtatgtcaggtaaagtttgaagactgccaaggagcagattttctccctggaaatgtgaaaactgaacctataactctgataaggacttgagatgtgtagaaacgttgggttatggaagactagtttcttccataaccctgaattggagaccttaatgctaagtgtagattattgaggtttgttagtgaggaaaagaataagagttcagaagcctttgttatcagatagcgaaatcagggcctagtgaggagcacaggtcgactacataatggagtccattggcgaaccctattgcaatttggtccaactatatcttctggtgaaggaaattaatgatgtaagaaaatgcaagaggctcaacttctcttccaaaaatcttctggcttctgaactcttcctctgcctctctttaaataaataacacagaatttcaagtggtaggagacttattaagccagtcaccaagcttggtctgtcagcctgtcttctaacacctcaaagatcttgtgccctgtgctgtccctcccttgtaattatgaaaagttctttggtttctggggtgaattctacccatgtataatgaggaattctctcataacctttt

SEQ ID NO: 47334 - DNA, 3507 bp, Homo sapiens
ctcttaagttgcttacaaagatcatggatgaagatattaaatgataattaaagctgattgatctaccttgtaatacataagtgttttataaaatatctatagccataatagtcattgttattattgacatgagaagaccaaacattctcatacattatttattatgtttctagtttttgtgtgtgtgtgatagtgaactgtattatgttatcttttcttgggttcattagtgggaaaagctcatattcccaaagcattttgctcacatctctattagagccccattaccttatattgtaattattgcttacttgtctcttttctactaggctggagctccaggcaagtagctctttttgtttgtttttgaatctctctgaatctagtaagttctgacatgtcttggttgaatgaattttattttacttttatagaaagtcattactaatacaaatacgagaccttttgtttattggaaacatttatctactttaaaaatatatatgtttgtggaaaaacttattgaactgtgctgcttggcttagttattttggcacatgttcacttctctggaaacaaattactgttagtccaagaaactgaagaaatggtacccatgagaataaaattaatctcaatatactgaacatctgcacctaatttgtttttcatttagaaccatcagtttaatccaagaaagcaattggtcataccttttctgggcttctcacaaaagatatctaattgttagaaatgttttgctccagggaggctactatttctctgacttctactgatacatttgttaataaggataaaaaagctttagaaatattagtatatgttaatagttatgcatgtttaatcttccaggaggttatttatttggcttcaagaagcttaagactacccactttgacaaattatatcacagtaaacacaaaaattaaagaaccttctggttgtggctgcattgtcctttttttaaattcataaataattctcagttcatctatgaaaattgaatgtttattttcagttttcaaggtacgctgtttccatgttactgatttacaaaaaggagaaagaatacctctgaaacttttcaggaacacttataccaggtaacactattaggttttcttattttgcagatgcacacacaaacacaacaaacaatccacgccccagtccccttcagctctgtattccccctcagtacatatatagctctaccataactcatcaccacagtttattggagattttgtttatctaggtctcacgcccagtaaagctatttgaaggcagtgaccatgtcttatttgatttcatagttacagtcctagcatagcttctgccacttaataaagacagtaatttatttaaggaatacatgaatgaatgaatgaatgaatgaatgaatgaatgaatcagtaaatgtgaatatcaaatagatttaatatgaagggcatggccttcaagactgttgaaatttaaatgaataattatatttattccttttcactatccactccctgcccttacaattttgcaatcaggattttttaagattttctgtgagcttaatttcttaataaacaatgctcttgtatgcctcaatttcttcatctataaaatggaataatacatcctatcttctatgtagggatgatgagtccttagatataaagcattctgtttgttggagaaatttattctcaaggactacattatcaatattattgctattagtcacactacaatgtaggtgcaaacatcaaattactgtttagagatcagcagatgtcagagatagaaaggctctttgggatcttcttgtccaatttgtccttggatgaggaaactgaactctactccttttacatctcttctctttaaaaattactgtactcacattctctttgcctttgcatatgcctggaattttttttttttaattatcttaagcatagagataagaaagaacagggcctggtgccatggctcacgcctgtaatctcagcaatttgggaggatgaggcaggaggatcacctgaggtcaggaatttgagaccagcctggccaacatggtgaaaccccatctctactaaaaatacaaaacttagctgggcgtgatggtgcgtgcctataatcccagctactcaggaggctgaggcaggagaatcgcttgaacctgggaggcggaagttgcagtgagcggatattgcaccactgcactccagcctgggcaacagagtgagactccatctcaaaaaaacaaaaacaaacaaaaaacaatggagaactgagaaaacattaggtacctaatacctcgaagagatcaaactcagtatttcttatttttgcttcagaatttttaaacaaaactatagattcacttgaagtcttccatttatcttccaaaacccttctttccctgtctcctcagtctgtcttgattttgttggtttcaattcccatgcatatgtttctacctttactttatgtgtgtgtgtgtgtgtgtgtgtgtacatgtgcacatacactattatgggtaaaccatattattttgcatctttaaattaatggtattatactgtgtgacatttaccaacttgctttttcaacttaatattatgtatttgaaacttcttcatgttgaaacatgtagccctatttcataaaagattatatccagatgcctaaaagacacatgagatggtacacaacatcattactaattagaagcaaattaaaactccaatgagatactactacatgaccagtggaatgtataaagtaaaaaagtctggcaatcaatattgattgatggtgaagatatggagcaactggagctccccaacatttttgttgagaatgtatattggtacattcactctcgcaaactatctgactatatctgccaaagctacacacacacacacacacacacacacacacacacacacacatacacacatccctcatctcaattcatgctcccagccccggtaatacctaagaaaaataagtgcctctttctactagaagacatgtatgagaattacatgatagttttatttagaaaagcaaacattcctttttttaacttctatttttccataagttattgggggtaaaagtggtatttggttacatgagtaagttctctagtggagatttgtgagaacctggtacacccatcgcccgagcagtatatgccgcaccatatttgttgtcttttatcccttgcccccattccactcttccccccaagtccccaaagtccactgtatcattcttaggcctttgcatcctcatagcttagctcccacatatcagtgagaacatatgatgtttggttttccattcctgagttactttacttagaataatagtctctaatctcatccaggtcattgcaaatgctgttaattcattcctttttaaggctgagtagtattccattgtgtatatctatacaccagagtttctttatccact

SEQ ID NO: 47335 - DNA, 1046 bp, Homo sapiens
tgagaggaagttatcgagttcagttgtgaaaaatggaattttaggcttcggtgataatgactagtatgaattgtgatagtttgcatctccaaagtaaggtcttggctggagttattagtatacatatagaaaccatagaagtagttgaagggctcaggtatggtttatagatgggaagaggactagaaatagaaaacaccaatatttaaggtttatttacagaaaataaacttacaaaggagacagtacaagataggagaagaactagatcagagtggtgttatggagccagagggacaggtttcaagcagaagaggatccatttgtttcatcttttttactatgatgctaagatttgaatagttccttttccactaaatgactcaataaatggatggatataaatatgataagaattaaaaggcttccactggatttttcagttagaaagtgaccttagcaagagcaatggtatttagtggacacacaagctagatatatatcactgttgagtaaacaggaaatgaggatatggagacagtacgagtgattgattaatggggttattgatcaggaaaagtatggacggaagaaattgtggtgggaaaatttttaataaataataatctctcccagtataaccgtcacccactttcaataaatattaattcataaacttgtttctgtagacttcaaactgttttattatatattctattatttcatccataaatatttcagtatatttataattcatatatccccacgatatcattgtaccaaaaagaaattagtgataattctgtaatattattaaatacctaatcagtgttcaaattttcctgattatatctcaaacatttttttacagttgatttattcaaatcaggacctaaacaaggtctatacattgtatttggttgataagtcttttaagtctcttgtaatctaatagatgagagatatttgaacacgtttaaatgttaaggaaaaggagacatcaaaaatttaggagaaagaatggattattgatggatcaaagtcgc

SEQ ID NO: 47336 - DNA, 1040 bp, Homo sapiens
cacacctccccagaccctaacacccttggttccattaaactcctaaacttgggcttcaggaacagaggaagtgagaaagctagtgtttaatgataacttgttttttcactgcataacaaggaccttgttattttctggtgctctgcagagtaaatatagcataatgaaaaagaaatggtatctggtatcagaatttataagatctatattcgagtcataattcaaagacatttggtactctgtgaccttgagcaggtagtttaactctctaagcctctgtaaaatggagataatatttctaacatacttacatcataagattgtaagtatgaaaatacattgaaatactgattgatgtgtatgccaaagaccctgaaaggcagcaaagttatacatagtgtttacaaatatatatgagtatgaaacatctgaaaaccatataaataatctcttttgcaaatataggtactttttccaattgtatttaaaagttgatgtgattaattgatgtgattaagaaaatggcatttcatttaaaattgtagctgaattcaattctcatattttttcaatgaaccaacaaatactaaatttaaacattaaggttctactgaattttttgtaggatttttttgctgttttttaactttaaaaagagttaaactttaaaagactgagagtcaacgtaataatatatgtgtataaagtgctttatttataagtaactttaattgagaataacagcaagtaggtatagccatctagtgactttaactttctttttaaaatatatgtaactcctcagccaggcatggtggctcatgtctgtaatcccaatactttgggaggctgaggcaggtggatcacctgaggtgaggagttcgagaccagcctggccaatgtggtgaaaccccatctctactaaaaatacaaaaattagctgggcgtggtggcacgtgcctataatcccagctactcgggaggctgaggcaggagaatcgcttgaacccagtgggtagaagttgcagtgagccgagatc

SEQ ID NO: 47337 - DNA, 1034 bp, Homo sapiens
tccggtattcctttataaaaatacaaatggactaagacaatctacaaagaattcaagtataaggtagaatgcatatgtgctagagaagaatacaaacaaaatggtatggaaagatagaggaagggaatattcaatgagaagttttagggaaggtttcatgaaggagagagaatttgaactagatattgaaaaatcagaattaattttcaaaggcttggagataaatagtatattctgcagagataaccaagtaaatgacatacagatagtcaatggctctgagtggctctactagctacatctttttatgttaataggttttttacttttttcagagaaaattatatccagcatttttaatctttagactaataacaccaggtagacacaaagctattcctggaacattgctttattatagataggaattccataaccaattacctcctatttgctagaacacactaacacaaatacataaaaaatacagactaaactataatagaaggcagttttctctggtgtttgtagcacctctcttctactaatttaaaatatcttcatcactgaggatgcctcctattaaaatgttatatctgagttatactaataactatgaaattaccaggtgtctctgcttgagtagttggaattaatttttttgcctcataactctggagacttctcagaaagtgtagctaaaggtttattcatcaaaatccccttctaatgaatcgactctgatgattctgctgttgtcagaatggatgttctaggaagttgtcatcacacttgaccgtaatgaaaatgctgccctggaccatctccccaaactatgtgtcctcagtattgtgggaagaacccacttcatgatttctaaccagggtagcctctggaagtacaaatgattgctgtaaaattatgaacagagcagcatcaggctttgctctgatgtatcttatgaagcctttctacttccaaatgaagactatgaagagaaccttgaaacaatgcccttctgggagctcattcag

SEQ ID NO: 47338 - DNA, 1778 bp, Homo sapiens
cttttataacagggcctactcagttcttcaaagaggatgaaaactgagtagaaatctgcattcttactttttgaagaatcaaaggacagcatttggggcaatggctgtaagtcagaagagatgtttcaggctgggtgcagtggctcacacctgtaatcccagcactttgggaggccaaggcaggtggatcacttgaggtagggagttcgagactagcctggccaacatggtgaaaccccgtctctactaaaaatacaaaaaattagctgggcatggtggtgcatgcctataatcccagctactcaggaggctgagacaggagaatcgcttgaacccgggaggcagaggttgcggtgagccaagatcatgtccttgcactccagcctgggagacagagtgagacttcatctcaaaaaagaagaaaaatgaaaaacagaagagattttccagaacagagaaattcatataagggaaggcctaacctctacatataaactgccaaaatctctgactaacccctaacctaaacatagatggggaaaaattcaggcagccaagctaaggctaaaataactcatcagcgatttagctgctgcctgcctatgcaggaaaaacataatttagagtttgggttcagccaaggtatctgcctgctaaaacaaaaaatgaatagtcttcagcataacataacagaatccagaatctttacaacacatcattttcagtgtctaagatattctcaaatattgctagacatgaggacaaacagtaaactgtgttccatactcatgagaaaaagtaacaatggagaacaactatctttgttgttccagattttaatgagcagacaaggaatttaaagcaggtcttttaactctgcttaaggatgcaaagaaaaatatgttcgtaatgaataaacagataggatgtcttgcagaaaaatagaaactctataaaaagaactaatggaaattctagaactgaaaactacaatatctaaagattcactagaagggcttatcagcagattggagatgaagagtcagtgaacttaaagatagatcaatagaaattaaccaatctttaaaaaaaaaaagaagcgaatatactaagaaaaaagtgagtctcagtgatttgtaggacaatattgaaagaccaaactgtttgtaattacaaagataggagagagagaatggggcagaaaaataattaagaaaatgatggccaaaaattgcccaaacttggtgaaagacatacatttaaatattcaagaaacgtaatgaactccaataagataaatacaaagaaaatcttggccaggcatggtagctcatgcctgtaatcctgcactttgggaggctgaggcaggcagaccacctgaggtcaggagttggagatcagcctggctaacatggtgaaaccccatctctactaaaaatacaaaattagctgggcatggtggtgcgtgcctgtaatcccagctactcgggaggctgaggcaggagaatcacttgaacccaggaggaggaggttgcagtgagccagaatcatgccactgcactccagcctgggcgacagagtgagatgctgtctccgaaaaaaagaaaatctcacctgaaaataccataatcaaattgctgaaaaccaaagatgaagagaaactcttaaaagcagccaaagggctgaactgagctggttgccttctgttactgtgggagaactcacttcatcccaacttcttcatactttcacttctggagctcatattcctctgacat

SEQ ID NO: 47339 - DNA, 1005 bp, Homo sapiens
aactggacagagaatgagtttgatgaattgacagaagtaggcttcagaaggtgggcaataataaactcctctgagctttttctgtaaaggagcatgttctaacccaatgcaagaaagctaagaaccttgaaaaaaggttagaggaattgctaactagaataaccagtttagagaagaacataaataacctgatggagctaaaaaaacacagcaggagaactttgtgaagcacacgcaagtatcaatagctgaatcaatcaaatcgaagaaagaatatcagagactgaagatcaacttaatgaaataaagtgtgaagacaagattagagaaaaaaagaatgaaaaggaatgcacaaagactccaagaaatataggactatgtgaaaagaccaaatctatgtttgattggtgtacctgaaagtgacggggagaatggaaccaaattggaaaacactcttcaggatattatccgggagaactttccccacctagcaagagaccaacattcaaattcaggaaatactgagaacaccactaggatactcctcaagaagaggaactccaagaaacataatcgtcagattcaccaagagtgaaatgaagggaaaaatgttaagggcagccagagagaaaggtcaggttacccacaagggaagcccatcagactaacggtggatctctctacagaaaccctacaagccagaagagagtgagggtcaatattcaacattcttgaagaaaagaattttcaacacagaatttcatatccagccaaactaagcttcataagcgaaggagaaataaaatcctttacagagaagcaaatgcagagagattttgtcaccaccaggcctggcttacaagagttcctgaaggaggcactaactatggaaaggaaaaactggttgcagccactgcaaaaacataccaaattgtaaagaccatcgacactgtgaagaaactgcatcaacgaataggcaaaataaccaggtagcatcacaatgac

SEQ ID NO: 47340 - DNA, 1051 bp, Homo sapiens
tatttaaagcaaaaattataaaactattatggaatttatagtaaatataggtataatacatatatatgatatctacagcataaagtatggggtggggataatgcaactatacaattgcaagggtcttgcattttgtataaagtgatacaacattaactctaaatagactttgtaaagttatggatatgaactataatacttggaggaaatactaaaataataatgcaatgaagtatcgctttttttaattcaagagaaaaaattttaaaggaattcttaaaaattgcttgagtttcacttcccaagattctaattcaattggtctgaggtagaaaccagacagtaatgctttttaaaagctcctcacctgattctaatatgtttaaaatgccagtgttgggaatgtttctagcagtgctaaatcaaagttattggatgtagttgtataagagagaagtatatgttgcatgtaacagagagtatatgttgctggaaaaccatgcagatcaccagagcactgttttacctcactgaaaagcattagttcctgtgaatccatagaccacttgcttcgtgttgatgacaaagtcctcaccattttgtaaaaaaatgaagaaaagatcattgtagtatttaacatatataggtttgtgtagtatttaacatataggtttgtgcatgtctgtgcacctatagtctgtatgtaataagtctgtcttcctgttactacagttcttgaaaatagttgggtggccttttgctacattgggaagacatatttagaataatatgacttcgtatataggctacatggtatacaaaaaaatgcatgtgggggaaagtaaggggagcactcaaagagatctttcagagcatctcaagcagagattcaataagaggcctatttaagaggtcattggaagggagatgccataattcttaaagacattgcatgcaggaaaaaacagtgattttgaatatttgccacaaatggaaaatgacaggagtagatactcaagttacaattaatttgtgatcctttgctataaag

SEQ ID NO: 47341 - DNA, 1048 bp, Homo sapiens
gttttttttttcaaatctttatgcccttctttcctcccttctttcctttcttccttcttttctttttttcagccttatttaactggctaacacctccattacaaatttaaatagaagtgattagagtagacatccttgccttatttctgatcttaggaagaaagcatgtagtatttcaccactaaacatgaaattaacttcaatttttaaaagatgtccttgagctaaagaatacaggaataacaaatgtagggggaagctactacctctgaggcttagggagagtatccaagggaggagcaaacttggaagctgagattcaggcctggtaggaatgagtgtggctgtgcccctggttggtgaagttcactggaatgccaagggccagagctagagagctggggctgatgagcagaaagttgcccactggggtagtggtgaaacttactggaatgtgagacccactgagtctcctatagacctccgacatctgcatcataggagcaaaaagagcacattggaaccagtgtgaagagccccttcctctgctattatttgtagtgtccctgctgcgcctgctacagataaagtcaaatattgtggcaactgcaaaggagaaattttcacagggtctagtctcacaaaacatggtaaagaagctgatttggagctgagaggcaaaaaactgataaatgatacactgattgaggaaactttcttttgattctagttcgctgagaatttaaaccaagagttggtgttgaatattgtcaaatgccttttctacatctattggaattatcatatagttgttgttctttatttattttgctcattatatcaattgtttaaaaaaatatatagagatggagtctcactgtgttgcccaggctacacttgaactcctaggctcaagcaatactcccacctcagcctctcgagtagctgggactacaggcacacaccccaccacacgcaacacatcaattgatttttttttttgagacgggagtctcgctttgttgctcaagctggagtgcagtgatgt

SEQ ID NO: 47342 - DNA, 1027 bp, Homo sapiens
atgacattgaactttttaaagaatacaagccatttattttatagaatttgactcaatttgtgttagtcttatgttccctcataattagattcaggtttcacatttttggttggaatattacataagtaatatgaatccttctaagggtattacctctggagatatatgatgccccttatcacagccttaattggccaggcatgttggctcacgcctgtaatcccagcactttgggaggctgaggcgggtggatcacctgaggtcaggagtttgagaccagcctggttaacatgacaaaaccctgtctctactaaaaatacaaaaattagctgggcatggcggcgggcacctgtaatcccagctacttgggaggctgaggcaggagaattgcttgcacctgggaggtggaggttgcagtgagctgagatctcaccattgcactccagcctgagcgacgagagcgaaactccgtctcaaaaaaaaaaaaaaaatagtgttaattatgagctcttggatcaaatatcatttgctttctccactgtatatttaatattttccctttttgtaaataagcaatttggaaaaatgattgcttatattaattttgaattagcataaataaccacatatccaaaaatacttactccagatgtacttgatttttgtttatgcttatagggaagaacagctttgcattggtcctgcaacaatggataccttgatgccattaaattactgctagactttgctgctttccctaatcagatggaaaacaatgaagagaggtaagttgttgttgacttttttttttttttttgagatggcttctcgccctgtcactcaggttgggttgcagtggcacgatcttggctcactgcaaccttcgcctcctgggttcaagcaattcttctccttcagcctcctgagtacctgggattacaggcatgcacgatcacacctggccaatttttttgtatttttagtagagatggggtttcaccatgttagctagggaggtctcgaactc

SEQ ID NO: 47343 - DNA, 1041 bp, Homo sapiens
gcagtgataaggtttgccccggggctggctacagagaggcttcttggaattgaacaagagagctgttgggtttcctaaaaagaaagaggagactgctcaaataacaaagtctaatttatcacctcagagtcccccttaatggcagtgagatccatataggtgccaacccagacagccacccacatgtgtctgtctaaagagccaatatcattctcttaaaacagccctgctcatcggtgctgataaaaagctcagcacttcctctgccttcctggagcaaggctattaaatctattagcagcacttcagccacccagatgcttccaccttcttctgaaaagcagccttgtcccagagagatcacactgaaatggcacctgcttgcatccgtatgaatctcaggctccgagatgacaggctgtccggctggcctgtagaccacagtcattagcaggtggcaaagatgtcacaaaaccagagtcaaataaaaacactagagctgtacaggagttagcacgacccatctggccatgttctcggtaatgggactcagtagaaaactattatataagcaagcttggaccccagatcaggggctactccatacaggaagaaagagtttcagaaggggaatttaacaagttgacaaggttgtaaatcaaaatgtaacccagatgtatgtcagctggggctttcctgtcgcttgagatctaaataagctttgcttcaaatgccgtagtccatagcagtctggattctatgactgcttggaggcttagggtctccgccttgtctcatgcttctgtgtctgatccttagctctgcaatttgtcaggttgcctataaagaaggcatgctcatgtgtgagcaaggtgggccttacaaaaaattggtgtcattgtggagaatcacatttcatattgtatgtttcattccatctagtggtatagtgaacagtccatattagactttcctgtgctcttaagcctggctactcaaggtgtggccagagggccagcaacacctggatcacctgggtgc

SEQ ID NO: 47344 - DNA, 1106 bp, Homo sapiens
ggcctgtggcttgatcactgtgttttaggaagatccctgtagttgtgtggaagagggtatggaagtttgggagaccattttagagattagctctgtccacagacatgggcagtgagaatgggagaggagggaacagatgtttgggtaaaatgtaccataggtcttgttaattagttgcatgtgattgaagattacatttctgctttgggaagccaagttgatgtggctgacatcatcagaaatcaggagattttggtgtatggggaataattagtttggttttggctatggagagttggagttttctgaggtacccatagtggggcacagaggtggctgatagataattggaaatgtgtttgatgctaaggagagaggttgaggcttggaagagaggttcttccatcactgccactttattctttttctttttttctttttttttttgtttttgagatggagttttgctcttgttgcccaggctggagtgcaacggcgcaatctcggctcaccgcaacttccacctcccgggttcaagcaattctcctgcctcagcctcctgaatagctgggattacaggcatgcaccatgatacctggctaattttgtatttttagtagagacggggtttttccatgttggtcaggctggtctcgaactcccgacctcaggtgctcctcccacctcggcctcccaaagtgctgggattacaggcgtgagccaccatgcctagcctttttttttttttttttttaaagagacagcgttttactctttcacctaggttggagtgcagtggtgcaatcattgttcactgcaacctcagattcctgggctcaggtggtcctcccacttcagcctcccaagtagctgggattacagatgctcatgcctggctaattttttaatttttatttttagagatggagtatcactgtgttgcccaggctggtctcaaacttctggcatcaagcagtactcccccactgccttccaaagtgctgggattacaggtgtgagccactgtgcctgcgtccccactcccaactttttttttaaaacaaacacttactgtgaatctactatgtgctgaagatagatataaa

SEQ ID NO: 47345 - DNA, 2019 bp, Homo sapiens
acagtcttgtttccccattttcaaattctggggtgggatctagggaagttcatcccacagagttttttctctttctctttggaagaaatgatgtaattcatttactcataaacgtaatttataaattttcagcaagaagggaataaaggtacattctcagtgtttttcttatagtaacatttaatagtgactcaagtataaacggatttattttaaattggatgtttgtacatagatgacactggggacttccctttttgctggtgattattaaagcatagccaaatgctccttgctcctgtgtccaggtcccatctggagggtggtggagaaccttggtgctttgtcatttgggaagtgtgtccaaaggtaatctgttaatactagtaggtagggtactggtactctttctatacagtaaaacaactttgagttcatttcactcattttgcatttcagttttctttcaagaaagaaaaagaagcctggaattgtcaatcatcctttctgggacttggtaggaaaaaggtggaaaatctgctatagagttatggccctcattacatcttgtgtatttgacataaggaatgtgtgtgtgtgatctttctatttctaacactgtgctgtctaatacagttgtcacaagccacatgaggctcataggcacttgaaatgtgggtagaccacattaggatgtgctataattgtgcacaccacattttgaagacttagtacctaaaaatgtaaaaaaactcattaaataatttttatattgttacatgttgaaacaataatattttagatatgttggattaaaaaatatattaccaaaataaaatttcacctttttttatttttctaatgttgctctgaggatatttaaaattatataaatagcttatattgtatttctgttggacaatactgttccaacaccttacagggtacctgttacagaattaggtactcagaaatttattggaatttatgataaaactgttaaacaggatggactctaatagtattccactagaggcctccctgcaactactttttggtatgagatagtttcaactgtgtcatcttgatcactgtcccttggatatacttagctttgtcaacaactttctgaaaatgtccatctgcattcgaacacactagtcttaaaatttaagtataacacttaggaatatattgatatttgccaaaaaaccccagtatttcctccttaaatatattaaaacaatttacaccctgcagattttatgatgtgtgataatttggctttgacacttatcttccattattttgagggcaactgtgtacagaaccaactaagggagccaataaaattcgctaggagtggctgggaggctaggatgaccaaaggtcaaatacatttaagaaaactaagctttagtgtagcacctagatgtcttaggataatttatatttaatttcacattctatgctctaaagtgatacttgataactgtgaacatttcttaataaatgccattattattactgttcaatcctaatctttgggggtgagatctctggtaccagagggctgagttacacttccagtcatggcaccccagcctcactggtctgtgaaaagcctttcttttgttagttacgtgtttgttctatttttattccattctttcattctcttctcctgcatctgaatcattctaacgcgcttgcatatccttttacatgtgttttgtgtgcatctattttaaatttatgtagatttaaatttgtgctagggataccattttctctcttttttcacttagaatactgtttttaagatcaattcctaggccgggcacagtggttcacacctgtaatcctagcactttgggaggccaaggcagaccgatcacctgaggtcaggagttcaagaccatcctggccaacatggcaaaactcctatctttactaaaactacaaaaattagctgggcctggtggcgcacacctgtaatcccagctacttgggaggctg

SEQ ID NO: 47346 - DNA, 1034 bp, Homo sapiens
catgaacacacatgaaactagcatggatttgatagcaagatatgcataaaataaaatatgactaataaccagagtaatcagaatttcatgacttttacccttacctattaatgatataggacctctagcaccctcataaatgcctccctccaagatttattccgggagtcaccaaattgtgtttgatgtgtgcccactaatgcattccactgctacatgacacctgtctttttcttcctgtgctgtttgctgcctctgcagttgcacgttggtacctcctgtcagatatcagaggtctgcctctttgcccgacactaccatctccttggtcttatgctatcctgctagatacattgctgatattcagggactgttgatgtgtcccagctcctttctccccatgtattatgtcttgtgtgagcatcaaagcagagcttatcacttcgtttttagtgaaaatcattctttagtttctttgttgtagctcctctgtctctgttatgagttcttggagctgggctggaggagcaaaccaagtctttagaagggactgtgctcaggatcacttctcttgttcaaggctgtgtttatgccaagttcttttttttgagacagagtcttgctctttcactcaggctggagtgcagtggcacgatctcctcactgcagcctcctcctcctgggttcaagtgatcctcccacctcagcctcccaagtagctgggactacaggcatgtaccaccatgcccagctaatttttgtatttttagtagaaacaaggtttcattatgttggccaagctggtcttgaactcctgacctcaggtgatccacctggctcagcctcccaaagtgctgggattacaggcgtgagccaccaggcccagccagtgggaccaagcttttctgcctcacattagcagggatgattattcccctaaagtattctgtagtccctcatacaaacattccttggggttaccaaatgtgactcctggtggcagggatggtttaggttctagcttgcaatccact

SEQ ID NO: 47347 - DNA, 1034 bp, Homo sapiens; identical to SEQ ID NO: 47346

SEQ ID NO: 47348 - DNA, 1034 bp, Homo sapiens; identical to SEQ ID NO: 47346

SEQ ID NO: 47349 - DNA, 1034 bp, Homo sapiens; identical to SEQ ID NO: 47346

SEQ ID NO: 47350 - DNA, 1044 bp, Homo sapiens
caccagtcacccaaagtcttaactcatttcagcattaactcaaaagtccacagtccaacatctcatctgagacaaggcaagtcctttctgcctataagcctgtaaaatcaaaagcaagttagttacttcctagatacaaagggagtacaggcattgggtaagtacagccattccaagtggcagaaattggccaaaacaaaggggctataggccccatgcagggcagtcaaatcttaaagttctaaaatgatctcctttgactccacatcttgtatctgggtcatgccgatgcaaaaggtgggttcccatggtcttgggcagctgcacctttgtggctctgcagggtacaggtggctctgcagggtacagcctccatcttggctgctttcatgggctggcattgagtgtctgtggcttttccagatgcacagtgcgagctgtcagtagatctgtcattctggggtctggaggtggccctctcctcacagctccactaggcgacgcctcagtagagactctgtgtggcggctctgaccccacatttcccttccacgctgccctagcagaggttctccatgagggccccacccctgcagcaaacttctgcctgggcatccaggcatttccatacatcctctgaaatctaggtggaggttcccaaaccccatttcttgacttctctgtacctgcaggcttaacaccatgtggaagctgccaaggcttggggcttgtaccctctgaagccacagcccaagctctacattggtccctttcagccatggctggagcagctgagatgcagggcaccaagtccctaggctgcacagagcacggggatcctgggccctacccaggaaaccatgttttcctcctacaatgggaggggctgccatgaagacctctgacatgccctggagacattttccccattgttttggggattaacattcgactgcttgtaacttatgcaaatttctgcagctagcttgaatttcttctcaaaaaatgggattttcttttctatcacattgtcaggctacaaat

SEQ ID NO: 47351 - DNA, 1044 bp, Homo sapiens; identical to SEQ ID NO: 47350

SEQ ID NO: 47352 - DNA, 1044 bp, Homo sapiens; identical to SEQ ID NO: 47350

SEQ ID NO: 47353 - DNA, 1044 bp, Homo sapiens; identical to SEQ ID NO: 47350

SEQ ID NO: 47354 - DNA, 1032 bp, Homo sapiens
tgatgaattctgttcacagaactaaggatattaggtaggtaaaggtgtttggaataaagtaagggaggagttgatggtggagatgattgattgtattttagagtttgaggtgcttgtggaactcatccaggtcactttgttcagtataaatttgtgagtcagtctttggatatagaggtgataactgaagccacaagaatgaatgagagagagtattgtctgttataatagctactggccacatgtagctatttaaatttaaattaaaatgaaatcagcttggacaacatggtgagaccttgtctctaaacaaaattaacccgtggtggtggtacgcgatgtggtcgcagctgcttgggaggctgacgtgggagaatggctagagcctaggaggttgaggctgcagtcaactgagatcgcaccactacacttaagcctgggcgacaaagcaagacactgttttggaaaaaaaaaaaaaagcattctagccctatttcagatgttcaatagccagatatgaccagtgactaccatatgggacagcacagatatagaacattttcagagttgaagaaagttctgttggatgcactattatttagaaaggagagaaggcccaacttgggatgaagcagaaagaggactgagaggaagaaaatcaagaagagtacacagaagctacaagggaaaggatggccaatagcttaaaaaactacagaaaggtatgagaagacaaggactaaactatgcttgaatttgaaggcaaggggatcattgacaatcttggaccaagtttcttccatgaaggatgaaagacgaaacccaaattgtaaaaatgttctcataggaaatagaggttaaaaggtaactctatttttattgtgtttatttttacctcatttacttttatttatttatttattttgttctcacagcatttataggaggcccttagtaaatatccacgtctgcaacacacagccaagattgggtaggtaaggcagtgatctggggatggaggctacaaaatga

SEQ ID NO: 47355 - DNA, 1032 bp, Homo sapiens; identical to SEQ ID NO: 47354

SEQ ID NO: 47356 - DNA, 1032 bp, Homo sapiens; identical to SEQ ID NO: 47354

SEQ ID NO: 47357 - DNA, 1032 bp, Homo sapiens; identical to SEQ ID NO: 47354

SEQ ID NO: 47358 - DNA, 1061 bp, Homo sapiens
tgttctttacccatggaatgtaatatttttgcaaagatggactacttcacaaatggttataaagtcatatccacttcttccacaatgaccacagcaaatgaccaagcatgaactaaaggtaaagatgtttacagattacttttcttacaaaaaaaatctagaagacactgtgtttaaatagatatttaaatgtttttgagatttagtaactgattttttagacactgcctatcgcatgaactgtaaagctgtgtgtattaggtgtaaaatatttataagatatatggactggggaatttgattattcctccctttgaaaaaatagtcctaataatttgaacaaatatgttagtaatgatggaacagatcaatgaaaagtagatatagatattgtgaaaataggctgtttaacaaacagattggaataaagcctattctaccagttaaactactttaatacacattcatttttaaagaaaatgtttgttttaacataaataaacaaatcgtatcagtgtttgtgaataaaatacaaaaatgattgttaatgattggtgctcttaaagtgagcttaaaatttatccaagacgtatatccaaatttgtcctgtagtaatagattaatattcatagattgttggtgtttaaagatctgaagtgtgagtagaatgtattcagctgtttaacatgtagtttagatattcaaaagtatgcatgtagaatttaaagaatatgttaaaaattattaattttaatattttgtttggaaaagcatgttataatataatgttttcactatatggcctctgttttggtgtgtttatttaccaaattttttgatattggtgtttcagtatatttaatatgtgaaattagtagaaaaagcagatttcggttcagaattcccctttactgttacaaatactgattgaaattatctaaaggcaaaagctttacccaacatttggagtttgcttttttgatcatttggcttctaggtttaatattagttacatggtggctttagtgaacttttttaaaaagctttactcttctacccac

SEQ ID NO: 47359 - DNA, 1024 bp, Homo sapiens
ttcctcctagcctacttggccacaataagtgattgcctctgtcacttttagtggtagaattgtccttgagacaacaggaactgactacagaaatcatactatttcaggggttgctgacatttgaggatgtggctgtgttttttacccaggaggagtgggattatctggacccagctcagagaagcctgtataaagatgtcatgatggagaattatggaaacctggtctcactgggtaagaatctgctgtttctctaattaaaatatctaagaaggtagagagaaatcagactaacagaacatttggacggaaaccagtaccaaaactgctttgttccaaagttctgattcaaaccttttagccattaattgtttccataactctcatccctagcttccttgaggtgaccaaactgcaagcctttcgggcatcctgtcttcataatctcattcccatattgttctgtactttccgtcctggctcatcctcccacagctttcctcccaccccttttcactctgcgttctggaacccctgttcgtcttcacataatgttccttccctcctggccttaactgaaacctggcactatcccaaggacaacgtttctctggcagtttttcaagtgggggctgcttattctcccacatcctcctccttccccatcctttgtctcaatgttggaagggggaagttattgttcactcagcttttaaatgctgtccccaaagcattagttttccaccttcaaacaaaatctctccttctttgaggtctcagcagtcttgctttttccactcaattccttttcactatctgtcaacttttagtttggtccttcacacataactttgtcacatgtttcatagtctattttaactcgtgccatggatgacccagttaatacttcagcctcagtggatcttcagggaccctgctttccacttttactcagcaccttacatcattgatcataccagttttgtcataacaggcaaatcgtaaatcccaataccctattctc

SEQ ID NO: 47360 - DNA, 1086 bp, Homo sapiens
cattgtcaaatgcagtagactcttttgggaccttattttagtctacctctctatgaatatgtgaaactctttattgtttccctccattggcttgcattctcagacttcccctcagtctgtactctttccttgggggaccttacctacactcaggtcatcagctaccgctctgtgaaaataagtcccattttttttttcaagtcatagcctcattctgttgcccaggctggagtgcagtggtgcaatctcagctcactgcagcctccacctcctgggttcaagagattctcctgcctcagcctcctgagtagccgagacaaacaggcatgcaccgccacacccagctaatttttgtatttttagtagagaaggggtttcactgtgttggccgggctggtctcgaactcccgatctcaggtgatccgcccaccttggcctcccaaagtgctgggattacaggcgtgagccaccgtgcgtggcccaaatctttatttccacctaagaaaggtaatgtggagcctaactgcctaggtttaaatccttgttccaccacttacttagcctggtgagtatagtgatttaatctctctttgcctcaatttatttttttataaaatggaaataataatagcacctacctcatagggttattgtgagcattgactgaattaatgtatgtaaaacacttgacacactaacatgtagttaagaacaatataaatgttgacttatattgttgtcatcatcttctctgttgagtttccaattcctagtcatcttttgaagaccacatgagtaattcaaacctggcaagtttcaatccattaaaatcaagggccttctctttctttgttttaccagagctaagcactcctttctttgttttaccttgtatatactcctgctattgaatttatcatactatactacaatcattctatatatgttacttttctaacctcactgattactgtgaggatggtagatatacctgttgcatttgatttctccagcacttagcacagagccaggcctatattatatgcttcttaaatatttatatgactgagtaagtacagttaactt

SEQ ID NO: 47361 - DNA, 1048 bp, Homo sapiens
cttcagccatatcagctgctgatatgtgtgtgtgtgtgtgtgtgtgtgtgttttaatataccatgttgtctctcagtcactgccagcttatccatacatatggtattctggttgatagaaccaagtaagtgcctggccctgccttctcctagaactgcagcatgtaaataccatatggacaaggtgtgacagtgtgcccacagatgatcttctacttgtaggctgtcttctttatttcagcttaaatacagctttccatattcatcatttctcctcccacagtcttttcatcctcctcaataaacactatctccatccctttggtgagagctcccttgatgagagatcactattactctactgttgcaatgcagtattctcttctacatcatcttaactgcttttcataatgcaactcttgtctagctttatagttttggcttttcattcatacttttccttttcaagcttatttttaaaaaaactttaatagctacatcgatgatacagttgatagcttaatttctcagatctttgacatcttcaattttaatgactctttccgcaatgacttgcagattgccaccttattactgtgtcttcacatggcagaaggggagagagatagagcaaacgttctggtctttgttcctctttttataagaacactaatcccatcatgggggcccaaccttcatgacctcatctaaatttaattacttcccaaaggccccgcctccaaatatcatcacattgtggattagggcttcaccatatgaatatttggtgggaacacaaacattcagtctataacactgtcttatctcttttttctccttgacggtttagtcttttctccttatgttcacattcttctgtccttttggcttctggtttgataggttacaattctagctaccttccgaataactagcgatttcagttttaattccaggttctttggcgaaacccactttgagacaactatctgtgtagaaaaattggccatgaccacaggatgggaagatattgcataagcattgccaag

SEQ ID NO: 47362 - DNA, 1050 bp, Homo sapiens
attatctaatatctattccagcaagagatggaaaatcaggaagatgtccgaagcgggcctagatgtactatatgacactctgttatatcatagaccactgtgctgtcttttcttcaacacatgcaagattttcatttctcagatgtcatgcagcctctcagttggaacaagatggtgaaccttgggtcttatattgttagagggtttagaatcacatgtacttgaggtatgatttgtggtaggtaaagtcataagctaccacagactgccctttttggttgttgctcccatgaactctgaccatgtttcttaatacttattttattctgcatctcgatatcatagactctctgtcacctaaccctttattattgtttttaaaagccattttgtctctttatacaggagctgctttttacttaatattttctttatcatattattttctttccccattttttacttaacatccattccatttggcaggggggcttcatgtcttatctctgaatcctggctgattacaatgtttctggagtgcttttgatgggcagtgagtaaatgcttgttaatgaatgaattattgtttcccctggatctttgtcttttatccttcttagcatctttttttatttttatttttatttttttgagattaggtctcactctattgcctaggctggtgtgcagcgacgcaaacacagcttgctgcagcctcaacctgttgggcttaagtgatcaatcctcccacctcagctacctgagtagctgggactacaggtgtgtaccaccatgtctggctaattaaaaaaaaattttttttttgtagagatgaagtctcactgttgcccaggctggtctcaaactcctgagctcaagtgatcctcccacctcactctcccaaaatgctgggattacaggcatgagccactatgcctggccattagcatctggtcccttctgttaattatttggtctgatcatattccaataatgctttctcatccttaattttcttgaacttagtggagttttttttcatcctaccct

SEQ ID NO: 47363 - DNA, 1047 bp, Homo sapiens
gaacttggtgtaataagttctatggatttacctacctgctttgtaaatagtagtgtacattttggtttttaagcttcagaagtgcccctaacatagtatttcagaatatatgatatgagaatatgtgataagagcatatgattcttgctttgttattcaggctggtcttgaactcctggcctcaagtgatcggcctgccttggcttcccaaggtgctaggattacagcgtgagctgctatacctggccaaggatacacagttttaaaatttgacactataggccaggcacggtggctcacacctgtaatcccagcactttgggaggctgaggtgggtggatcacctgaggtcaggagtttgagaccagcctgtccgacatggtgaaaccccatctctactaaaaatacaaaaatcatccgggtgtggtggcatgtgcctgtaatcccagctactctggaggctgaggcaggagaatcggctcgaaccctggaggcagaggttgcagtgagccgagatcgcgccactgtactccagcctgggcgatagagcaagactccgtcttaaaaaaaaaaaaaaaatgacactctagatgctaaattaaagtatagttcttcttccccagataatctgatagtggaggaagcagtgcaggagctgaactctttcctcgcacaggagaatatgaggctacaggaattgacagatcttcttcaggaaaagcatcgcaccatgtctcaggaggtacttaaccaaaaaggagagatggctgtgtctagtgggctgtggcagatgttgacttacaattctgagcacctcaaagattaccttactctagaaggcctatcatatcataggggattttgtaaaacacaacacaactccaaacctccaaataatgaattaccctaaatataaaagactgtatagtgttattgaggaatggcgtggtagaaattccacagggaatggggaagtagaaactactgtattgatgatgtcctaggaatttgaggaatgtcaattttcagtctaaacttgggtgcaaa

SEQ ID NO: 47364 - DNA, 1027 bp, Homo sapiens
gattttgacagcactctctgcattcctctaacctggaaactgcttagtggctcatcaacatggcactgcccatgttgctgtgaagatgcttctctctccctgtttcttgggattcttgagcccccatttcttttaagcttgggcgaccatcttttagggttgaaattgtacttaatttgccacattagctctgttgtgcagttttttgaaaaatttattattaaaacgactcagaaaaatatttttaaaaactaaatgtgagattacccataatccttgtactataaaacaattactttcaatgctccattttctcttctgaacaatgaccatatgcacacatattcttcagagttctaaacataggatataacaagtttgcattatgcttttaaaagaacttattttctaacaaactattttaatatttctaaaaatattattttctaaatattattttatttattaactttagttgcctaatactatcacctattgtttttgttataattgacttgactactcccaaactgtggttgtttaattttttaaatattataatttatggtatatacgacaaatattgctacaataaaaattttgtgtatagtatttttttttctttttttgagatggcgtttcactgtgactcccagggcagaatgtagtggagcgatctcaactcactgcaacctccgcctttctggttcaaatgattctcctgtttctgcctcccaagtagctgggactaaaggcatgtgccaccacgcctggctgatttttgtatttttttaatagagatggggtttcagcatgttgaccaggctggtcttgaactcctgacctcaagcgatccacctgcctcggcctcccaaagtgctgggattaaagacgtgagcctctgcacctggccatgtatagcattttaaaatatttttatttctttgagatatacattgcaatgagtgagattacctggtcaaaggatacaactgttctgatgacttgtgatgtgtaaaatgaccca

SEQ ID NO: 47365 - DNA, 1050 bp, Homo sapiens
atttcaaagactgaaaagagctgtagaagcctgtagaggttcagggacacattccctaaaagggaaaatagacttagggttgcttctcagtcataaaatatgttagagaagggtggaacagtgttttggagaaaaataagttctccctcagtaagaacttttttttcaatttaaaagctgatcacctctgcaactttcaaggagaaaaaaatcaaaaatttttgtagacatattccaaataatcaaggggaaaaccaaaataatgaactcataaaatggggaaattgagatataaaaggactaaatagttacctgttttaaatccattttcacaacaaattacatctaaaatatatggccttacagaagtatacaaagctatgcataccaagaggttcatatgtgactattttaaatcaaaacaacctatttagcactatttctcattctgttattattcatttagatttaactatgtattttataagaacaattgcaccatcgtattgtcttgttttcatatttatcttgaagtctctcattctgaatcgttggaagtttggatatgatctgttctacgttggtttcctcaggtgtgattcttcacatgtgggagtttattttcttcattgctgcatttacgcaggtgaataatatcttacctaggtagaaaattcttatattgcaatcttttttcttaaaagtctgtagaagttgttagctcactaaattctatcttctagtttttcagatgagacatccagtgcttttactccttgctagaaatttctcctttccactggcattgggtagaggtttatctttggagacgttttttttttttttttttttctttttaaccaggatatttatgctgtagtgcatgtctattttagtcaatactgaaattcagtgatgcctttcaatctgaaggctcaaaaatttcttaaactcaaatttttgtttactagttttctaattatttctttcttctgtttgtatataaggtcttctgaatttgttatcagtattagtttccaaaggctgctg

SEQ ID NO: 47366 - DNA, 1022 bp, Homo sapiens
atgtgtctttatagcagcatgatttataatcctttgggtatatacccagtaatgggatcgctgggacaaatgatatttctgattctagatccttgatcgagaatcacactgtcttcgacaatggttgaactaatttacactcccaccaacagtgtaaaagcattcctatttctccacctcctctccagcattttttttttaatgctgccattaaatgaagcattgactttttaaggatcaccattctaactggcatgagatggtatctccctgtggttttgatttgcatttgtttaatgacaactgatgatgagattttattcatatgtttgttatctgcataaatgtcttcttttgagaagtgtctgttcatatccttcgcccactttttgatggggttattttcttcttgtaaatttgtttaagttctttgtagattctggatattagccctttgtcagatggatagattgcaaaaattttctcccattctgtaggttgcctgttcactctgatatagtttcttttgctgtgcagatactccttagtttaattagatctcatttgtcaattttgtcatttgttgtcattgcttttggtgttttagtcatgaattctttgcccatgcctatgtcctgaatggtattgcctagattttcttctagagtttttatggtgctaagtcttacatttaagtctttaatccatcttgagttaatttttgtagaaagtgtaaggaagtggtccagtttctgttttctgcatgtggctagtcagttttcccaacaccatttattaaatagggtatcctttccccattgcttctttgtttcagatttgtctaaggtcagatgcttgtagatgtgtggtgttatttctgaggcctctgttctgttcatttggtctatatatctgttttgataccagtaccatgctgttttggttactctagccttgtagtatagtttgaagtcaggtagcttgatgcttccagctttgttctttttgctcaggattgtctt

SEQ ID NO: 47367 - DNA, 1039 bp, Homo sapiens
agcaagaagttggagaatatgagatacatctcatctctagtaaatacttaaatgacttcccctcctcccggagtcaagcacaattcggggatgcaatgacggacgtaggtgaagacactgcgggaacttacagacaagtaatgaccgtctaatatcagctttaagtaccatgaaggaaaaagaaagccgagtgaaggattgtggagaggtgacatagggaggtcagggaggactccagtaaggtgacatttgagcaaagacgtgagtgcagtagagagtaagctatgtcagtatcagagaaaagcacattataggcaaagataatgggatatgtaataatccatagtctttgtttaggtagagtatgataaaagtagaaggcaagcctggaaaaacgggtagaagaaatagttaagacttcccagttgaatggtttaatttccagatagtggctaactctggtatatttttgagtagatgaacgatgtctttacatcagacaagatagtttgtcaagtggctgttttatttctatcaccctatcgttgctgtttttgcctcgtgttcattatgattccaggtttacattccacttaggtggtggtatttctgtttcgtacagaactggtttgtggcctgtttgattcctgtcagaggtttgctgacccaagacagtatcgaaaatgcatattaagtcaattattctagagggattcaagtcctatgctcagaggaccgaagtcaatggttttgaccccctcttcaatgctatcactggcttaaatggtagtgggaaatccaacatattggactccatctgctttttgctgggcatctccaacctgtctcaggtaaagtgtaaactttctgatttatttgaatttaagttggcaggagaatcctcactgaactttggagacgtcccgatattctcttcatttgtgtttttatactttttgtaaattacacctcactgcaaccttttaaggaaagtaatattactcctttagatgagaaaatagaaacttagagatgttta

SEQ ID NO: 47368 - DNA, 1075 bp, Homo sapiens
ttacaactggaccaaatggtcaaaaatccttgccttgtggaccttcattccattgggggaaatgataataaagaaaataaataaaacatgtaacatgttatagagtgataactgatgtggagaaaaagcagggaaggggattaggagtgtaggggaaaaagagtacaatttgggattttaagttggatagccactgaagtaagtggagaataggaagaacgggtttgataagcttaagaaatacagtatgaatataataggcttgaggagcctgttagacatcttgagtagtgatgttgattaggtacttaactatatgaatattgaatccaggcaaaaatacagatttggaggcatcatcaatgtataggtgttatttaaatccatgagactagataaaatgatcaaggctgtaagttcatataagaaggttggagccctgggatactttcaacgtttgaatgttaggatagttcaacattcaaaagagattgagtagtgtgaggaaaattaggccagtaaattgtcctggagtccaggtaaaaaagatgtttcaaggagaagtggccatgagtacctgattagattgtgttcatactctcacagaatgaaggcagaaaaaagaaaagtgaatatagataactttttgagaagttttctgaaagagggataaatagggaggtaactggagggtaatacagaagagagtttttggcttgatttgacatgggataaataaattctatattgacagaaaagatccagtagaaaagtcgtcatttgtgattcaggagagagagatgggagagttgttaaaatagggccccttagtagctgcaagtaggataggaactagtgtatagaggaggtcgccttcgcgagaactaggaataggtcatccatggtaacagaagagtcaagtatatagtctcacatgtaggtagatgagtaggtgtgtttttggagcttatggcatttcttttgagggtgattctgttgtcccagtgaaggtatacatttgccttttcactgaaaaaaaattaactttgtgaaaataatttctttatactgccct

SEQ ID NO: 47369 - DNA, 1050 bp, Homo sapiens
tttaggataaaggatactcaatctgtactataattaaagttgtgtccagtcaacgttggtgaaggacacttagaaacatggtaatggctccttattgatagaaactttcataatgctccatactagctattaataaatattttacttagcaataaatctttcagtatttaaacctgcagtttttttttcctgaaactttgagttttacatagctttttagaaaattcagaaagagttttaatgctaggtaagtattatttaagtttctattacagcagtttttactggtttataaaatcatatctgaaaggaaaagtagtagtatgtactgtggcatatctgttgttgtcccacaggttggccctgacaacgttcatgtggctctttccttggttgaatataaaccagaacttcagaaagcaatggagtttgtctttggaacaacatttgtttgtgacaatatggataatgccaaaaaagtggcctttgataagaggataatgactagaactgtaactctcggaggtgatgtgtttgatcctcatgggacattgagtggaggtaagttttatatccttttctcctcacaattctttgtggtaaataggaagatgccttttttaagtacatttttagcccaactacccacttcttcaggaaacatgttaacttctcatttgtgtgtttgccagtgccacctacctcctgtcaaaagtaaaacaaaaaattaaacctgcccttgaaatggtaccttaatgccttaaaggaattcttagacagtgatcatattcttcttggtctagtatttgccacactgagtttgcagatctttgtcaagacaatagaataacaaacactgaataatatttactgtataccagacagtgttctacactatgctgtccaatacagtagccactagccatatgtgactttttacatttaattaagttaaaagtaatttccttggttgcattagtcacatttcaagagcccataatcacaaatggttaatggataattcgacaatgcagatatagaacatgtcta

SEQ ID NO: 47370 - DNA, 1030 bp, Homo sapiens
agaccatatccatggaattaatacaagtcaataaattaacaaggattggattctgccagtgagaatgaatcataattctagtagaagaaagtcttctttaggcactataatttgaactgtataatcagttgtattacatgaaaaattattatacagtgcctttttcaatatactgtgcctttttcaaaaggtggggagcaggatagagtcaatgtttagggcagtttcttagaatatatttctgagagaaaaattattaggtctcagtcagcattaggcttccatgatttttaccaaatctatgacttaagtattaaaagagttttagcttctcataagttgtgttttgaagcaatagattgaatttggtaaattctgaaggagttctacctgacttacatttcattctaatggaggtgctttgcgtatacttcgtaaaaatttctctgtgagttggctcttctaatgccaaagtaataggaagatcttttgctatacagtgtcttgtttctgtagtctgtgttccaggtaaaaatattcatctttattcttgtcagtaatgaaactcatttttaaaaatgagtcgcctaggcacggtggctcacgcctgtaatcccagcactttgggaggccgaggttggcagatcacctgaggtcgggagttccagatcagcctgaccaacatggagaaaccccgtctctactaaaaatacaaaattagctgggcgtggtggtacatacctgtgatcccagttactcaggaggctgaggcagcagaatcacttgaacctgggaggtgtaagttgcggtcagccaagatcgcgccattgcactccagcttgggcaacaagagtgaaactccatctcaaaaaaaaaaaaaaaattagtcattgaaggttttttcctcttcagtatttgattcaaaagtattaaatagttaagaaactggcttatacatattggtttgtaaacattcatagatctcccatctatttttatatgtggctaggtatccaaaatgttgaaagat

SEQ ID NO: 47371 - DNA, 1341 bp, Homo sapiens
tataaacaggaaagggaattggttgatgtgaaacccatttagatttgttaactggctctaatgccaaggtaggctcttaccctcccacagagactgggactctaccttcaagtgttggttggaagaaacagtaaactcagcaaccttgagttttctcaggagttgactttcaggaggaggatagtcaacctatggatgtggctttgagctgttagaaactgctagtgtttttttcagatctttacaggcaaaggtttatttagacgtagaaagggctcagaagaacctggctagaacttcatcaaagagaatctttgtgaaaaagacaagcagtttgcagtttaccataataaaattaaattgtgatttgaactgccacctgcaagaccgttctccaggtgaccttggactgacccacttctccccacttctcactagttgtcaaaaagaacagccttgctatctggtcaggtgaatgacaaccaagtggaaaaagatctgtgtggttacaaggagtatggcaaaaggttgctaactggcaaggacaaatacatgtcacctgtggatgctgggaataccatagccaccttttagggaaacttaaattatgtttttggataccctgtaaaactttgctctgacaaggaacctcctttactgcccaaggaacatgacagcaggcacactcatggaatacaatgggttttccatgcaccctgtcatcctcagtccaatagagctgttgaacaatggaaagccagctcacaatgagtgaaggaaggacaccaagatagcctacaagtggggtggtaccaccccatccgaatatggcagtatggacactgagcactgccctccagggcaagggaaccacatgattgcagcacatgttgagaagcactgagcttggaggaggtacaggtggaccagatgacggcctctgcctgtgaaatccaaattccagtgttcccagccattttctctttttagagtgcacatcctgtgggtggtttgcagttcaggctgccacagtaccccaaaaggcccccctaactcttaatctggagtcagcgtttccctcaggtgcactccctgtgggatccctcaagggtggaaacaggaccaagaaataccaggatgctagagtccctctgatagtgccagggacatctgatccttccatttggctgggcaatgttgtcagacatgtcatcattcaagaagtgacttcccttcctggactggatggctgaggctgaaatgtctgaggcatttcaagggtagtaccacaggatatggtaatgtttatagtatacagtgtgatgttttgatatttgtata

SEQ ID NO: 47372 - DNA, 1050 bp, Homo sapiens
ttggtctcagctactcaggaggctgaggtgggaggaagatctcttgagtctgggaggttgaggctgcattgagctatgatcgtgcctgtattccggcctgggtggcagagccagaccctgtctttatttttttttgagacagagtctcgctctgttgcccaggctggagtgcagtgacacaatctcagctcactgcaatctccgcctcccgggtttaagcgattctcctgcctcagcctccaagtagcttggactacaggtacccgccaccacacctggctaattttatgtatttttagtagagatgaggtttctatgttggccaggctggtctcgaactcctgaccttgtgatctgcctgcctcggcctcccaaagtgctgggattataggcgtgagccactgtgcctggctgagaccctgtcttaaacaaagaaacaaacaaataataataataaaaaaaacccttaaatccaaatagctaaaacattaaggaaaattgattatctcctataggtcaaggggtagggtagctttcaggttggttagttcagtggcttgatgtcagcaaggacgtaagttctctccttgtttcttttttgtcattttacggaaggtagctttttcttaattagctcccctcaagatcccaagatggctatggctcttcttaccgtcttttgctgagctgacaatctccagtggttttcctttcatgggaattagagagggctgcacacttatccctaaacaagctctaacaagaggaaggcaaaggactctgcaattgatttagagtaaccaggacttccctctgagtcaagtgaggggcagggcaacaccggaacaaaaggaggactttgccagcaaggtggcggcagggatgcaggattgggcgtggtgactgggtaggcagccaatactatctgctatggttttgccattttcttttgtctttaaatcagacttctatagtgtttcctaacattttacttatagccccattatgaacttcacagttcgtagttcaaagtcacacagttagttatct

SEQ ID NO: 47373 - DNA, 1090 bp, Homo sapiens
gtagactatccaaatctctttcattgatctgagttctattttaacgatcttcttttttttttgagacggagtttcgctcttgttgcccaggctggaatgcagtggcgcgatctctgctcactgcaacctccacctcctgggttcaagcaattctgcctcagcctcccgagcagctgggattacaggcaagcaccaccacgcccagctaattttttgtatttagtagagacaaggtttcaccaagttaatcaggctggtctcgaactccaacctcaggtgatccgcccgccttggcctccaaagtgctgggattacaggcgggtgccaccgtacctggccaacaattttcttaaagtggggtatgcaaaaagcaactcactaaagtagatataggtagtcctttcttctggattcttaatgttgccttatgttgaattcgctttttcaacaacttcacttacgttaccttgccgttcaccaaaagctcttaagaaagccagctttcccttttgtgctcttgtttcttgtagaattttaaaaacataagtatgaagttggaattttccccaagaaatttaaagctgttgatttttgcccagctttatagactgtcatgagcttttatttttattatccagtgtatgtgctcttcctttcccaggtttctattatctgattaatattaataaatttatgtctgcatattaatttagggaacacctcctaattgtggcattcactatagggtggcctggctggcctgtttgcttgagaaacccctaatggcaatatcttttggccttgatattatttatcattttgtttttatttttaaacatttcctttcagatcctctctttagacactctttttaactggtcacctcttttctcaagaccattctggcagtttcctatacagctgacctgtactttagtccatttcctcccatgttatcccctgaaatattactagagttaggattaataaattttaataaaattcaggtatatcatgtatttcccaatctccattcttctatcaaaaaaggacaagactttagccaggaatggcttactcaggtgcatgt

SEQ ID NO: 47374 - DNA, 1035 bp, Homo sapiens
cagtctgtatgtttatcaaaacatcatgttgtacaccttagatatatatactttttactactcaattatacctcagtaaagctaggtggaaaatttaagctataaaaaaggcatttcagtttttctcattgtattgtcatttgaaagttactattaatttgtttcttacacaattgtctataaaactgtgtactcattcgttgcttctggttgtatttcccttacaactagtttttcagttttcaaacacacattttataatatgtacagtatgggaacaacttaaagatgtttgagatgaatatttgtgggaactcactttttttaatgcttcatagggaagattttcctgtatcccactaggaaaggacataacaatgatttagggcttagtcctaggaacttaaaatcatttatcctgaaaacaatgcatgctatagagtagttgtccttaccttgcaggtggggaggtcagttcagctgatcatctactgtttagaagactagctagaattcaagcccaggtttgtgttcctttccctctccatacctgtttacctctctaaattgccagttttcctgcattcttcaggagaaatcttgctcctacctgggtcattctcagcatacagctttctaaggaaatttgaagtgttctaatctcccatcaataagtgttaggttaaatgacttaaacattttctggtggttttgatatataggtgatataatgaggaagtagaaaaagcataatctggataaatgggagcatatattatatataatgtatgttatttctttcataattaaatagcattaatggaaatcagaatgggaaaaatgcattataaatcaaattacttaaaaattgcatcatccctttctaatgcttacatatttgcatattctcctttgcatatttgtataatcagagcatagatgcaatttcaaaccatgtttctaacacaactgtttattataatcatttttatatgttactatacagtcttcatagttatttttatgactttaata

SEQ ID NO: 47375 - DNA, 1022 bp, Homo sapiens
cattgtacaaagaccattctgatggttatatgcagaatggagatgagaaacactttacagtattttaactgacacagtaggaggtcatgaaggtctgagataacataggaaggtctaatgtcaggatgtagtatctcttgaatggtataggaaaacagtagataaaaaaatgtaggataacttgtatgtttcacggatgttggaaccattagccaggacagaaaatataaaatcagaaagtacctggtggaactaatttttctccaaagatgttctttttgaggtatctgtagaacgtatgttttttggcccaggagtttattgaatacttgcccaattatgagtattagcaatggcacaaaggaagcatggcagcttaaggggcaaagaattccacttctaaatatgccagtgattgtgtttaaggccttggaaatattactttttttttcatctgtaatgtttggagtgtggtgatggaaacatacctcttaggggagttgatataactgatactgagctaaagaataataaattaagactaaataattgactattatacagcatttgaaaaattgtagtagttaaacattttgggggccatagcaaccatttaccatgataaatgtttatacactaaagttaggttcctaagatcactcattttggtagtctttgagtaacatcggctgagttgcatggattgcctctggtgtgctttagataagcttttgttcttagttttctacttttcattactcatgtataacttttacctgcttttgcattagaaggaaaactttgtcttactggttatatccaaacctcttgtgctaagtattttttatactttcactgaaaaaaaaaaaaaaaacacatactaccttcaaaatgttaactgaaaatgccttagctaatgaacatgaaaagaaaaacagttgtaaaatgtttgctgttactgcattgttttaatgttcttcattgaggcttctctgttcatcaaccctttgagcaggaagcag

SEQ ID NO: 47376 - DNA, 1065 bp, Homo sapiens
tcccattactgtgtgctaactttgatcatttggctaaggtggatcttcctggtctctccaatgtaaatgtactgtttctccctttgtaattaataagtatcttgtggagacatattttgagactatgtaaaagtcctatttctcatcaacttttcacattatctattcacattcttctctgaaacagctattactggtgttttcatataatgatgattttctaatttcatcattcttcctatatttattagctggtgttctactgtaaggaaaatctcttctcacccacttagtttttcatcaaataaatatttattcatcaaataatatatatgttaaataacgttttaattagtcatcaaatacatatttatttgttgaataaatattgattattcatcaaataaataaatatcaaatcccagattgttacttttttctgttatcctcatttatttttatgcccacattgtctcagatttagccaatgggagcccattcaagctggctcctgtacttttgatctgtccccatcattctttgagtacttccttattcactgacgcaaccagatgttccaagctcatcttatgctttcctggtttcaactctgtaatcagccaagtcttcaagtgagccctagttccttttaatggaaactggtatttggaaaccaaggtctgggcacaatatgtgcttttgtggtagctatttgataatagcgaccacatgatatacagcaggagaaaggaaatgactgcattactttttttttttgagatggagtctcactctgtcacccaggctggagtgcagtggcgccatctcagctcactgcaacctccgccccctgggttctagcgattctcctgcctcagcctcccgagtagctaggattacagacacctgccaccacgcccggctaatttttttgtatttttagtagagaccggttttcaccatgttggccaggctgatctcgaactcctgcctcagatgatccacccgcctcggcctcccaaagttctaggattacaggcatgagtcaccacgccctgcctactc

SEQ ID NO: 47377 - DNA, 1024 bp, Homo sapiens
agtgtgtgtctttagggtcatcaacaaatatgtttaaaaagtgtttctgtgtttctgtctatgagctgcttgggaaagcatcatcactttatgcacatgagcactgtaattgtgtaacttcttattgcagataaatgcccccactgcttaatttaagtaactgaatgttttattacaacatggaaatgtagatccttacttaagggatatgtttagtataaaaatgtaaaaagtagagcaagaagcctgctaatgttttaacttagatcctggtgtttaagtgattgtaaattgtaaattgtaattttttttttaagtagggtcattttaaatgattaccattttgtcaaatcaaaactcagaaatgtagaatatattttaaaatgatgtgaaaagatttggaaattaagctatataattagcaaaaattactgtgtagttatcaagataaaatttgagtttgatgttatttacttcacctttgtggagtatgtagtgagctgcattgtgttagaaaggtagctttataactgatttatgcctagtgattgttttcattttatgattttctgtgaacttgaaggtagaaaaaacttccttgagaaggtaacatttgccaccttacatctttggatattaaaattgaactttaattgatttcttcttttaaacacatgaatcaaaacaaaagttcttttgctgtaagccaatgcatgaattaattctttaaatttggaggtgagttgtaaagaagcttactaatgcacataggtggacttattatataaaggaattacaagggaaatgtactatatttaaaagtactttaaaagtatgatatgttggccaggtatggtggctcatgcctgtaatcccagcactatgggaagccaaggtgggtggtttgcttgagcccaggagtttgaggccagcttgggcaacatgatgagatcctgcctgtacaaaatacacaaaaaaattagccgggcatggtgatgtgcacctgtagtcccagctactcgaa

SEQ ID NO: 47378 - DNA, 1003 bp, Homo sapiens
tcagtatttgtgggggactggttctagcaccttcgttgaattaccaaaatccacagatgctcaagtccctaaaaaatggttatttgcatgtaacctatgcacatcctcccatatactttaagtcatctctagattacttataatacctaatacaatgtaaccactatgtcaatagttgttatactgtagttttaaacttttttattgttgtattgttatttttattttttccgaatattttttgatccaaggctgattgaatccgtggatacagagggccaactttgctttgttttttagaacagggttatatttgtggagaattgagcatgataatacagaaagttaccataaacccactacctcctccatatacaatttcccctgttattactattctgcattagtggggtacatttgatataactgatgaatcaacagtgatacattattagctaaagttcatattttatattagcatttactctttgtgttaaacagttctgtgggttctgataaatgtatagtgtcttatatctaccattatattaccatatagaataatttcactgccctaaagttcctttctgttccgcttattcatctcttatatcctgcaacccttctgtgatcacttgttagttccaggaattttattctttgttgtttttttgttgttgttgttttgttctttttgagacggagtctcgctctgttgcccaggctggagtgtagtggcacgatctcggctcactgcaatctctgcctcctgggttcaagcaattcttctgcctcagcctcatgagtagctgggattactggcgcatgccaccacacctggctaatttttgtgtttttagtagagacggggtttcactatgttggtcaggctggtctcgaactcctgacctcgtgatctgcctgccttggcctcccaaagtgctgggattacaggtgtgagccactgcgcctggcctgttttttgaattttctacataggcag

SEQ ID NO: 47379 - DNA, 1037 bp, Homo sapiens
tactgaactttctcctgaactctttgagagtccaaatatccagttctttgtgttaataatacaaccttagtgtcctgtatccagatcagatcagaagagaatatgcctggaggaggtttatctgctggccttgcatcagccaattcaaatgtcagaatcatagtacgtgatctctctggaaaatattcatgggattctgctatactgtatggcccacctcctgtaagtggcttgtcagaacctacatctttcatgctttcattgtctcaccaagagaagccagaagagcctccgacatctaatgaatgcttagaagatataaccgtaaaagatggactttccagtttaaaagatttagagaaactgtaccaacttgggatacaataagagatgaagaagatgctcttgatgaactcttgcagtatttgggtgttactagtcctgaatgcttacagagaactggaatctcacttaatattcctgctccacaacctgtgtgcatttctgaaaaacaagaaagtgatgttattaatgctatccttaagcaacatacagaagaaaaagaatttgttgagaagcactttaatgacttaaacatgaaagctgtggaacaagatgaaccaatacctcaaaaacctcagtcagcattttattattgcagattgcttcttagtatattgggaatgaattcctgggacaaacggaggagctttcatctcctgaagaaaaatgaaaagctacttagagaacttaggaacttggattcaaggcagtgccgagagacacacaagattgcagtattttatgttgctgaaggacaagaagacaaacactccattctcaccaatacaggaggaagtcaagcatatgaagattttgtagctggtcttggtttggaggtaaatcttacaaaccattgtggttttatgggaggactacaaaaaaacaaaagcactggattgaccactccatattttgctacctctacagtagaagtaatatttcacatgtcaacaagaatgccttctgattctgat

SEQ ID NO: 47380 - DNA, 1046 bp, Homo sapiens
aagctacagagcattgttgtagtggtgagggccctctgttgcaggggcatggggaaatgcatatattaatcaggggctggaggagtatacatgattcttgtgttcatgttgtcatttgaaactcttcacataaaattttctaatattcatttggaaaacctctccactggagaggtttcatctctgagaggttttgtaataatagtgtaagttcagtaaatccagtccaaattctcatcacatgtattatttgatactaaattttcaattattacttcaaaataagagtctgaggatttcttcttactggcgttcttaaaggtctctaaaattaaagaacaagatgtggttttttgtttaagacgtttttagtttatttgttgttaagttaaactggagaaagtttgtcatcctcattttcaaactgaaaactaatcaaatatagtgcctatttagtctcaaaataaggtaactattaacttgattatactatataatattctcaattacatttgaatttaaaaatattgagctcttgattacaatttaatacattgtaaaaagtattaaatcctttgaaacatcttttgttgcttatttagtttttgtttctacaggtcaaacatgattgctttctataaaagaaatgcttgagaggttgactataatggatatgtcacaggtataaaacagttgttttctaaaaacatgcatttagtatggcattctcttttagcaactgaattcccaacgagttttattaagctggatatcgaaatgaaggagctgccttaagcactttagaaaaagaatttttttacaattcattttgactctcatggctgaccatgtcattatgtctttaaattttggtaaatatgtagataccaagcattaataactaatgcacacagaaatttaatatacagcaattctttgaatgttccaggtgtacgtaaactaactgaaagtattaaggacatgcctgtctatacatgggtttcattgatggtatctgtatcatcttgacaaatcgtgaactgctg

SEQ ID NO: 47381 - DNA, 1030 bp, Homo sapiens
gcaagatggtgaggacgccctcccccccacccccgccacaccccgccctgctagcccccaacgtctctacaaaaaaagaaaagaaaaaagttaatcaggtacaaaattgtatccagccttaaactggagggcaacaggtcgctaaatcttgaatgtcataaaggcacctcaacttcatgaggaatagtgaacgcagctgctattttccactctatcccctagctctactaattgtatccaaaccaaacttcagggagttatgctgaatccctctagcaaagcacacgcactaaaaaaaccactcgtttatcagaagttcacatttaacgggcttggaaaacggctcagctgctgcctccagttcatcttccgctgtcgaaagcgtttcagaacttaaactctcagattgcctcagtgcgctgctgtagttgtcaattaggcaagagataaaaaagggctttggctaagtggctagattataaaagcgaggaatcgccagggctcagtgaacttctggcggtgaggatgcgacaagagtcacaggaaagccgaggctggggctggaccgtgggaacgtcccagcaggaaccaagccagcctccgccgctcagcacttgacggcggcttttgcggcggttgctgtgagtgccgtaaagcggagcggctgcagcctgctgttgagtgaggtaaggtacgggaggctcaggtcggtacccggggatgggtgggcgccttcagacaggtaccgctggcgactcgggtgcccttaccgggcatcctccagcattctgggcacctgcctaccccttggtgaggaggccggccacaggctgagcgcgctccgggctgggtactcctcagtcagtccacgagcatcgcgtggtagacttccacttggccagtccttcccgcacttctgggcgtgtcatcaggtgaaatcttaatcctgggacagatgaaaggttggaggacgatcgagactcttgtagtagccgggttagggtagtgacccctgacctcaggttatccg

SEQ ID NO: 47382 - DNA, 1050 bp, Homo sapiens
ggccatgttccttgactaaaaacggtctcagtttctcctttggaagtggttctcagcattgtcagcagcaccagcatcatttgggaacttgtcagaaatgaaaattctgaggtctcataccggatttactgaatcagaaactggaggagaaaagcacctctcaaccttgttggtcagtttttataaatatcctatttatgttttcagttatttacagttataaaaaaaagtgataataaacatttttgttttttcatcattggtctcatatttgattatttctttagcatagacaatgaccagatcaaagaatgcctgtggaaatttaattttttctttgttctattgttggttattacaggtacaaaattaaagaggtttttgtttctttaaaaatatcttttttgttcacagaaaacaaaattatcttcctttccaaatccaaaaagatgaaaacgactgagatactttcaaaagacaaccaagtgagcagcacagactaatgagtagaatcaataagaacgtggttttggcccttttaacgctgacaagttctgcatttctgctgtttcagttgtactactacaagcactatttatcaacaaaggtaattttattccttctttcttatcattcctcctttcttatcattgtatattttctgatcacacttctctttgcaatacataatattaatcatgggtattcaaattcttgcatctttgcgaggtgtggcaaacaattaaaaattcagttaaatatacttgtaatagcacactaaagacaggtgctaagtttcaaggatgtttaatctattggaatttcctgagctagttatttaaaaattattattttgttaaacagattatccttcatttaaatgaactcaatgataaataattttgataaaatgtcaaaattagtttattttagtacagcatatattttaatttagtacctactggggaagtataatggtatgacttacctttatctgtatgtataggaataaagtagagacaatgatgtggaaatcaatagcttctgaag

SEQ ID NO: 47383 - DNA, 1049 bp, Homo sapiens
aaatcacccgtcttctgcgtcgctcatgctgggagctgtagaccggagctgttcctattcggccatcttggctcctacccgaaacttttctttttttaagagaggatctcgcttcgtcacccaggctgaagtacagtggcataatcatagctcactgtaaccttgaatctggggctcaagcagtactcctgcctcaatctcctgagttgttaggaggactacaggcacatgccatcacgcctgactaattaaaaaaaattttttgtagagacggggtctcgctgtgttgcccaggctggtcttgaactcctggcctcaggcagttctgtcacctcaggctcccaaagtgctgggattacaagtatgggctactgcaactggcctggaaaaccaaaattgttaacagagatgtgaaataatttacccatacaaaccacccaatatctaatgtgtatagctgacctctaatgtccctagctccattttttccaggctatataattttaaaaataacagactatactgattctacttttgatcttggctgtttatccaatgaatgtctttctgtgacatcttcaaccctttcctcattattttcttaggataaagtcctagagtagaaattctagatctaatatgcacattttagatttttgttatatattacaaagttatccttcataaggataagcagtatacctgatttctcatatcttttcataaataggaataacaataataatggcatctgtttcagttagagatggctggctaatagtagcttaaacaaatagaggaattatctgtccatatctataagtctagagcctctaaaattctcttggtatttcctgtgttacagtcaaggctagaaggaataatagtgtgatctagcaggcttctagttttgtgacagtggccagcagattcccaaatataagagaatctggggaagtaaggttttactattgttatttagcttttctagcctctataatagagattgcaaaagagaaggggtttgggaatgggtgtcaggtcagctt

SEQ ID NO: 47384 - DNA, 1632 bp, Homo sapiens
tttaaaactaaatttagaaagaaaaacattgctgggttactaataaaacacaacatttattctgttagcatacattatgggaatgaccagatatttcttgatacacttcaatctttggcttctctataactagagatgtggaacactttaaattagaagtggattttcagatcaccaagcagtggtcattttagatcattgctaacaccaagtagattttgaactactgtttaaaagtaaagtctgggatatcctattatcaggctccccagctctctagtctataagtgtcaatgtaaacttttaatttattaaaaatagcaattgttttgctctgtgaatttagggtattctgaggataaaggtaagcatgatatacttggaagttatactacccagtcacagttataaagattttagattaaattaaaaagaggtattttgtatgcttctctgtaacacttctctacctccatcccacccttaggaaacacatacacctaatacttggacctgatttatcatcttgtggttgaagtaatttgctgagatttaaaattcagtattttaacagccaaaggcaacaggggtgatctttcatacattttaacattataagatgtgatgatacttagagaaacatatatttttcagatttgccatttattaggagtcttcatctgtacactgtaaagcaatttcagcaaaaaatttaaagccgtagtagcttcagttggataaaaggttttcctttatcggtattaaccaacaacattctgacaacattcccaaaccttttagtaaatagagagagcagtcagagaaagtacaggttcactgatacattttaaaatggaatttgtgaaaaatttaaagcttaaaataatagaaaaaagtagcgtgactctatccttttcattcaagaaatgatccttgaggtgggagaaaataatggatttttttcaaagtctttacttccacggtacgcaagcaaaaagttgaagagcagcttaccacattcagtgagttctctttatactcttttacattgaggggactaaaaaaaattgtaaatgtggtcactgaatgactatatttgcaaaatcacaggaaaggagaagtactaacatacttctaaacttttagaaggaataaaaggtgaaatctcatcaatagtgtgatattgagccctggtaaaattctagggctcaatgtttatggagttattaaacagatgacttgggagcacttagaaaagaaaatgatcataattaggaactaggcttttactaagaacaagtcctgccaagactttttaggttttaataaaattttaatacacaggcagatgaatgggctattatggtctcagcataatctcttttcaacaagatgtttttcagtcttataaacaaaatgagttactgaaggtcagatgataatagtgatttagaattaattggatttagaatcaactggacacgtttccaaggagcgttaatgattgtattgataacaacttggaggatgtgtttagaaggtgagttatagaatctctgcttgaccctgacctaatctgtatttatattaataatggtaatgaagctataagtgtgttcatcatatttgtat

SEQ ID NO: 47385 - DNA, 1213 bp, Homo sapiens
aagtatataactgtcaagtgcccaagacccacaaatctgaggtttctctaatacagtgtactggcacctaaagctgaggcctgacagcccaagtgggccttcgtagccctatttccttaagtcattgtggagctgtgaaatttatgcagccagcctcatgaataaaaagctgaaaaaccacatgtgtggatgggcctactctagtagaaaagtgctgcctgacatatgcctaccacataataacaggaagtagaagagatggagttttgtgcttaaacttgaccgctcttcctgtcctaagggagtttgctgtggttgtcatctctattatagcaattatcacagtgaattatgaatatctgtcttgtcctcttatcaaattttatgaacttcttgataacaggagtgttcttttatttacctgtgttggcccagtatctactgtacctggcataaagaaaagatccagtagggtcagttttcaaattaaagtgaacatacatgtatttgaacacttgatggcgccaaacagtcttaaatgtaatgcttggtgtaaagcaataaattaatctaatagacctcatcaagcagccgcctttctttttttaaaataatttttaaaaagcaattttaaatacataaaagctgcaagtacagtaccgataacttttttttttctgaaccacttgggagtaagatgttgaccacaacttcaaaaaatttagtatttttttaaaaataggaacattctctacatgtcctaatatgaaagttaggaaattagcacatacatttttaccatttaatccctattcaatttttgtcagttgtcccaataataacctttgtaataaaaagattcgattcagaatcacatgttgtcttaattttcctgtctctttagtcttcttcagtctgggacagtttctcagttcttttattactttcatgactaatactttggaagattacaagccagatgttttgtgcagtgtccctcatttggggtttgtccgggggttcctcatgttagatttaggttatacttctttagaaggtatagaagtggtgctgtgttctcattacatctcactgggcactgcataattttgatttatcccattactgttgatattcacattgttcacctgattaaagtgctgtctgaaacttcgtatctttaccactatgaagtttctgtttttccctttat

SEQ ID NO: 47386 - DNA, 1048 bp, Homo sapiens
aaccatgattactcatttcttatgtatcctttccgagacaaacatatgctcgtatacatatagtatttacgttcatctctccccctttacacaaatagtattatggcatattacacactgtctgtatgttcttttcctcacatagctatgtatcttggaaaatgttccaaatgagtatgtatagaaatagctgcattttattccattgtatggcaataccataatttattcaaccaattccctattgatgaatatttaggctgtttccagtagtttactgtgaccctcagttctgcagtcactatctctgtccatatgtctttatgcacacgtgtgaaaccctgtgcaggataaagtattagactcaaattttggggctaaagggaatataagcatatttcaattttgatagatattgccaaattgccctccaaagatgtttccccaatttatattctcaaccacatggtttgagaatatgggtttattttttaaaagtgcactatctgtaaagagaggtaaacttgctcaatatttgccactaatcagtaacttatcaattacttgtaatcagtaactaaatctaccatacaccaaatataattgggagcacattagaattactgttcaaactagtcagtataatgtatcatctcaccttctccaaaggtctttttgtctttataataacctattttttattttatatatagttcattctgagaaaagcttaataatatagaatgcttactattttttaaaaggcagaagaggaactcaagaaggaagaaaaaagattttctttctaaactactctgcaggactatagaatgatatctttggtcctaagatttaacagtatattaagagtaataaaaaagataaagcttccaggatatctgctacctatcaggcactgtgataggtagttcatatatatatttatatatataatctggttaatcctcatactatccctgtgggttcggtattctcacctccagttagacattaggaaactaaagctcagagtgaagtaacttactcg

SEQ ID NO: 47387 - DNA, 1103 bp, Homo sapiens
ttttttaagagaagattgcctccagatgaataagcagtaaatctttcatttatgtgaagtaagttatgttttttaaaactgtcgaatagtttgttgtttgaacataattctataagatattatataggatagtattctaagagaaataaaagcatattttcagtaaaagacttgtacacagatgtttatagcagtcttactcatactagcaagaaatggaagcaacccaaatgcccatcttctggtgactagttataaaattatgatatattcaaacaatggactaccactgaacaatgaatagcaatgaactactgataaatgcaataacatggatgaatttctaaaacatgatgctaagtgaaagaagtcagataggaagagtatatactgtgtacttgctgttatttgaaattgcacaggaaaaaccaaccaacagtgtaataagattagtggttgcctaggaccagggtgggttgattgcttgactgacaaggggcacagggaactttggacgaggggttggtagaaatgttctatatcttgattattgtggttacacaggtatatacatttatcaaaactcatcacttaagatagatgcatttcattatacttaacttatacctcaaaagaagttaccttaaaagtttaagactgggcacagtaacccatcagcatttggggaagacccggtgagaggatcacttgagcccaggagttcaagataagcctgggcaacatagggagaccccatgtctacaaaaaaataaaaactaaacttaaaaaaggttaaaaagataaaaaacagtttgtgacttagaaaactgatgctaagagaaaaagggtctgagatcacaggttgaaacagagggatatatgggaccaaaagcaatgaatttggtcagggcagacctaattgcaatgataaactttgagactttcacatatgattaaacaaattgtgtaatctgatagtaaagccttttgtattgagtatgaaaattgaaactataatttaattcttttaaaaattatccattatatacaaggagaaatcctgtaaaagtctgaaggaaagcaagcacaactggagtctaact

SEQ ID NO: 47388 - DNA, 1044 bp, Homo sapiens
ccagaatttctagtttaagtcattatctgtgttctggaggaactgactcttggggaaattcctggattctttggagctgttctagacttgaaagttctcctcccagatttattttggcattagcctaatttcttgagtatatctaaacatctgtgaacactgtgcattttgccacataaaggaataggagcactctctaccccttgaggtcttggttcctttatataaaaatatatgtggaaaaaattgggggacattctacaatctgttgagggtagcattctgcaagtcactaaaagtctgtgactttagatgatgatagtcagtgtatttagtaatcgaactcagaatctggatattgcaaacttctttaccacttattagctttgtgattttgggcaagttatttaacctctcagagccttggttccacatctcaatgatgagggtaataatagaatagttgttgggttaaagttaaagagaacgacaatgtaaagcacttatcttcgttctgacacatgttaaatgcatagtgatgttgatattttatcttacttcctttgaatactaaatgcatttttgtgaaagtggttattctactcatttggcaccccaaaatatggtaccttgtattatttttaatgagttgtgttattttccattaagtagaatctcatggagaacagagattttaccagaatctagcttagattgcttcccctgcagattacattaataatgcattttgattttttttccttttgtttctctctcttgagaaacagaaatcatttgtatttaaattcaaaattaaacttttttcccccagataaccatgatgactacacagacttctactatgacatttgctccttttgaggatacattgagttggatgctatttggctggcagcagccgttttcatcatgtgagaagaaaagtgaagcaaagtcaccttccaatggcgttgggtcattggcctcaaagccggtagatgttgcctcagataatgttaaaaagaaacatactaagaagaatga

SEQ ID NO: 47389 - DNA, 1027 bp, Homo sapiens
aaaaattttaagcttttaaaaatgtagatttttcatatttttaaaatttgaatctatttgagctttagttcagcagaattaaatttttacttgacattatcattaaaattgctaggtatggagaacaattcctattttattttgaacactgagaagagtaaacttttcctaaaacactttatattataaatgaaaataaattgctagtttatattttagatataaacatcatattttttattaatacctacatcaaatggaaaatatctgaaattttttttccatagcaggtattttctactagaagtagttttactacttttcatttagaacagagtatgagtcttaatctgaagtctttttcatgcccttgttttaaaaaaactactttttttggcctcaaaaaaatcaagggtgtaatttttaataaattgttaatcctatgttttgtaattttcattttaggagcttgacttatttttttctctctcataaaaacacatttgttttaattgtaggagaaattttctcagcattttgcatgttctttctaatctttgttggtctgaatatattggtagtaattactgtaattattcaacaaaaagcatatccgttcaaaaatttttccactatgtcttttttctagtggctactgttttagttttctagttgaatatctctgacaagctttcgtatggttttgttatattttcatctacatgtaatgtgttattaattttattaaatgaaaactaatcaccttcatgtggaaatgctctgagaattgtccttaggcatttggtagtaaccagctaaccaagaagaaacagagaaaccagaacttcatatggcagtccatttagatgaagaatgatgatataaaatctggttccttcttagcaaaataaaaaacaaacaagaaaagatactaaatgatgttaattttcttactttatgatttagaagtccagttataatattaaaactctgtgacatagtttcttttaccaaaaccatgaaccta

SEQ ID NO: 47390 - DNA, 1023 bp, Homo sapiens
taaaggaaaagattacttttaggagtttattacaataagacatcatagccatagagtcacagtaagacccttaaaaatgactttattactgccttaataaatgctgaaaaaagtgataaaacataaaatacataaatattattcttgttttactagaaaacttagcattatcaagagtatcttgcctttgacaaaaacgtagttggtgatgatcagttatggtaatctagttttcattaattttataaaatcaggggaagcatttacaattccccaaatagagaattcaattgggtcagtttgctcctgcttatatggaatgcacctcttaagtagtgtgtgtatcaagctatcttaaacgttccctgtctccttcataccttcgcttccctggtgccatcatctgtggctccagtggtaacgttgttcacacattacacacatggctccagccagggcgaatatgtgggaaagacctacttgggatttcttttttctggaggaaagtgaactagaaggcatttctttgacttcctttgcgtctttgtgtacagttcacgggtgtcactttctgagccatacagcatctgtgatagagaagactcactcaggagcaagagtttggaatgaaagataagatagtatgaacacacttctccactgcaggaaaccttaaaaatattgctaatggccttttggtatgggaagcagcagagctgagccatcagcaccctccctgtgctctccttgcccactctgtggctctccgccctctgggctgccatgacagatcaggccacctcctttgcccaggacttcctggctggatgcctcactgcagccatctccatgatgctgtggcccccagcgagtgggtcaagctgctgctgcaggtgcaacgtgccagtgagcagatcatgcctgacaagtgggtcaatggcatcatggactgcatggtccgtatacccaaggagcagggtgtgctgttcttctgggtgggcaatctggccaatgccattcgct

SEQ ID NO: 47391 - DNA, 1034 bp, Homo sapiens
tctctttcaccagccaattcagaaaattttgtaactttatttggtcattcaatattatcattttccctccaggttgtatatttttcccagagtgccataaatattaccattctgccattgacaaaaatattcttgaaatagactcatgagcataccactagagctctcctagctggttgacaacagtgcaatgattggcatcctttgggcatcctttctagataatcatttgattatctagatcagcaaaggtacttttgctcttagatttttgggaaggagagactttgttacatactttggtgaaatgcagagcattgcatgtattctattttcctattatacctttctaaaacccctgcacaggaaggaattaagctagtcttgtgtgacttgtccttgatgagctcaggttggcatcatagcatcttttcatttctttccaattctgcataagctgcctatttgctaatcggttctagactttgtgtaaaaaatgatacagatgacttatgacattcaaattcttgcaattttgaaaaaataggacattgaaaaaacaagaaacagtgacttggtcacaaatagtccataataaagcacaatgttgattgacacagcacttgtgggagaatagcagggcacagggcaatcaagaaagtcttcttggaagaggtaaactttggaggatgcctagaattgagttaggaagtgagaagattacagagaattccaaatgatggaaacaggatgagcaaagatatagaagtttcagatatgaatgagtttgatgtgtttgtgggtccagacattgttggtgtggctggaatagtgagtacttgctgaaaaatattgtgaatacagcaggataggcagggtggatcttgcttgtgggatggccagagaatgctggctttgaataccatggtaggataaaaagcactgaaggtttttgagcagaggagtgacctggcaaagagtagcatgacagtggatgctgctagcagctgtgtgcaggattgcaccgtgtggag

SEQ ID NO: 47392 - DNA, 1035 bp, Homo sapiens
gaacattaaatatgttcacattgaattaagaagagcagtgtgtgttctcaggtgtgttgagaattcactcttcactcacctgtctagttggaataaatcgttcatggggctttggctacaacctgaagaactcacttctaggattctctgggtgtggagttaatgtcatccagacacctatttctgccttatttgaagacactgggatccgaatgaggcagagcactcttcagagaggggatttttaccattgtacatctgtttccactgcctgcagtggtcaaatctccccattccctaccaagccagaggggtcatggagctctgggctcagatatagtaccctgggaaatagcccacccacatgtggatgtgataagagaggcagcatctggcgcagaaactgaaatccaggtttggaaaccatccaatgggtcactcacctgaaggggctgccaagagaagttgaattcccagtgaaaacaggagcaatgggaagaaagtgaagcattagagcaggatattagagatggacatggaggacttcctggattcagagaaggcggctgcagggattttctaaggctcatttggccttgggtttggacaaggagagatcataggacatcaatttttcctagaatgaaatgttccctaaagccttcactcacttggaaaactcttacgcatattgttctctctcattcactttgagcaattcggttttgggacaatgcagtcttatttgctgtacttccatccagctcaaggcatgtttattgaccccattataaatttaaaaatatagttattttgttctgcccaattttgctgtgaacctaaaactactttaaaaaatagtctatttttcaaaaagatcatttaaaaaatgagattagttcgaatatcagctcttacaagctcagagtgcatgggcaaaatcatattttggagcctggaaagctgagtggacccactgaatccccttaggccctggcccccgtgaagtccagctgatgtcatcagtctcactct

SEQ ID NO: 47393 - DNA, 1003 bp, Homo sapiens
cagctttgcagataatagctgcatgctcttggacaagtcatttttgttttgcatctgtaatatggggaaaataatatagataatataatactaacagtttccatatataattattaatatgtgtcaggtatgtattttagctccagatccctctataatcctgcaaagtatgtttgatgccccctgttttaaagaaaagaataatgaaggctgagggaactgatatgacttgttcaaatgagcccatataagcacaggaatggcagaacatagatttttatggcttttcccataatgccaggacatctctaggaagaagggaggacccagatgaatccgattctgttcattgtttgtttttcatgcttatggagaggtggtcaatgagcatagctccttagtgaagggatagccacttagtagtgggacactggggctgctgagccccgcctcagtttggtttacattttataagcttgctgtagctgcatagcttggttcttacttgtgcaactcaagaaagaaacgtctgtgatagaataatctcggttcaagtctagctctgcctgcgttagttatctaaacatagtggcttgaaacaacacacatttattatcttgtagtttctataggtcagcagtctaagcatggctgagttgggtcctctgctcagggtctcaaaggctgaaatcacagtgtctagctggctgcattctcatctggaggcttggctgaagaagaacacacttccaagctcattcaggttatgggcagaattcatttcttggtggtctacgggagctgggggcctcagtttctctctggctattggctgaaggacatctgcaggtcctacagttcacctgtggttccccaccatgttgccctctaccttggcagttcacaacataacagcttccttcttcaaatccagcaggagagccagactgagtctactaacaaggtggagtcttatgtacagtatcctcatcacaggaatgac

SEQ ID NO: 47394 - DNA, 1059 bp, Homo sapiens
ctggccttaccagctgaaggcaaattgcttctggtgggccttatggacaggaatggagaaaaaggcatttgccaagtcaatggctgcataccaggtaagaggagatgtgtttatttgctcaagcgatgaagccatatctggtacagcagctccagttggagtcaccacttggttaagcttgtgataatccactcttattctccaggatccatctgtcttctgcacaggccaaatgggagagttgaatggggatgtggtgggaatcaccacccatgcatttttcaagtctttgatggtggcactaataaccatccttccagggatgcaatattgttcttgatttactatttttctaggtagagtgcagatctaatggcttccacttgacctctcccaccataatagacctcaccctaccaggtagggagccaatgttggggttctgccagctgctaagtatgtctctgccaattatgcattctggcacaggggaaatgaccacaggatgaatccagggacccactggacccactgtaagttggacctgagtgaaaactccattaattacctgtcctccatactactagaagcagagtccttagcatttttaggtctaatcatattaagtagccagctccaggaacccccaaaccaatggaagaacttaatattccttaatattctgttcctctagagccaatcctggtatgaaaatctgtattagttcaggggttctctggagaaacagaaataatagaatatatatgtgtgtgtgtgtgtgtgtgtgtgtgtgtgtgtgtgtgtgtgttcattaagtagtattaactcacatgatcacaggtcctggaataggccatctgcaagctgaggagcaaggaagcctgtctgagtcccaaagctgaagaacttggagtctgatgtttgtgggcaggaagcatccagcacaggagaggatgcaggctgggaggctaagccagtctagccttttcatgtatttctgcctgttttatattctggccacactggcaactaattagatggtgtccatccagattaagg

SEQ ID NO: 47395 - DNA, 1042 bp, Homo sapiens
gttcttcttttacaatactgttttgactcttctgagtcccttgaatttccatatgaatattgggatcagcttgtcaacttcttcaaaacagcctactaaggatttgacagagattgtgctgaacctacaggggagtctgggggaatagtgccatatcaatgcaacataaagtctttcaatctgtaaacatgaaacatctttccatttaagtctttaatttagttaattttttttgtagtacaagttttgtacttcttgttaagtttatatctaagaattttactttttcatactagtgtaagtgaaattgctttcttaatttcatttggattgtttattgctggtttattggaaatggaattaatttttacatgttgatctcataccttaacaccttgctttacttgtttgttagttctaacagtttaggtgaatttcttaggattttttaatatataaaatagttatcatctgaaaatggagattttaacgtttcttttctaacttgaatgttttttagctctttttcttgcataattgcccttggcgagatctccatttcaatgttaaatgtaaatggccagcatggacatttttgtctcgttcctgatgttaaaggaaaagctttccgtttttcgctatcacatgtatgatattagttatggattttttttttttttttttttgagacagagtctcactctgtcgcccaggttggagtgcagtggcactatctcggctcactgcaagctctgcccccccgggttcatgccattctcctgcctcagcctcccgagtagctggagctacaggcactcgcctaattttttgtatttttagttgagacggggtttcaccatgttagccaggatggtttcgacctcctgacctcgtgatccgcccgcctcggcctccacaagtgccgggattataggcatgagccaccacatcccacctagttatggattttttttatgtccataataacctttaccaggttgaaatagtttcctactattgctaattcattcaggtttcctgt

SEQ ID NO: 47396 - DNA, 1061 bp, Homo sapiens
cttgtaaggttaattcttcacatatacttttgatctgtgagacgttatgttttatatcttaacaatttttgacctttttgtgcatttaaagctatcattcagttcaaatgccattaaaatttgtcctttcatgatctctactcaacctagacaaaacagtttctcataataaaagtgtctcttggcaacagttgccattaaaacgagttaggattttttttttaattgcatcccagtttagtttattaacagtcttcaggctgctaccacaaactggttcattttggtttacttgaggacacacacaaggtaatcaggaaagttcttgtttttgacaaatttgtaaacaaattgggcagggaatgagtattcttaagaaaatataaatcataatacagtgtatggtaaaaattcttttaccatatacgtagtgtttaagtggtacctgacgcatagtaagtactcaatagatcttagccattgttattataaacactattatttttatactattttaaaatcatgttgaaattcctgatttatttccctgttgcctgtactacacagtaaaactcttcaaaaacaaggaccatatcctacttgaccttgaattcccaatgtctggctctctggtataaggaaaaaatattgaatgaattaatataatttaaagtcaaagtggaagtgataacagatttaacttggatttaggagaagagagcaagctttggattaaagtattctagggatacttcaggaagctgcttttttaaggcaagattgaagaatttaggtgaaaactctttgtacttagagattcataatttccatagagagtcataatttccatagtaggttattttgtctgtttatttttaggaataaatagtatcagtaatacagtgtgagttaaattgaaactttgggtccaagatctgcatgggagtcttagctctaacactcacaatctgtgcaggaaaacatattgtttcagacccttgactcctccatctgcaaaatgataattattaataatatctattctgtatacatcacagaag

SEQ ID NO: 47397 - DNA, 1225 bp, Homo sapiens
taaaagaatccagagtctacattataacgtttccaatgtccaaaatataaccgaaaattagcatatgaaaaaagaacaaagtgtaacccattattaaagacaatcaacaggtgctaggaaaattagatatccatatgcagaagaatgaaactagattcctatttctcaccatatacaaaaatcaactcaaattgaactgaagacaaatgtaagcccttacactgtggaagtactaaatgaaagcataggagaaatgcttcacagtatcaatacggccaaggatattttggataaaatcttaaaaacacagcaaaaatgaacaaatgagattacatcaaatgaaggagattctgaacagcaaagaaataattaacagaatgaagtctcctagcatcattatcttattcagtgtgagaaaacattattatctcctttaaaaatgagaaaattaacattcagagaattacttttgtgcccaagtatgcacagctagtgaatactgaagacgaaacttgaacccatagttgtctgatttcagaacttgcattatttctgtaatactgcttctaactgaagtccatatgtgaaaagagtctttgtttagattttaagggcaactctttttgtttatcaccaaccatgtataaatttacttttcattatttgttttatgtcagaatgtagaaggttcgttcattctatcttttatttaataccatttgtagactgtctccatgtctatcattggttagaggtgaatcagaaaataataacaaaatggcagacttaagccctataatatcaatagttaccttaaatgcaaatagtctaaatacacaagttaaagacattgtcagtgcagatttaaaactatgacccaactatgtatctaaaatgaacctcacttcaatgcagtgacatgggtatgttcaaggtaagagaataaaaaaagatatataaacatgttttctttaaaaaagcagaagctattgtagtaatattagatagtgtagattttggagcaaaggaaattatcggagatagagaatatcattacagattaataaaaggatcacttcttcagaaaggtgcaataatcctaaatatgtgcacatcaaataacagagcctcaaaatatatgaagtaaacactgacagagctaaaatggataaatccacaattatagatggggacttcaacatcccattctcagcaattgatggta

SEQ ID NO: 47398 - DNA, 1049 bp, Homo sapiens
ctgccgccctccagatgcttggcccggatgccatacacctgctcagtgtcagccagaacccaccagagcatatggcagctcacatattgccttgtctcgggatggattgggaacgctggtcacctgggctgtattttcaagtggtgtgacagcagctgtgggaagcccagagaatgacaggctctcactgctcttcttactagtgggaaaggagcacgagaggaacagaagggagatgttttcatatacccagtagctacgacttgactctcctgtaaaaggacacaccgcttgctgtcttcacccacagtgagcaggtgcaatagaagggaaattctgatttttttttatttaaaattgcaactgtggtaggcacaattatggcccctgaagatgttcatgtcctaatccctggaacctgtgaatatgttaccttacatggcaaaagggaattaggtagcagatataattcaagttgcttatcatctgaccttaaaagagggacattatcctggataacctgggtgggcccagtagaatcatgagggtccttaaatgtagaaaggaaggtaggagaagaggtcagagtgatgctatgtgagaggaagtccacctgctgttgttggctttgaagatagaggtagagcgtcacaagccaagggatatggctctgtgtctctacgtaaatctcatgttgaactgtagtccccacatgttgaaggagcgggtctggtgggaagtgattgaatcatgggggcagacttaccccttgtttttctcgtgatggagttcttacaagatctggttgtttaaaagtgtgtagcaatttccgcttcgttctctctctcctgctctgccatggtaagacgtgcttgcttcccctttgccttcccgccatgattttaagtttcctgaggcctcccagccatgcttcctgtacagcctgcagaactgtgagtcaattaaacctctttccttcagaaattactcagtctcaggtagttctttatagcagaattgactaacacaccaagcaatgcagcagcctc

SEQ ID NO: 47399 - DNA, 1020 bp, Homo sapiens
accagttaatatattctaaggaggctaattggaccttgctttcaactaagaagaaatatagaaaggtaccagcttcaacagaaataaggaacacattggtgagcaacttacaacagcatttttcttgctttgctttctcattatgtgtcagatttttttgtgtaaagttccttatgtctaaaatatttttgtacatattgaagtggttttagattccagatgtaattatattctgttgagtagctggtagcactgtcactcagtaaatgcacagtgctgtatatgacaacatcacatttttcaaaccaaactgttgtgtcattaattgagggttattgttcttctgaggggtgtgaaaggagaggggaaatacatggttctttagctgataattgtccatggtcaatgaagtaaaaccatgtttgtgcagacaaaaatgtatggtttcagttgacgtgtatgcttatttaaaaatacttctgttagatctctgctcctttatgaaaaacctaggcctctccaagagcacttaaaaaaaatcctacttggaatcataacttttattattcatttttgaacattatcttttgataccattacttttgctcttaagtgaaatttcgccaatattatatttaaatttgctaatgcataaatggatgcaccaaactgggtgtccaaactgggaagttcagttgcaatggataaagagttatttggaaaagtaattaccagataattttacatctaattaaccatgtatgtttatgtaaacataagtacattatatattgatcttgaaacaaactttcatgatatctttttttattgttattgatagcaggacaattggttcatttgctcatttcagcaggggggaaacatctgacaatctggttgtcagtccagctgtttgactctccacattttttactttgcaaccaaatgtgttggcgtcttagagttgaacttttctggaagggaaaaaataggtatttaagaggcatcttggaatttgga

SEQ ID NO: 47400 - DNA, 1046 bp, Homo sapiens
catgaaatctttgcataagccaatgtctagaaggatttttccaatgttatcttctaaaatttttatagtttcaggtcttagatttaagtctttaatccatcttgagttgatttttgtataaagtaagagatgatccagtttcattctcctacaagtggctaaccagttatcccagtaattggctaattggataatttcaacaaatttcaaccatttgttgaaaaggatgttctttccccactttatgtttttgtttgctttgttgaagatcagttggctgtaagtatttgggattatttctgggttctctattctcttccactggtatacgtgcctatttttataccagtaccatgctgttttggtgactatgcccttacagtatagtttgaaatcaggtagtgtgatgcctctagatttgttcttttgcttagtcttcctttggctatgtgggctattttttggttccatatgaattttagaattgttttttctaattctgtgaagaatgatggtggtattctgacggagattgcattgaatttgtacattgcttttggcagtatggtcattttcacaatattgattctacccatccatgagcatgggatgtgtttccttttgtttgtgtcatctataatttctttcagcaatgttttctagttttccttgtaggggtgttttgcctccttggttaggtatattcctaagtacttattttattttttgcagctattgtaaaaggggttgagttcttgatttgattctctgcttggctgctgttggtgtccagaagagctaatttgtgtacattaatgctgtatctagaaactttgctgaattcttttatcagttctaggagatttctggaggagttcttagggttttcaaggtaaacaatcctattgtcagcaaacaaacagtgacagtttggcttcctctttaccgatttggatgccttttatttctttctattgtctgattgctctcgctagaactttcaacactgtgttgaagtggagtggtgagagtggacatccttgtct

SEQ ID NO: 47401 - DNA, 1050 bp, Homo sapiens
tttatctgaagcctagttttacaacaacgctcgctctttcctaaggcagtgtgggctgtctcttggtaccattagcacttctcagccatgtcttggtcttcagtgtttgctacatgaacctaacgtctccaggagtagattttattttatcaagaagttcattaatggcgcaactatgcaacgtttcacctgcctagttgaaactggtttgaaaaccagatgacttagtggcagtgacgatgagcttctgcacagaaatcttctctactcacaagccgtaatgtatttgggtttcaaagactttgcatagtaggcagcgtgccatgatgctgacaaatttgttatataaaaatactcgcctatatctcccttggtttttaacctgctaatcggctttaaaataaagtatgttagtaaactgcaagaataaattctgacaattgagggagggctcggagtactgatggctaccactgtattttaccagccttttggtcacttagaagaggtgccaaagatcaaggagaggaaagtggtgggctacaaatgtaaattctgtgtggaagtgcacccaacgctccgagccatctgcaatcacctccgaaagcacgtccagtatggcaatgtcccagctgtgtcagctgctgtgaaggtgagaactggaaggtctggatgagcattgtgtgtgagcgattcgagttacttattaaccccattgcctaaagcagctcaggaaagagcatctcagaatgcgggcattcctgaattatgcttggattggtttggcttgttttgatttctttgcaggttggaccttcctcatctttctgttcagggaaaggtcgagtttcgatctggtttccttccacgcggatagtttggtggcagcagaaggtccaggattctcggtctaggaggcttcgggtcgtccttctattctgcgtttagtgccattagctcttcgttcttccaagttgcccgagctcttgagaggaatcaagtgggttctgttcccatcatcttctgctcctctttcttcctgacttctta

SEQ ID NO: 47402 - DNA, 1078 bp, Homo sapiens
cctgtgtctccagctaaactgtgtgctctccgaggtcagggaccatttcctattcatttctagagccctagcactgggtaggccattcaatagatatttcttaaattgttttgaattaggacagcaaaagcaaccgcacacaaggaaagccaagagaacaatttatgtgtgaacaagcctgggaatctggaaaaagccaatggaatctggctgtgtgtatagcaagatgtgccatcccatgttactgcacttttcatgcatcattcccttgtccttgagttaactaacttctcccttcctcccaccccagtggcaacaccatagccctttcaactttctgcaaatgaagcaactaattcctttttttccaagcagccacggagacaagtgggtaccttccttactttctgccacctcttcagagtacttctacttcctttgtttaatgatcctttttcaaatgcctgcttcctgcttattttcttcctctcttttggagtattcttttgtcttcctctatgaactcagtgactggctcacagccttgctttccaatccaaatgtaatcttcatgctctggaattacaatagactagactcaatggtaataactcaacagacacttcagtcgcctaagctagggaaatttgtctccttcctgactgtcctccagctgcccacctgtggccaaattcaccataacagctccgtctccagcacctcaaatttgcctttactctgaccactgtgggtggatctccttccccatccaacctagacctgaccagagggttagccgtttcaaaggggctttctccagcatcctggtttctctcgtcccctcgtcctctggtttccaacttaccagactccaaccctgaataaccttcactcctgcccttcctctgatgttagccagtctttctgattctaacctccatcttttccaatctgttttccaggatatctttgttaatcacaaatcaaatttacttttcaaaataaatttgagctgagtcagacttatccctatgtaatgtcagtttacacctaagtatttcaaggtattttcttaagt

SEQ ID NO: 47403 - DNA, 1052 bp, Homo sapiens
gctgctataaacatgcatatgcaagtatctttttcgaatagtgacttttcctctgggtagatacccagtagtggaattggtggatcaaatggcagttctacttttagttctttaaggaatcaccacactgttttccatagtggctgtactagtttatatcccaccagcagtgtagaagtgttcgctcttcgttgcatccatgccagtatctactggattttttaaattttttttattatgtccatttttgcagaagtaaggtggtattgcattgtggtttcgatttgcatttccctgatcattagtgatgctgagcatttttccatatgtctgttggccatctgtatctcttcttttgagaactgtctattcatgtccttagcccactttttcatgagattgtttttttcttactgatttgtttgatttcattgtagattctgatattagtcctttgtcagttgtatagattgtgaagattttctcccactctgtgggttgtctgtttactctgctaactattctttctgccatgcaaaagctctttagtttaagtaagtcccaactatttatctttgtatttattgcatttggttttgggttcttggtcatgaagtccttgcctaagccagtgtctagaagggtttttccaatgttatcttctagaatttttatagtttctcctcttagatttaagtccttaatccatcttgagttgatttttgtataaagtgagagatgaggatccagtttcattctcctacatgtggctagccaattatcccagcaccatttgttgaaaagggtgtcctttccccacttcatgttttgtttgctttgccaaagatcaattggctataagtatttgggtatatttctgggttctctattctgttccattggtatatatgcctatttttataccagtactatgctgttttggtgaggaacagcatagtacagtttgaaatcagatagtgtgattgtagtagtctgttttcacactactgataaagacgtacctgagactgggcaatttacaaaagcaagag

SEQ ID NO: 47404 - DNA, 1035 bp, Homo sapiens
ctaaaggaaacaaaatcagtgtctcaaagagctactgcactcccatgttccctgcaacagtattcacaatagaatagccaagacatggaagcagcctaactatccattgatggatgaattttttaaaaagtggtacataaacacacaatggaatattattcagccatggaaaacagacattctaccatttgggactgtatggacaaactttgaatatccttccttgaagcttttacaagaactctaattgaggtgctcttatctgagaattcaagatttttttacctgcacttttgaccatcttgctgtaagaaatcgtagagacaatactttgctgaatctttgtcccactgttttctttccctcattcccattctgatttttaaggacaggcaaagaagatctgtctgttgagtagaccacttggtacgttaggggttggcaaactatgatgcatggaccaaatctagtccacctccttttttatatggtccactctctaaggatggtcttgacatgttttagtgattgaaaaagtatcaaaaaaattgtaatgtgaaatatgaaattcagatttcactttccctaaataaagctttattggaatacagccatggtcatccattgacttattgtttatgggttgcttctgagctacaacagcagttgaatagttgtaacaaagactatagagtccagaaagcctaaaaatatttacttatctggccctttacacaaaaagtttaccagcctgtgttataagtcattcaaaatcttcacagcgctgcacattctttttaacatcaacatgcagtattaggtaatatgagcatcctggttgggtgcctctttttgaagctacaaatgttaagtaagaggggcaaccttagagttaaaaattctggaaacattaagtggactttctcaatctcagtctgtcctatttgatgcctgcaatgtaatctgaagacaagggttccagttccattctatcattagcaagcacattcatatcagtcttctatcagactgggt

SEQ ID NO: 47405 - DNA, 1310 bp, Homo sapiens
tattattccatcatttgtttgggcctttttcaggtaagccgtaactttgagctggttggacgggttaacttggatcagctggaacagatgaaggagaaaatggagagctccagcagcgatgatgaggacaaggaagaagaaatgaacagcaaggctgaagacagaggttagtctcatcctgccctcccaatcccagatggcatctggcatgtccgtagtgagacagaagggaggcaggaggttgttgtaggagtaacagaaggaatgatccttcttagttaagtagcagaacagactgacttagaaaacacatcaagagctgtgtctttgtaaactattaccagctatagaaacgccaaggaaaacagacattttctccctaattatagatatatgtttgttgaaaaatagatggcagtgatttgtttttaataaggaaaactggtatctagggaatcttcagaataaggacaagcagacagcaagatggatgacactgtagagctctagaggaatgagaatgaacttccagttgaatgcatatttaaaattgctgctggggcacacactgctggaactgtaggggacggtggtgcaaagaacttgagcccctaccccctgatgtccctctgcgtggcccttttcttaaccccctttgtgctctgacttgctttgtaaggagagagaaagagagaccacctctttcattcaactatgtatttacagaatacactggggaaggttttgtgggactttggtactatttttctaacttcctgtgagtctataattatttcaaaatgaaaaagttttcaaaagtatatttagttgtggatatacatttatgtgattcagagttggttttctatattgttcaacgtagaatattgtgaaaaaccccagactatacatacaagaatataggttgagatatgttactttagttattgcagatttatcagaagcacgtggataacataaacatcagaaatcaacattgcagatattgacccagagatgagaatagtactagttgccattactgagcatcattatgtgctagcctcagtgctggtcgtttttatataacatttttctttaatctcatgactagagaggactgtacatttagcctgcttgaatttggtttccagttctgctacttactgtctagatggcttggggtaaattattgtatttccttgtacattcatcatctgtgaaataatcacaatcgtaataatgagaataatatcacctccctcctaagattgttgtaaagattttttttaactttaaaacttcagatt

SEQ ID NO: 47406 - DNA, 1048 bp, Homo sapiens
tggaaagatgttgcatttgtggaataagtgcttacttgaaaagcatgttcttcttttattttcttactgttaagaatttttatttgtaggatgtttgttttaatttaatttttttaagggatgggggccatcatgtggaaaccagaaaatggggaaagtgtgaactatccagacaaagattcattttgtgtctatatttgtttttaattggcctcatttcaaatgtattaaacagttccatacctggattgggtgtttgtaatggttaccaaaaaacaaacaaaaaaagaaagaaaaaggaaaaaaaaaaagaaaataattgtgacatgcttttatcactactttatttttcaaataacatgtaaatattgtaatccattggattttgttttgctaacctgttaataaaaatatgggaccattatccttttaacaaggctagaatgtcatttttttctttttcaaacatatacctgatattttgtggccgcacattttggatgcattattataattctgttgactgtaatgacatagaatttacaacattttttgttgttgtttaatttatacagaggacatttttttcagagcttgagagaagaaaataaatagcaaaatgataacctattgactccagtaatcagtgtttcccaatacttcataagagatagggagaccctgagtccttgaagccaagggtttaaaaacaaaacaaaaacaaaaaaaaccacaagtaggttattcaagttgtttgcaacatacattttgtaatgaaatgtgagaaattaataaagaatttttttcacatgtgtctatgtgcatctgttgtaaatcatttacagatatgactacagatatgaaatctagaaatattatagcactacctttcaatgcttgtacacgagatattttaagtcattgaatctacacaggtatggaaagcaaaggtaaagctgaggtgaggttgaggttgagctgggattttcaaatgttaatatttctgcatcaggtattcatcaccaactgagggagttttagggaagga

SEQ ID NO: 47407 - DNA, 1029 bp, Homo sapiens
ccctggcggcgtacagcggagccgatcctcctgtcttggccgtgggctttgtggcaggagaatggggaagcagtggccggacgccgaaggcctggtggcagatggcgtggagcgcacgcccgcgggcctgggcctaggagctcgtgctagcggggccggagggggatgggaaggtccaggccgtctcagccgtagagcctggctttctggtatgggtgcacaggtgggggagggagacgtaggcgtcgccactacccctgtgtggacctggttagccgcttagttcccagagttggtaacccgagaagatgagccttaagaaaaaaaaaagtatcaggttccgtttgccgccgagaggtgagtggtggtgaaaatgaatttgcccctttcccctcagaattgtttacccttttatttgcaaatgaatcgttctgctgccttcctcccgccaccaaacccacacccttgcgtagattgcactttgaggcctctttggtgatggttttagctgttagagctcttcacagccatccaggctcaaactaaacttcagatttaacgggttttctgtgttagaaatcttggaattgtaggagttggaacgctgcagccaccctcccccgatgccccaaacagtagcagttcaagggggaaaaaagaaaaaaaaaacaaaaaacaacaactttgaatcctttctgcagttaaagccttaaacatttcagaagtccacattatacatttttctgtatttgtgactgcataaagagacactgttgaggtcagtacaactttatgccaagaatctaaaaacgctgtgagtgtaaatttactgcttatgttcggaaatacaccgccaagattgtcataatactaagtttaaaccagcagctttctgcccaactctatttttaaaagtagttgattctattttgggtggagatcaggggctttggtgttaagtagacctgagttccatttgtggttttgtaacttatttgctatgaccttgggcaaattacggttagtttc

SEQ ID NO: 47408 - DNA, 1076 bp, Homo sapiens
cttcttccctccctccctcccttcccccttccctctcctttcctctccttccctcctttcctcccttccttccccactcctttcccttccttccttcccttcctttttcaacaaggtcttgctctgtcacccaggatagagtacagtggcatgatcatagctcactgcagccccaaactcctgggctcaagtgatcctccaccctaagcctccccagtagctgggactacgggggcatgccaccacgcccagctaattttagtttttttttgtagggatggggtcttgatgttttatccaggctggtctccaacttctagcctcaagtgatcctcctgcctcagcctcctaaagtgctgggatgacaggcatgagccagcacacctagccaagaaatatttcttgtaggatttttaaaggttactttgatgctgtggggtgggcaagagtgaaaagcagagacatcagttagggggcttgtgcagtagttttaagtaattgcagcttgaaccagggcagtaggagtggagatgtagagaagtagatggaattaggatatgttttgagaggtacagttggctgtaccacttgctgtgtcacctcaggcaagttactcagtatgtgccttttggtcctctgctgtaaaatgagaatactagtatgaaagtactaacttattggtatatgggttttgaaataatattaacagtgcttggcaatgtggtaccactctccctccattgttcttgcttagaaagcctcaaatgtgattaaattcaactcagtgtttgtacttgcacctgagtggccagagatgcaccttgtagccacattgacttgtcttgcttaaatttatgaacattaaggaacttaagttcatgagcactaaggaacattaaggcacactaaggaaccttaattgggtccttagtatgcagcacctgacagtcttacagtttactagtccagtcactcttccactgccacaggatgctttcatatcatctagcctgcttattttcacttgatgaccctagtctttatttgattgagaatttggaaataatcgagacaga

SEQ ID NO: 47409 - DNA, 1078 bp, Homo sapiens
ctcacataattaatgttatgctatcagttattgtttcaattgtaaaaatctcctgtactaaattattttattccttgggtccagtgaggagatttttcctatttgtactgaagtcagctgacatttttaaaatcaaatttgtatttgtagaaatatcaggaacctaccttgggacagaaattccccaggaaatactctggtgcctgtaccagtttctcaagtggaaggagaagaaccgaagaaccaaaaaagaaaaagcattacctgtagtgtaaacataagaaatcctttagtacacatttggctttgggaatctcctttattttgctaattgttgattgccaaaatttaattgctgctattattttttaattaggccgtgtagtattagaactgccttagacctttttcttttaaatgaaatctctttttctctttgaaagtccagttttccctaaattactcaagtaattcaggctcattatagtaaataaagtatagtaaaatgagaatggcttttgccatcggtctaaggaaccactgtagactctgtatatccctctagtcttttcaaaaaatacatttacacataatacatgaacacaactacactatttgtttaaaaaaattaattagcaactagctttttttcctcaaacatagttataaatattcatttatattgcataatgttcaaatgaatttatgtacattaatttattttaccatttctcctttgtggatgtttagggtggttttcagtttttagtattgcaaaaagcaatgtagtgcacatactttgtacctttgtctttgaagtagttacatgagcacctctagcattgatttctagatgcgaaattatttggtcaaagtgtggcagattgcctttaaaaatgcctggtcaggctgagcgccgtggcttatgcctgtaatcccagcactttgggaggctgaggtgggcggatcacgaggtcaggagttcgagaccctcctggccaatgtgatgaaaccctgtctctactaaaaatacaaaaaattagctaggtgtggtggcgtgcacctgtagtctcagcta

SEQ ID NO: 47410 - DNA, 1238 bp, Homo sapiens
tgaactagaatagtgccagtgccacagagatgcacggtagtgctcacattagggaataattagatggtaagtttagctttgtggcggcacttttaaatacactttatgattgtcttcctttggaggaaaaaagaaaaaccatgcccatcatgtttaatattatgttgagtacgtttttatttttaaatgcacgattttttaagagagaattaagtagctagaaaaaatgtttgatttcttgaatgttaaccatgtctttgtctctagtggaattgatgataaaccaccattatttatgtagtgggaaatgcagcacaatgaaagttctagccttggttatgtactgggactgtggtgctcaggtttatattcactctgttgagatggcttactggaatgggagcattggtgtggggctcagcgcagttaaaggagtcataattgcatctgttggtgggccatatcctttccaagagaaaccttgtgctgagttcatacctcttcctttgaagcatccagaaagaaggcagtctttcttgctaatctgttttgaagtatgctcaattaggttggattagggatgatttaaacaaagtaatttagacacagttcttctacagatacattatggtttaaatacctctaggacatcccgtgaaggtgttcagtagagagttaagtgtgcataaatgaaggtcagggagagagagctgggctagaaatacagatgacatctgcatggttattgaaactaggagtagacacgatggattatcctggaagtctaagtagcacttaaagggctggccagggaggaggatttcgtgaagcagtgaatggagagataggaaaaccaaaagtgtggcatcctggaagccaagagatggcagtatgtaaaggagggacaggtcagtactgtcacacgtgacaagaggaagataggagaggattaagaagtgtggtatcattatggtgttgcagaattcagtgatgttggtaaagagcagtgttaatggaatggccagcggtgggtggggggggactaccagagaaaataagcagcagaatgagaataaatttcatgtttttgtttatcagcacagtattgctctcttttgagtagttggtttgggattatgaataagtgaggacagtggtgtgtatttaagtttttgaagaattagattgtggggggagagagtctaggaggagacgtgattgttaagtgtttgttttta

SEQ ID NO: 47411 - DNA, 1076 bp, Homo sapiens
tgcctgtggcaaattatgttgaatttaagccttgtcttccactaaaacagctaccttttgtccttgggaaagttatgaactaaacaggtagcgagcattgagaggccttaggagaagactaaaaatcatgtatgatttttacacatgtacagttgacccttgaacaccactgagcttaggagtgctggcctctcccctacagtcagaaatctgcatataccttttgacttgcccaaaacttacctactaatagcctactcttgaccagaagccttactgataacgtaaacagtggattaatacatgttttatatgttacatgtatgatatactgtattaaagtaagctagagaaactattaagaaaatcatggccaggtgtggtggctgatgcctgtaatcccatcgccttgggaggccaaggtgggcggatcgcttgagctcaggtgttggagacctgtctgggtaacatggcgaaaccttgtctctacaaaaaaaaaaaatacaaaaatttagcagggagtggtagtgtgagcccgtagtcccagctacctggtgttgggggcgggggcagtggctgaggcaggagccttgggaggttgaggctgcagtgagctgtgatcataccactgcactccagtctgggcgatagagtgagaacctctctcaaaaagaaacaaaagaaaatcacgagagagaatatttttagtgttcattaagtgtaagtggatcatcataaaggtcttcatccttgtcttcacactgaataggctgagaaagagaaagggttggtattgcggtctcaaggtggcagagatggaggaggtagaaggagaggcaggcacactcagtgtaacttatattgaaaaaaattatcatgtaagtggacccagtgcagttcaaacccttgttgttcaagggtcaactaattgtttttttgctctgtgggaagctttatggctctatttccagttcagaaagtgctgagcgtgtggaggtaacttaatttggcctttatttttctgcttaattacatatatgtctgaaagtattgtgaacctttttgtacttggatct

SEQ ID NO: 47412 - DNA, 1022 bp, Homo sapiens
ttttgggaaaatgatacggtttatatctatatatatatatatatatatctatatatctatatatatttcaaattttttattttatattaacttgatatgaagatggaaattgttgggtaaaattaattgtggttgatagttaagattaacatacgctgtcatgagctttgaaagagtaaccatgagtcagattgttaatattgatcatttattgtgtcattttacaaaattattttcaagttataggttgttattagtgctatgtttgtggcatcctgtaacggtacagtctaattagagatcaggcagtatgtagtattttattgtaattattttgtcttttaatgtgtttagcccaaagcagtgtccacaccagcaccagctacaactcagcagtcagctcctgccagcactacagcagttacttcctccaccaccacaactgtggctcaggctccaacccctgtccctgccttggcccccacttccacacctgcatccatcactccagcatcagcgacagcatcttctgaacctgcacctgctagtgcagctaaacaagagaagcctgcagaaaagccagcagagacaccagtggctactagcccaacagcaactgacaggtaggaactggattctaggacattctatctcaaaatccgtgtttaacaggaacttcatgcatttattttgattattgttttgatcaaaccgactatatctattacgttaagctttttttaaatgtttgactaaaacatatgctgcgtctgttttgatagcttactaaggagaatataagtacaaattttcataatcagatttctgtactctgttgatttgggcagggtggggggcagtggaaaggagaaagcaggtgaaagtcatttttttttttttgagtagaaacgttaggaaatacaaataaccaaaatgaataaggattacatcatgacattgccaccctgatcatcatttgtacttgatctgtattctttgtggtcattgtcatatatatcata

SEQ ID NO: 47413 - DNA, 1052 bp, Homo sapiens
cctggtctgtatccattagatattttttcccccaggagtcatttcagaactgtcaagtgtgcatcaaaacctctttttggattatcttaagctagagttgcaaactcaatcctttttatcactgagtaacagctgataaagatttctaagaagttaaaaagtcaactgaactaataggtagcacaaaaacctttggttgtgttcagttttaagaaggtacatgtatcaatatttttcaaatttgatgctaattacgtgtgcctggtaggtgtcttattgaacaacacagagaatatttccatcatcatggtaagttctgttggacagtgctgctttgcattattatagcaatgtgggtttttctataatgcacccaggtcatttctaatctaatttgaatccatgcagcttaataatcctttacttttaattgaagcagacatctgtttgatgcttttgaaaatcaaacaagatgttaaatagactataaatcttttactctgtataatatttaattttgcatgatgggatatcttaaagcttggaaattctattacagggaatccctggagatagagaaagtcaggctgtggttgacccccctcaagcagctagtactggggctcctcagtcttcagcagtggctgcagctgcagcaactacgacagcaacaactacaacaacaagttctggaggtaaagcggaatcttctggatggggagggaatggccctgaatttttagtgtaaaataatttaacctgaaatacttcagaaatgacgttcattcccagagcagtcgaataattcgttaagttctctcttcactaatgtttgagaaaggcccaaaagaaactttcccaagtggatgtaaaaggtatccttgctgatattaaacatcagtgttgcagttttgccgaagggcatattctgttttatttgttttaaggaaaagatgctttccagtttgtatttagtgttactttctgatgccattcagaatggtttgctcactttgtctcttactctctccataaatgttacaaagtgtatg

SEQ ID NO: 47414 - DNA, 1060 bp, Homo sapiens
gaatgcccactgctgctccttcccatctcgaggaactgtctcttctcaatgttttcttttgatttcctctgacagtcttgctgctcttccagaggcacaggaactcaaaattgggaagggtttgaaggtgacccccacgatcaagtgcagtgcctcccgcacgcgtgacttccagcctccacatgcacacttccaataactgcacacacaccctccagctcaggcctcttggatttcagacactccagtggttgaagggtcgctatgttaggatctctgatcttcctctctaaccaggctatcctcaggttctagttcacttctgggggtcaccctgagccaatgtaacccctctttcctgtgtcaatcctttaggtctttgagaagagtggttgcgttttctctgaccgtgtcccaccctctggccaagccttcagctgaaaagagtccctcagttggggcgagtgtattgagtccttcattcagatgaacccgatacttcaggaggggctgagcaataggcactacaggggagccctcacctcccttgttctgtgcataatacctctattaatacagcctaaatttggtcttgctgatttggcagccacatcacactgtgcccttagactaagtgactgtgctaataatacaccagacttttcaaggtgtctgtgcctttgggggtcatgtctgacacatgttatagaagcagaaacagcctactaaacaaatactgctgttttcataaagttatgttctggaccaagaaaattgagctatcatttacaagtccagtgtctcaccctgtgctaagtgctcgtatgaggcacttttgcaattttacaaatgggataactgaggtcagtcagggtagagctacacagctaccaagtgacagccaggtggcaaacctaagttgattgattccgaagtcaccctaagtgacactgcctccctatagcccctgctccttcacattccctgagccagtctctatcccgcctgtgatttctttctctctctgctgttttgacagttatttgttcctctggtgatt

SEQ ID NO: 47415 - DNA, 1062 bp, Homo sapiens
agtttaaactaaaaaaaacacacacattttttattttgtcatatttgttccaaatacttttctcagtttcttgactgcttttttattctgtttctggtgttctgaatttttgtatggtcagatctagaaatatttttattttttctcccccatggctcttaaatacttcttgccatgaggatggggcattaaatcatgtaaaaaaggaagattggtagtgtaagggaaagagtactagcctatattcattcaaaaagcatgtattaatgtctacttaacactgtgtgtgtgtctgtgtagggacacagagatggacagtgtatgattctctccaggaaacagggctccagttgagaaaggagcagacaaggaaggcttcctggaggagagggcatttgagctggacctgggcaactgggaaggcatggggcatgtgggtatgaggaaaggagaagacagagctgagggaattgctgaggacagaagttgtcatattcctggccggacacagtggctcagtgcctataatcccagcaatttgggaggccaaggcaggaggatcacttaagcccaggagttcaagaccagcctgggcaacagagtgagacccccgtctctatttttaaaaaacacaataaaataagttattgtcacattcctgtcagagggagcaagaaggcactgtgtgtgcactgggcaaaaaaaacttaaagtgattggcttgtggaaagagagttgtgttcaaacaagtcatcttcacatgaaggtttggaattccaaattgactttgtccacaccatatgtgcaatattaactagaataccttggggatggtgacatcgtaaaccaaagtggaaatagaatgatgggtttcctctccttcttgaaggctgctccttgaagtaatacagtttggtttttgttttgtcttttcttctttcttatcctcaatttctatggagtaatacagttgtaattcaaataacatgaggcagggactaggtaactcttgcaactttgaaggcggcctctggacactcttcaggggcttgtggaagaagc

SEQ ID NO: 47416 - DNA, 1035 bp, Homo sapiens
gtctgccctccctattcatgggttccatatccacgccttcagtcaatcttggattgaaactattggaaaaaataatagatagctgagtctgtactgaacatgtacagactttttcttgtcaccattccctaaataatacagtataatcaactgtttacgtcgcatttacagtgtattaggtattataaataatctgaaaatgattaatgtatgtgggaggatgtgagtaggttatatgcaaataccatgctattttatagggacttgagcatcctttgattttggtatccaagggggtcctgaaaccaattctctgaggatactgagggatgactgtatgatgttgtcaggacagatttgctaacagcgtgtgtttgtttgtgtgtgtgtgtgtgtgtgtgtgtgtgtgtgtatgtgtgtgtgagagagagagccaattaagagacagagggagttgggtggggggacttatggccacatcggtaaatggttttatgctatgctttggtctagtgcctactcttctgaattctgcaaaccctgactctctcatcactttcctggagttctcaggggaccctgaggagatcacaagcctgcccccagaacctagcactcctgaagtctctctggagatgtgagggaagaagacaataggtcctcacatcttcacttacttgggcttctctctcagaggcagagaatcgactgggattccagtctgcagggccttgggcagtctttagtctgggtctcagctccttcatctgtagaatgggttcatgagttctacctcctgggctggttgtaaggtttagttaggatggaggtgaagcacctggcaggtagctgtcattggatggtgttgagcagagcccttagcttttgtctgtattgctgtcttgtcctgtggggggtcagaagcaacatctctgaagtggaatgtgtattaatgacttttttttttttttagacagagtctcactctgtcacccaggctggagtgctgccatgacagctcgctgcatcctgaaa

SEQ ID NO: 47417 - DNA, 1035 bp, Homo sapiens; identical to SEQ ID NO: 47416

SEQ ID NO: 47418 - DNA, 1035 bp, Homo sapiens; identical to SEQ ID NO: 47416

SEQ ID NO: 47419 - DNA, 1035 bp, Homo sapiens; identical to SEQ ID NO: 47416

SEQ ID NO: 47420 - DNA, 1771 bp, Homo sapiens
caaagtctatgatgatggtaccaaagtagtgtatgaggtgcgctcaggaggcaccgtagtagaaaatggagtgcacaaattaagcacaaaggatgtagaagagcttattcagaaggctggacaatcaagcttaggaggagggcacgtgtctgaaaggactgtgattgcagatgggagcctcagccatcccaaggaacacatgctctgcaaagaagctaagttagaaatggtacataagtctaggaaagaccattcttccgggaacccagggcagcaggcccaagcccccagcgctgcagggccggaggcaaacttggatcagcccgtcaccatgatttttatgggctaccaaaatatcgaggatgaagaggagacgaaaaaggtgctaggctatgatgaaaccatcaaggctgaattggtcctcattgatgaagatgatgagaagtcattgagggagaagacagtgacggacgtgtccactattgacgggaacgcggctgagcttgtgtccgggaggccggtctcagacaccacagagccctcatccccagaagggaaggaagagagcctagctacagagccagccccaggtacccaaaagaaaaagcgctgtcaatgctgtgttgtcatgtgaccacttctttcttctcctttcttctgggcagcctgtactctccaccactcacgtagacctcactgtaccactaactgcaatactgtgaactggaagcaaacacctgccttgccttgcagttgaattgctttgatctctctcattttttttccttttcctcacctgagagacaacgtgcatgtgtgtgcttcattctctccaagaacttgcttttcctctaaacctttccttgtgtcttcaagagtgaatcacttccttcctgctcgattggaatggactcttcgtatcagccagtgatatggtagccttaactcacttgactggaattgaacccattggcactgggggtttcattttgtagtgtgttcctgtaacgtagtcacacactgccatgtctctggtttctcacttgcctcctttgctgtggatctttgtttttatatcttgtgtggcaaaatgctgttggctctagccggttgctagtgtagccaaaagtggaccttacttagtctgtccgatctagggtgatgctttttgctgccttacataagcttccagattacagtattgtgcattcatggctttctttctgttaaaactgaaatgaagtcaatgtagaagaacccagagcttgtcacagctgaaatgtagggactgattccataacctgcccatcagcggttgtctctctttctatggtttaaccgatgaaccctttatataagaagcaccattttaaaatttctaaggacatgaaacaaacattgtttgaagcatcagtagcaattgatctccaaacttaggcaaattcacaagccttgtttctattctcttaaaaaaatgtaaatttttatattgtttcttttttctggatattttctggtcatgttaatctattttcaatgaggagatcatcttgagaagtatctttgcagtgaccatatttctaaaacagtctgtccaacctacaatggttgccatgatgctcccacttcatcatggatggtgctgtaatgcattaactgttcatctcctccccagttgattacaaagccttgcatccatactcttttctttctggccccatgagaaagagaatgttttaggtaacttcaacttgtaggtttatctgccctt

SEQ ID NO: 47421 - DNA, 1025 bp, Homo sapiens
cagtttcctgaagctcttcccctacacctgctcctctgtctggctaacagagttgtcatgtctcagaaactactcaccactcttgtgagactctcttcccaagcatcatccttcctcaggatgaggcctttttctactacccaagagatcaagaccctttttctaacaagacaaggttatatctactccattttcaagagaaataacccctctggttcccatgcaaatcgcttaaattccttcatcaccagaatctctccaacaggcccaactccagcccagctgtgaacactgctgtcatggagacaactccaaaatgaaagaactatgcaattgcctgaaggtgctaatggagagccagtttactctaatctcttattactaaggaacctctcggtttcgagattaagtgggcagggagacatccagtcacttagttttgcaatgacaggtcttgatatacacagaggccaccaggcaatgcctgatccaaactattctgtatgtagctccaactccaattctgtgatatcctattctggcaggtgggaagagttctattctttgcagggttctggaacattctttcctgctctcaagctcctgacttaggagagtcaaaatcatacaggggttccagaaaatgttgtgtctgatgcagcttctcagtgaatgtaggttgttggtgaaattttcagctttagcatctcactcggggtgagtgatgtctctgtaaatactttcatttgtggttggttggtgggggtgggggtgggagcctgtcgtgcttactctgaattagcttactgggctagctgctgtactttgtaacctgaagtgtactttgactgttctgtttccttcagatgaaaaacaaaataaaaaccgacttcagaaaagacactaccagcgacagctgatgctgtacttgtagcttctctctgttcctctgtacagtattaatagacaataaactgccttttcactgcatctacctctgtgtgtctgtgccctgattctttccc

SEQ ID NO: 47422 - DNA, 1053 bp, Homo sapiens
gaaattctgggttgaaaattctttcctttaagaatgttgaatattggcccccactctctcctggcttgtagagtttctgctgagagatcaactgttagtctgctgggcttccctttgtgggtaacctgacctttctctctggctgcccttaacattttttccttcatttcaactttggtgaatctgacaattatgtgtcttggagttgctcttctcgaggagtatctttttggcattctctgtatttcctgaacctgaatgttggcctgccttgctagattggggaagttctccaggataatatcctgcagagtgttttcaaacttggttccattctccctgtcactttcaggtacaccaatcagatgtagatttggtcttttcacaagtcccatttttcttggaggctttgtttgttactttttattcttttttctctaaacttctcttgtcacttcatttcattcatttgctcttccatcactgataccctttcttccagttgatcgaattggctactggggcttgtgcattcatcacgtagttctcgtgccgtggttttcagctccatcaggtcctttaaggacttctttgcattggttattctagttagccattcatctaatattttttcaaggtttttaacttctttgccatgggttcgaatttcctcctttagctcggagtagtttgatcgtctgaagccttcttctctcaactcgtcaaagtcattctctgtccagctttgttccattgctggtgagctgcattcctttgggggaggagaggtgctctgatttttagagtttccagttcttctgctctgttttttccccatctttgtggttttatctacctttggtctttgatgatggtgatgtacagatggggttttggtgtggatgtccttgctgtttgttagttttccttctaacagtcaggaccctcagctgcaggtctgttggagtttggtgaaagtccactccagatcctgtttgcctgggtatctgcagcggaggctgcagaacagcagatattggtgaacagcaaata

SEQ ID NO: 47423 - DNA, 1033 bp, Homo sapiens
aaaatacaaaaattagctgggtgtggtggcacacacctgtaatctcagccactctggaggctgaggcacgagaatcgcttgaacccaggaggtagaggttgcagtgagccgagatcgcgccactgcactccagcctgggtaatagagcgagatgcagtctcaaaaacaaaaacaaaaacagaaaagccagtaagatggctacccctcagaaataaagtaggaagctgctacaagctagatttttaaagatattgctggttacaaaagttcctttcttctgtggcgtgaactgtccaggaccctcatactggaaatgtcttggccttatccagctggtgccttgctgcaagtcccaaatcacacctgcttggctgtgcatcattttcttgaattttgtttatccaacgactggataaaatgacatcaagtaatccatgttaaagaagtatctctaggataaaaattttgtgatttggctgtcatttccatcaaatacaccaactaaatcgtagatgctctctttatcttgccctcttgtccatatatactaagactaaaaactaagtgtttgcaaaaaagaatacaaaaaattttagcacagcagaattttcctcagaatgaagtctggtattcttatttacatgttcaatatttctcatttatgcttgaacaagaaacaaggttggtagcccttaggcaaactagagattctggctgtaaaaccgtttgaaaagggtacatttctattcaaggacatgggaaagccacatttaaaaaaggatgttgcttctctacacgtaaaacttgttggaagacagattatcctcctagaagagcagatgttctctattacaaaagaggaaaagcatttagactcttccggtggtgaatagaggccacaggttacagctttctttggcctttgcttttaaaaaaacattctgctgaaggccttttgttgccagtggtgtccagccggttgccctttgtatttgatgatgacgacattgaaaggattgttttgtgcagggac

SEQ ID NO: 47424 - DNA, 1033 bp, Homo sapiens
ccaccacgcctggggaaggggcctcttttggtgaaaaggcaagggcactactcctattcattagtgttctacgcttacgacctaatcacctcccagaggacccacctcctcattccattgtattgggaattagtcttcaaaatatgaattttagggagacacaaacattcagaccctagcagggaccctggaaaggattctcattgtgcagagtatggataaacagtgatgctagggcagtttttccagggttgtcagaaagggctgaactagaagtttccccactgtgcctggagtgccctgggttggttgagtgtagggtttcgaagataattttgtcaggactctttagtttttagtcttttatgagttagaagagtgtgcatatgtaactgccaccataccacagcaagttccagcaagagagaggattcctcaggtggccatcctatccaaactccatggctctttccagggcgtttgtgggaaacctgtggggctaggactgagctagactttttcagtagctgagactggtcctgcagacccatgaaaggtgccatgccgtcacccagtagggggcagggagggaccctcatttgcccctcttcccgcccaacagttgcctgacttcagccttaatgcatagctcatccagagtcctcctgagctcccacctggtgaggtgtgtgtagaaggtgtgaggaaggccaaaccacattttcctggcagtggttaactgaccgttttcagcccgcctcccagtgcagctgactgcgtcagcttacattaccgtgatgtcattcccatggtgggataatatagcatcttactttgtctggagtggtgcctcccataagttttttgataccgcctacaaatggagaaagacatcattgtttagccatttttatttgggtgggttggaggaatgactttcccaaaggaataaatcttagttaatattccagaaaattcaagtacttttcaaccctaattgaaaggcactctgtgtgcgtgaattaaaatcaag

SEQ ID NO: 47425 - DNA, 1025 bp, Homo sapiens
cacacgcacatacacataccatgtagcattctaatttttagaaccagaaatgagcttttaaaaagtcaccataggctgggtgtggtggttcacgcccgtaatcccagcacattgggaggctgaggcaggtggatcacctgaggtcaagagttcgagaccagcctggccaacatggtgaaaccccgtctctactagaaatacaaaaactagctgggtgtggtggcgtgtgcctgtaatcccagctacttgggaggctgagacaggagaatctcttgaacccaggaggcagatgttgcagtgagccaagattgtgccactgcactccagcctgagcgacagagtgagactccatctcaagaaaaaaaagaaaaagaaaaagaaaaaaaaaagtcactgtaagagatgaattagaagaatgtgtcttgaatgcgggcacaatttatttttgttgtcaattgacaatcttgaaaaaattctggccgaatgtcggtgtgccagctgtttcatgcaccagacctgtagttcacccctactcttttacctgtagttcatccctactcttctaaggcttgaatggaaaataatttctaatttgttgtaaaatttaccaatttggtattgctgctgtaaacaggattttatctagggtttagatgccttatcttcaaattccactatcaagctagtacataaaattgtttgaaaactgaatcagatgtttatgtaattcataaaaacatataatttccctctaatatttcatttttcctaattataaaaataatgcatgcttattatagaaatgtagacataaaaaactataaaaagaagaaaagaaaactcaatccaaatcttaccactcagaaatgacgtgccactggtaacatttagacttatttcctcctaatatgtatattttaaactgccctcattctctttttttctttctttctttttttttaacctctatagtcgctcctgtaaaagctgcccctatgcttgtaacattattctacaatggactt

SEQ ID NO: 47426 - DNA, 1060 bp, Homo sapiens
ctgtggcagaagtagaaattgctgtcagccaactgattttctgattcttctgtctataaaagctgtgcccattgttaacttaggtgataagttgaatttttagtttttttaggttttttgtttgtttgtttgtttttgaggtggagtctcactccgttgcccacgctggagtgcagtggtgcgatcttggctcaccacaacctccgcctcccgggttcaagcgattctcctgcctcagcctcccaagtagctgggattacaggcacccgccaccatgaccagctaatattttgtatttttagtagagatgaggtttcatcatgttggcaaggctggtctcaaactcccaacctcaggtgatccacccgccttgggcctcccaaagtgctgggattacagacgtgaggcactgcgcccagccaaatgttaaaagtatttttgagcttctcagaggaaaccaatgaactgaagttcaataatctgtggtttgtgttacaatattttgaatccttccggagactgaatgaaagatacatatttaaagtgaatgcagtaagtaggaagaggcactgcttcagcctggtaacatgcagttattgctttgagggtcttgcagaaagaatatgcacattgagtaagtaggagaaggtgtgtattttggaaaaatcaatcaacttagttcaacttgaaggttttcctatctgaaaagggatgtatcaaaagatattttttcttaggaggaaaaaatccacaactcgcaccagagcatttcattgagaattactgttatttacgttttggaatttacattgttaaaaagagagattttggaaaggcaggggtgggactagaattgtggcttgcatgttgcctataaacatagattcctttttttagatgtctgtgtttcttagtggattatgttcttaaaatagaacataccacattactctctggtttggcagggtgtggtgttttgtttactgcttgggtcaatgttctatgaacatgaatcttttcacagagaatcccagggctaaaagaattcttagaggtgagc

SEQ ID NO: 47427 - DNA, 1020 bp, Homo sapiens
ttacaaacatgatggaaggcaaagggggagtgagcacttcatatagccagggcaggaagaaagggagtggggaggtgctacatacttttaaacaacaagatcttgtgagaactctattatcggaatagcaccacggggcgggggggcgggtaatctgcccccatgatccaatcacttctcaccaggccccacctccaacattggggattacaattcgacatgagatttgggtggagacacagatccaaaccatatcactcctttatcttgccatgcctttgtcttctcactcttctgcaaaaagagctttggggtttactgtagcaaataatggaaaacattaaagaagtattgttagcatagttcttttgctttcaatttttacctaagttattgtccaattttacattctgaatggtgaactgggtggcctggccacactatttggctgcctctggcaaaaacttctgccctcacttctgaccattacattttccccctaccgtatgtgtagtactctggattggtaacgtttgatgggaaagaaaacaaaatcagaaagcaacgattctgagagcaggaataaggaatgttaagtcccctttttgacggctgggctttttttcttatgccaagtttaagtgcaaagcagcagttcccttgtgccctgggacttttgcctaggaacaagggactgccagaaaacctcagaaaatccccatggagatgtctctgaaaaccatgtaaacagggacattgtctaagtgggtcatcctgaatatatgatgcaggatggaaacctatttagttattgaatatttcagattaagaggacaccgcagccttgctttgcacaatcttgctagctttgtgagtttcactggggattggaggggaggcccgccttcaacttgagctgcttgtgttttggttggtggtaatgccttagaaacagaaaggagccagctccccttcagccactcaggcttctgcctgggtttccttttaaccctggaattt

SEQ ID NO: 47428 - DNA, 1188 bp, Homo sapiens
agtggctaccatactggatagcagagatacgttttcatcattgcataaagttcaattggacagcactgatctgctgcgtgtagggatctgctttatctgaaaacttgatgcagaatcacggctagttcaaagaaacttgcagaacatttcatgaaaattaaatttctctatggtgaaaactaggggtcaagtagcagatgaatactggctgtgagatgaatgcataaccagaacctcccattcccctttttccagcgtctctcctatctcccagcagtgctttatcactttctcctctcaagttgataaagagaaaggaagaaagaaacagagaagtcggtttatgttcataattaacatccatgaactctgcataattttttcccctctctttacaggtcctcgaggccacacgggttaatcgaagaaagagcgcactggctttgcgctgggaagcagggatctatgccaaccaggaggaagaagacaacgaataaacttccttcaacccaggaagcgtctttggtgcttgggagaccaagaaaccaagaaattaacaactgaaagcattttaatggactatttattaaagtgcaaacaaactcagcaatccttatgtagaccagaagctgcaatatacaatgatgaaaatgaaacgaaaaggaagtccccccatcagactctggacacccaggaatcaaaagagaaaggacttttttggtgactcaatcccagtgtctggtttggggccaatctacaatggatccaaaaggacaaaacatgttacaagcaaatcaacatagttgctgcaggcggaactgagaccagcctctctgggcgatgaaggacaatggtggtagggccacttagagagcagtagggcccaggctggtgcagcctacatggcacaggatatttccctgcaccagtttcccacctgtcacttgcagcatcagagggtgttgcattaactccattttctccagcagccataaaatgaatggcgtttctctccatatttgcccagaagaggcagttatgattccacttctcctacatttaattatttttaattgagaacaactcatgatcacaattcataaaatccatattttaagacaatagttcttcatgtcacaaacacaatctattctacatgaggaggctgagaaaggggaagagaaaaac

SEQ ID NO: 47429 - DNA, 1102 bp, Homo sapiens
taaagaaaattatggctgggcacagtggctcacgcctgtaatcctgacactttgggaggctgaggtgggtggatcgcctgaagtcaggagttcaagactagcctggccaacatggcgaaaccccgtctctactaaaaatacaaaaattagccaggcatggtggtgggcgcctataatcccagctactcaagaggctgaggtaggagaatcacttgaacccagccggggcagaggttgcagtgagccgagatcgcaccacttcactccagcctgggcaccaagagcgaaactccgtctcaaaaaaaaaaagaaagaaagttatccttttaattgagcagggcttttctaggcctttgctggtatgtgtgtggatatatttctctgaaccaaaccaagaacgatgtttttaggactaacaacagtttttttacttatttaatgccttaatatttcttcttgacagtttctgcaggactgtaaactggattcctggaacctttgatattcctggctgtgtatagtgcctgttggtggactgtactgatactcaactagagtgtgaagggactggattcctgcccctgagacacaatgcaagctgtagtgcccttgaacaagatgacagccatctcaccagaacctcaaactctggcctcgactgaacaaaatgaggtcccaagagtggttacttctggggaacaagaagctattttaagaggaaatgctgctgatgcagagtctttcagacagaggtttaggtggttttgttactcagaagtagctggacccaggaaagctctgagtcaactctgggagctctgcaatcagtggctgagaccagacattcacacgaaagaacagattttagagcttctggtgtttgagcagttcctgaccattttgcctggggagatcaggatttgggtaaagtcacaacatcctgagagtagtgaggaagtggtgaccctaatagaagatttgacccagatgcttgaagaaaaaggtgagatttatagatggagggaggaagcgggagacattgcctcaaagtccgaaagtaaattcctcaaaagaaggcaatttactgctaaagaggagtctg

SEQ ID NO: 47430 - DNA, 1028 bp, Homo sapiens
agctttctttggaattcttaaaaacttgcatgctatccaaaccattctttatatcctatccaggctgggcacagtggctcaggcctgtaatcccagtgctctgggaggtagaggacagaggattacttgagcccaagagtttgagaccagcctgggcaaatagtgagacaatgcctctacaaaaaatttaaaaataagccaagcatggtggcacgtgcctgcagtcccagctactggtgggaggatcacttgagcccaggaggttgagcctgcagtgaaccatgaagcaccactgcactctaacacgggcgacagagccataatagcctgtctcaaaaaaaaaaagtacttaggttctatttgggaataatccaatacaaaagagctgtttggtgttctaggaatctataacattgaaggatgtagctgtgaacttttcaagaggagagtggaagaagctggagccttttcaaaaggagctatataaggaagtgctactggaaaacctcaggaacctagaatttctgggtaaagacaccttttcttcattacctagcgtttaaccttgggtctctttttgttcccttttattgaaaggtaagtgctgtgtgaagtacttggttttggctggggacccagggactgataggactaatcctaaaaactggttctgaaaatgtgcttttctgcagcgtatcttctagaaaaggtctttgcttcattgaattggaaatgtgaagcatcattttgatttcatcagtggaataccttttcccatttttgtctcaagttccagtatttatgtctgtgtattttggtagcatgtttttatcttccttggagaaccagaggctatatgtgaatgctgggatatctttactctatgcaaaacagcaattttctgttcttttctctatgagcagactttccagtttcaaaattagagttgatttcccagctaaagtgggttgaattgccatggctgctggaagaagtctcaaaaagctcccgactaggtgagttggtga

SEQ ID NO: 47431 - DNA, 1066 bp, Homo sapiens
acaagggaactctttttcttttgggcattggccaacaggactgagaagccagagagcttgcacctgagccatctcagccgtgagagtaacagtcctaggaaaatagatgggggctgggggtaaggaaatgtgctgaagacagagctattctggatggattttggtttgcaaaaattctactttaaaacaattttgcctgtagcaagtacatttttttgcaattggagtgtaaacattctgtgtggcaacagttaaaagctgttataacaatttgcttgggtgtgtgtgcatgtgtgtgtgtgtgtgtgtgtgtgtatacattgttgccactatctaaaattagggcatttcatactaaaaacaaagcttgtcttaaaaaaaattataagggctaacaacactgggcttttatttatgtaaagcactcagctggtcctgggtagcagctgccaccttttgatggggaatcaactttctgacttagctagttctctcatgtatgtcacctgactttcccactgtatgaatgttctattataacccctaccatttggagaatagataccctaaaatctaaagagactgcactgatagcaagtaaagttcagggaatgaatgtagaattgatacagaaaaaattttcagttaagttttcttttgtgaaattagacctcagaggaatggaatatacgggtattggtggattattccttataaatttcattggtggagtctgaataataatttccaactgaaaaaggaacttaaggccctgaatgagtgaggttttggcttcaggtcatagggttctggaggaaccccatggactcaacagtggtctagaaataagttcctaaagttgaaattgtgggcacctcctataaaaagagagctaaaccagaaaactcttcacttatggaagtaaagcgatccttaatgctaatcttagactcaggaacatttactgtgactaatgtatgtaggtgtgaaatgctacctctgggagaaggtttttggtgcctccccaaccccaagcctgcagtttaaatattgccgtgtgataaat

SEQ ID NO: 47432 - DNA, 1033 bp, Homo sapiens
aactctgttggataatatttatcaaagtcttgatttcagtagttaagtctgtataattgcctgcaggacattcagtctggcccatcacccaaatatttaaattcacttttggattaagtcagattatcaaaaggctttaaacgtcttttgattcattataggattgcttttatgaagagcactgtgacacattttactttaaaatgaagtccttgctttaaataatgtttcctcttaatgagcgtgtataaatttttttcatgtcacaggacaaggcaaggttttggtcaataaagtcattttatttattttagaattattttttaatgtagtaagatacatatagcttaaaatgaaccatttaaacactttttggttatacagctcaatagcatttagatagatgcacattttgtgcagtcatcaccactatccatctccagaactttttcatcatcccaaactgaaactctgtactccttaaacagtaactccccattttctcctcctcaggctcctggtaaccactgttctacttcctgtctgtacaaatttgactgttctaattacttggtatgaatggaatcatacaatatttgccctgttgtgtttggcttattccacttagcattatgttttcaaggttcggccgtgttgtagcacatatcagaatttaattcctttttaaggctgaataatattccattttacttgtataccacattttgtttatccttttatctgccagtgaacatttaagttgtttgcaccattttggctatcaagaataacattgctataatcagtggtgctttctgttcttttaagtatatgcctagaaatagaattgctggatcttatgatgattctatatttaacttcttgaggaagtgcaactacactattttaaattcccaccagctatgtacaagggtttcagtatccccgcccttgctaacacttattttctatttcttttttataatagacatcctaatgggtttgaagtggcatcttattctagttttgtttt

SEQ ID NO: 47433 - DNA, 1097 bp, Homo sapiens
taatatatccagaatatataaagaacttttcagataaatgatttgcaaatactttcttccattctgtgtgggttgccttttcattctattcctaatgccctttgaaagaaggttttaattttggtgaagtttaatttttctattttttcttttgtttcctgtgcttttctggtcatacccaagaaaccatggccaaatccaatgtcatgaagcttttctcctattctaggagttttatagtttcaggtcttatgtttaagtcttttaaccattttgatttttatgtatggtaaagggtccatcttcattcttttgcatgcgaatatccagttttcccagccccatctgttgaagagactatcctttccacatcatgtattctttgcactcttgtcaaagatcatttgaccatatacatgcatgtttatttctggctgtctgctctgtttctttggtctatatgtttgtctttatgccagtaccatgctattttgattactccagtaatgttttgtaatcaggattacactacgtttcctgtagtatgtttttgaaatgaggaagtgtgaggcctccagctttgttctttcccaaattgttttggctatttgggggtccttaagatttcaaatgaattttaggatggtttgtttgtttttgtggaaaatggcatgaagattgggcttgcattgaatttgtagatcgctttgggtaatgtggacatactaacaataacaaacattacagtctgtgaaccccaggtgtctttccatgtatttgtgccgtctttaattttttcagcaatgtgttacagttgtcattgtacaagtcttttgcctccttggtcaagtttattcttgagtattttatgtttttgatgctgttgtaaatgggtctttgttagtgaagcataactgagttttgagtgttgattttgtatcttgcaactttgctgaatttgtttattagtcataatagtttcttgtgaaatttttgggatttttaaatataagattatggcatctgcaaatagataatttttccttcttcctaatttggatggctttaacttgccaatggctctagctaggacttcc

SEQ ID NO: 47434 - DNA, 1084 bp, Homo sapiens
cacaactacaactattgacatcacaaactactactattatgttattggaactaactacttagcaaatggaattgatagttaatgggttttttgtttgtttgcctgggagcattgtggaaaaatggccatggtactacagatcctgtaactaagaaagtcaacctctgtcttagaagtcacttctactcttccgttgcccagagatcaatcatataaccctaacctaacttaaagggaggcttgaaatacagctttcccctcattgtggtgagcacatagattatttctaccacagtctgttctttcggtcaccaaactctttcttcccacacttaatgcatacagtagcccccttatccatgggggatatgctccaagacctcgagtggatgcctgcaacctcagatagtaccaaaccctgtatgttctatgttttgtcagtctgataacccaagaaggctactaagtgactaacagacaggtagtgtagatgacatggatatgctggacaaagggataatttgtgtcctaggaggcacggagcaggatggcaagaggtttcatcaggctactcagaacatactggaattttttatttctggaattttctatttaaaattttggggccaagattgagggtaactgaaaccacggaaagtgaaactttgaataaggggagaccactgtattttacccaagggagacaatccaaagtctaatctgctcagggtctacaactgaagtccagggtctttgagttagatgctttgagtgtgacctactttttgcctttgggaccctaaatgtcagtgcctgttaatttttctttgagaagtgtaatttctccagaggtctgctctttaatttccccagagaaggatgttctagtcagcatgggggatataagcctggctaccattactggcgagcaggcagaggcacgccacatggtgggataggagttggagttcatccccttttattcagacttccacttagtatcctgtttttagtcttctatcttatttccatcctcctccaggcccagggtacccaagttaatagcctatcaagttctatttgg

SEQ ID NO: 47435 - DNA, 1083 bp, Homo sapiens
agccctggaccagtgtgtgaaatcataatgggatttactagggatagtaaaattgataggattagggatgttaatcatgttaatttgtttcaggcgcgagatggtaataaggttgtggtgcttgaatttaggttgagtgtcaggaatgcagtagttgttaggatgatatagataattaggttaaagatagtgatatttggattgtatatcagttatcccattatgatttcacacactgctttataaactaagaccatgcaatagtatttagtgtgtttgacttttggggatttagggagtttatggactttggaagttaaacaagtggacgcttaccctctgtgtcaacccatcttctggaagatggagaacttccagaagagagggcagcagaaacactgccagctgttgccttctgctgggctttgtaggagtggagatgagtagttttggcatgagaatggtgagcatgttggtaagaactttgaaaacaagtgccatgattagagggtagaaatagtgatggtagagattcctgctgggagggccaccaggagagactgatcagtgcccccatcccggaactgatctgatgaatctatatggttgcctctaaaggtttctacccctaaagtttaccactcattgtcagctaatgaaaagctagataaaataagtgatccactcaagatcaaggaacgtttaggcagttaaagaccagtatgtctggagtaggtaacacttgtactcttgactctgacgggtttgtgatagctacaaatatcttggaacaggggagtggaagtggagttgtactggtggaggagggaatgaggggagtgttctgtagctcccccagaacgcccactgtcttactgtggaaattatctgtgagacaaaagggatgtctggagatattttggaccctggaaaatcagacccagcagaactctttgaaaacttgcattttaaatttatggagatgaacatatattcatcttccaagtggagcacctccaagaactatttacctcattgaagatgctctctcttggaataaggataaggactttgacttgctgt

SEQ ID NO: 47436 - DNA, 1083 bp, Homo sapiens; identical to SEQ ID NO: 47435

SEQ ID NO: 47437 - DNA, 1083 bp, Homo sapiens; identical to SEQ ID NO: 47435

SEQ ID NO: 47438 - DNA, 1083 bp, Homo sapiens; identical to SEQ ID NO: 47435

SEQ ID NO: 47439 - DNA, 1050 bp, Homo sapiens
ttgataataaatgcatcaccaaaatggaaactataattatgtaaaacatcagtggatttatgattctgaggtggttttggtcaaataaatgcccttttgagggggttttgtttttttttttaggtggtggtggttaaaaaataagtacactaacatgacttaaatacagttggtaagacaagaagatatgacatttgatcatcactattttagcaaaaagattttacctgtgcatggagaaatggaggaaaaccaaaaaaaaagaagtgtgggtaataatggaaggcaaaggcactggcctcatgctttcaccaagtcatgcttagttcagattcccaaataaattacagttccagatctcagcaaaacttcaaaccattatgatttcacacactgctttataaactaagaccatgcagttgtatttagtgtgtttgacttttggggatttagggagtttatggactttggaagttaaacaagtggacacttaccctctgtgtcaacattggatctcatgaggtagaataatctggtcccacttacatgtttttaaagtggctatagcacttatcacactgcatttaagtactgagtaggtctctctttcctactaaaccatgctcctcattttttgtgcgtatatccatagcacctagcacagtgtctggcacatcagagcattaatgttataaaaactcttatctggaggcattcagatagaatggaaatggaaagtggatttctggcattttgacattggtatgtgcaacgccctctgccatttcactcaaattaattgcagttttaaagagtggtatagataagtaaattggacggttatgagtgaaaaattcctgcatgagagaaaaattgcacttctacttttaatgttctgagggtttttaagtgagaatgataatttttgaatgtagataaaaattggataatacatgaaatatgagaaatggcatagaaataagcagatgagagaacaacttgaaaggatgcacttagaaaaactatgattggtaaaaaatgcaaaagcgt

SEQ ID NO: 47440 - DNA, 1050 bp, Homo sapiens; identical to SEQ ID NO: 47439

SEQ ID NO: 47441 - DNA, 1050 bp, Homo sapiens; identical to SEQ ID NO: 47439

SEQ ID NO: 47442 - DNA, 1050 bp, Homo sapiens; identical to SEQ ID NO: 47439

SEQ ID NO: 47443 - DNA, 1046 bp, Homo sapiens
aaaggtaagatattaaactgttttaaggtttaagctatgttagccacagtagcatattttcataaactatgaattcaagcagtcacttctgccaaactgaagtttttatgacatcgccacccatccagccttgctggtgagatggagacctatgtagtggagagatgcatattgcaaggaaaaaccttcacaaaagttcactcgtttttgaaataatgtttactgaatgccaggcactgtactaggccttggagttaccctacctactttccagaacttctcattctaagaaaagaaaaaaactgatgattacaatgtgataagtgctataataaataggtaccaagtgtaataagaacgatccaactgtctggggcagtaatgtttacattctaaaggattaataggactcatgaggttcaaattagagagaaatagacatttgaagacataggtatgaaaaggaacattgtgttggaataacacaccaaattccagaaattgctgtctgaatgtttgctatgggtaaaagaggggaaactgataagggatgttgctaggtaggtaagtttggaccagttgtgaaggcctggtggcatgcaaaggaaattttaactttggccatgggaaagcactggagattaaaaaaaaaaaaaaaattgtgtggctaccttagttcaagatgagtacgaaaaaaataagaatgtaccttagctttctacttgagtcccagaaggatggtccttcttattatgtcttttctttgctaatattcttggtatcctcttgttcttactaggttgattctaaactttgtaggttactaaagagcagaattttgacttaggctgttgagaactcctaagttttacctatttgtgctgctcttgattctaaagtatatgcatgcctcactgatcatcatcagtatgcatgaaaactgatcattttcttcattttggagagaaagctttaagccctagaatggagataaaataagttgaataaatgctgtaacgaggaagtggccaactttttagtctaat

SEQ ID NO: 47444 - DNA, 1696 bp, Homo sapiens
tgatctcagctcactgcaacctccgcctcccaggttcaagcagttctcctgcctcagcctcccaagtagctgggattataggcatgtgccaccacgcccagctaattttttctattttttttaggagagacgggggtttcaccatgttggccaggctggttttgaactcctgacctcaggtgatccacccgccttggcctcccaatgtgctgggattacaggtgtgagccaccacgcccggccacaaaattactagttcttatacaggttgttctttcatgtttaacactgaatgttaaaatggtaaattgcaaataaataaataaataaataaataaaatgcttaattgtttagtattttaggtgaatggttatcaatacattcactggaaactttttacctaacattatgttagaaaaatgtaaatatgccataaagctaatggcaaatgttcctctttggattgtgaagtcatctagttatttatacttacaggtctacaagcaagaacaagaggaagaattaaagaaaaagttggcaaatgaccccagatggaagagatacaggagatggatgaagaatgaagggcctgggcggttaacatttgtggatgactgaagattgatggaatgctactatgccaaaccttaattgtgatattattttcataactgaattattttagaaatgtatcaattgactgctgctcagcagtaactaaaattcctcaagtatttgattaaacagaataatgtcaaaatttaaaccttcccttaaaactttatacataagacatttatgattgttcaatttttataatctatttgtggattttgttaaaagatttcacatgaagatttattagttgccatttaaaatttttatatgtttagttaaaagatttgacatgaaaatttattagataccatttaaaaattttatgtgttatgtgtttattctttgagaatgttaccttactgtttgtaatagtgctacatttttctgctttcatggcctctgtattttcacaaaacaccaaaaacagcatttaattatattatcatgagtgtgtttctggacacaaacttctgcagtagaatgacctaacatgtcgttttcattgcagtcattataggattgaaatacgttcaaaataacctctctaggaaagtcttctgctagaatttctcccctctattcattataatattctttgtttttaaagccagtcaaatataatagtcttaataagatcagaaactctccaggagagtgagtctaccctcacgtccttgtaggatgatcttgattatagtcttattataggactataactgtattctcaacatttctccagaaaggaccttgtaaaaaggtcttttgtaccacagtattggttttttcccctctctcttcacttaaaaaaaaaaatagcaaggcagaaatagtgtattgaaaagttgttcatctattatgaagtccttgagtggtgaaaaatccgttgtacatgagaacatttctatgcatttaagccagaaacgaggtacatggctgtgtgctcttctgtcaaccaatgaaatgtgttttcacatgtgtggcagtgcaagtaaataacacattatttgactgaatcaggcatgatactgcaccaaagtgttggtacatattcacggtagtaaatcagtacccctgtta

SEQ ID NO: 47445 - DNA, 1050 bp, Homo sapiens
agggaaaaaaatgtgtgacaaaatttgaaagatattctactggttacccatgcattttagctgtagtgagaaggaaagaagggtactctgtctccatccctcaccttccagagctctggaaatcacagcacatgtgggaaaggcctctggtcctctaggtaaaccttgagttctttgtttgagacggagtcttgttctgtcgcccaggcaggagtgcagtggcgcagtctcactgcaacccccacctcccgggttcaagcgatacttgtgcctcagcctcccaggaatctgggactacaggcatatgccagcacgcccggctaatttttgtattttaaattagccaggcgtggtagaaaccccgaagagacggggtttcaccatgttggccagacttgtcttgaactcctgacctcaagtgatctgcccgccttggcctcccaaagtgctgggattacaggtgtgagccaccgcgtctggcctgaattctcttgaaagctaaaatgaaattcttttccctgctcccactttctgtgatactgggcaagtcacttcactttccttagtggatctgtttcctcatctctgaaattgtagatgcgccgcactatctgatggttcccttcaactttgaagttccatgatgcaaaaataatggatgagaagtcttgtggggaaagtgtggagcatcacacagatggtcagccttcctcaagtacaagtggcgcccggcctgcttatccatggatcacagaccattcctcttgaacggtgcaaagtaacactgaggtgggcggggcagtgggtgtgtagggcatgaaggaggcagacacagcacacccctagacttttcctgctacctcgtggctgatacagtatgacatggctgacgtgtgtcccttcattgagggcaactccaaagccttcatttctaatgattttgaggtaatctcattatttcagctgccattgctgtggagacatcttcacattaacatcttggctactaaacattttcagcagcctaaaggcatgtagcaatgccatgga

SEQ ID NO: 47446 - DNA, 1027 bp, Homo sapiens
attatttctcagatgaggaagcagctactgagacgttgagtaacttgcccaaggttatataggtagtggcagagctgaatttgagtccacgcagtctggttccagaggctatactcccaaataataagctataccgcctcaaaagcaaggcggaagaactttatcacttgtttggagcagactgaataaggcttcagacttgtaaacattaagacaatttgctcatttggcaaacttggatatattgatgcatgttttatataagtaaaaatttgtaaagggaatgctagaatgagctatttctttacccgttcagtctcaaaactagatttctaaatggatcaaagatacagctttttcttgtcttcgttgaataagcaactaaaccaaaaaatatctaaattgacgttcatggaaattgtaaccttttctctttgtagttcaagtattagaactttcagcagaaagagacttttggaggtcacaaaaagttgatatttaccaagttggatgatcgttttcagaatatccttgactgccgggtggcttggctgtgagcagggtgccatgttgctgtccctttgtttcaggtctctcaggcagctgcagagcttcaacagtactgtatgcagaatgcctgcaaggatgccctgctggtgggtgttccagctggaagtaaccccttccgggagcctagatcctgtgctttactctgaagactcgtgagtaatgatacaccatgatgtcttgggcccatagcattatcacagggcttcccaaaggacttgagcaactgagttttgaatgtctcctattcttggggaaattaaaacaagagccagcaaaatgcacaactttccctgaagtgtgattctagtgtatatttaccttgcctgtagaatacatctaatcaggacagtctgaagtctctctggcactaagtcatgagatgccaacatccttctgtacttgagctctttgagttggctggtagtaatttcttcctttctttctttcttttttttga

SEQ ID NO: 47447 - DNA, 1050 bp, Homo sapiens
cataagtgagttactaagatttctatacctggaatatcatgtatgtttcatttactggatgtttacattttaggaaggaaaatagttttgtttatttaaacaactgaatacttataaactgttgttcctggaagttatttattccataaaaaatttgttcttttgtcatgaatttataattcctaaatgaagaccagaaagtacaaattgctgggaggaagaataggctttattaatcaactgatgtcttgatttttctaaatgggaagattgctttatttttaacactaattatgggagcagattcttagcaaacttctttggaaaagttaatgttatgatgtgcattaggctgccccatcgtgtatataaatgaagcagatttgatttttgtattcttacgtttctctgctttgtagttgtggctgtacttaaagaaatacagaatttcatatatttaaaaatgtttaaaatgtgacccacagaacattgtaaatgattaaaaactaacatgaaaatattacaacctaaaagaattcttaacttcacaagtgttttacttcgacgatgtgcctttgatttaatttgggacacttttttagaaggatacattattcgtgtttgcaacggtctttgaagagcttggaaataaaatttctgcttaattaatcatttttctatgacagcaatattttgtgtctgattttgtattaaggactcaaggatttctgtttgcctgtgagattgagtgctggaatgagagagtgaaattgttgtttttaagtctttgtagaattttgcaaatgtcctgaaaaatagataactgtataacatgaagaaaatatctctattaatggcaacatttgttctctgaaatagctatatataaactcataaataaacaaaaatatctgtgagtgtaagtagtgttacaatagagaaaatagaagttattagatgggaactcccttaacttttagctactaaacttctagatctagtgattggaatcccttccattcagtcataattcaggcatcccttttataa

SEQ ID NO: 47448 - DNA, 1028 bp, Homo sapiens
tgtttagacacacaaatacctaccattgtgtttcaattgcctacaatattcagtacagtaatgtactgtacaggtttgtagcctacaagcaataagttacaccatacagcttaggtgtgtagtgggctacccaacctaggtttgtgaattacgctctatcatgtccacagaatgatgaaatcgcctaatgatgcatttctgagaatgtattcctgtagcaagcatgcatgacggtgaaagtgtagtagaaagaggaaagtaggataggcggtgttaagtcaagttaagcttgtttaaaaaaggaagaagtatcaaatgctgaagagaggtcaattaaggtgatgtctgaatgtcctttggatctaagaaggtagaggttaattatggtagtgatagggtgataatttcagaagtcaggaaataaaggtggattatacttgtggtcttcaaacatttttgcttatatgcaacctaaatgaaataatgtcaaccctgtgtacctccattttacagtcggcatctaaatgtttatcataagtttaaatatatataatatatatcataagtttatatatatcatcgtaagtttaagtatatattttaatatataattttattaaaagtctagcattttaacatgaaattatttcattcttcttttaaatatattcaatggaatacaaataccatcatcatttgaaacctaccatcatccatttaaaaatatacaaaccgtactctcctttagtcagaaattttacatgattcttttttttctctaaaatcatacttccaatttaatttccccacaaaatttaatcctgtctcaattacccttttgttgcctctcatctccaaagtcatacttcattggttttgtgaaaatggatctggatcctttaaatatcttttctttgccaactggcataatgctgatttgttcatagaaggtgttggagagatattccaggaggaaggaatgggtatgtcttcctgggtctaacgtggttttctccaatgctaggcaa

SEQ ID NO: 47449 - DNA, 1028 bp, Homo sapiens; identical to SEQ ID NO: 47448

SEQ ID NO: 47450 - DNA, 1031 bp, Homo sapiens
ccttttctgtcctaaactttttccagctctttggtagaaataaaggctgttgaattctttttgatttgcattagaatcagaagcacgaaataaatccaaactggggacagatggtaattctctccagaaagtctcatcttttgaactttcacatgtgaggccttcagactcatctgatagacatttttgctgatcagtgaataaattacctttctgagagtacaatttgttacatgcagtctgctgtgcaccatattgtaagttgaacgggtgattctcttgttcccatatatttttcttaaagttccaatgaagaggagattgagtgccctctagtgaaaagatagggtccgatacatctttatttatgaaaccttttgcttcatgtgttctccttttctgagaatttataaaacgggggacaactgacactctcttctgagtgtcagttggtgattttatagtttcacagttcatttgtgttagacccaaagaaaagacatctgactctgaatcactgtggtttagaaaggagttataagccggtctccttgattctatattaattagaaaaggagtattctgccctatattagatttacagctggagtctttccagtagctggtctgattgtatgaagtcacaggtggtaaaaaacttgagatttcttttagttccataatggaagagttgtcattcaaaatggtggttttgtcttcctgcactgtctctcctaatcctaaatactgataatattcattatgttcttgaatgacagagtctaaatcagaagctgaactttgagaagacaaggtactaatctgattcctattttcctgaggtgacgaaatttgcggtgattttgttatggaagaagaaccaatcttgaatagggaagtgatgctacaaaaatgctaaaaaatgaattaatataatgcaaatgtcagtttagtaaatataaataatgatgcttatctatatggaaagaaggcaaaatataaataggtagtctattcatagatattacatt

SEQ ID NO: 47451 - DNA, 1031 bp, Homo sapiens; identical to SEQ ID NO: 47450

SEQ ID NO: 47452 - DNA, 1058 bp, Homo sapiens
gtgggaagctatggacagtctttgagcaagaaattcaaatcaacagcaaatttttatcaagagactactatgtacctggcattgtgctaggttccaggaataaaaaaaaagaataaatatgtttccttacctttaaggagcttatagtctagtgagtgaaatattcacagctgtatttcggaaatgtaattggtgtctatatgtgatgaagtggggaaagagtagaaaagggatattagttaggaagctactttaaaaatccaagtgtgaggtggtgaaggcctgaatttaggcctagaagaagtagaaggagagacatactctagatacactgcagagttaaaaagaagacttagctactaattaaattagaatagtgataccataaactaagcttgtgggaggatgagaagctgtgttttggacatgtagagtttgaggtacttgttggatattcacgtggagattcccagtagtctgctagaatacaggtgcagaccttaagaaatgtcaggaaaaatttaagaattatactcagaaatgaaagcaaaatctgtgggaatctctaagtttataaagaaaagaatgtaatgtgataatggaacagtgctgagccctgaacttggacaaatgtctaaatttcagagtgggacactgaaaaagggggccaagggaagagactgattagagatcaccaatatattaccctagtatatgtcttaagagttccatttacagcagatacaagcttagtacatctttcataaggaacatttttaatcaagggatatttatttttattcatatcctgctatgtttagagaacatctgagtagtaataaagagaagaaacatgattttaaattcattaaattaaagccttttggaacagaataatgataaaatgtttattaatttgaaaactattctttatttagcttttaaacagtttttaattcatttgcttaacacttttttctcattgggcacttaagtttgagtataattttggtttataaaaaatacttatgaagaaacacataggaaaagaatacctt

SEQ ID NO: 47453 - DNA, 1058 bp, Homo sapiens; identical to SEQ ID NO: 47452

SEQ ID NO: 47454 - DNA, 1032 bp, Homo sapiens
aaagcacacaaaatgttcatatttgctggtaacaaaagaaatgcaagtaaaacatgaatttaaacaaaaattaaatattatttttgtccataaaattgatattacccaaaaatataatattcaataattatgagggtgtagtatagggaaagaagtatacattgatataaactctctggaaaactattcttttgtgatataattccaggcttgaatcacagacacatggagacacatatacagcataatatttagcctatcagaatatatatacacacacacacacacacacacacacatatatatataatgtacacttttgttaaaattgtgaaatcaataacttacttggattctagcagctgaagtatgtctggagtattaagaagtccttcagatgcaaaaaacacatatggaatctgaatttccaaaagaaaacctccaaatctatccagcaaggtgcttcctaaataagagaaaatttataaatatttctcttttattctcatctcccagctctttctctttttttttttactaaacatgaggataagtaggagtagtataaaaataatattcaatgtaaaaaatcagaaacagaataaagacaggcttgaagaagaaaataaaaaccatgttatcctaccgagaaataagttaatagagtttactaataccactatacactaaaaacagagttttgcatatatttccagacttttttcagtatattttcttgcttatactcacacatgtacactcacttcaataaagagaaaaaatagggtcattctctacctgaaatgttgaaacttgctttattcacttaagtatatattgggcatgtgctgtattaaatatatactgatttacataaagattttaaattatgtgcaataacccatagggaaaacattttacagatcaataagaaaagaataaatacctcaatagatacatggtcaaaagatatacacaggtaatttataaaagaatagttacacaagatcaattccaaataaaccattatgg

SEQ ID NO: 47455 - DNA, 1032 bp, Homo sapiens; identical to SEQ ID NO: 47454

SEQ ID NO: 47456 - DNA, 1096 bp, Homo sapiens
attattttctgagttaaaaataatgagattgtataaaaacttattttaagatatttattctaaataaactaataaaaacaaacatggaattatataattttatggctatattatttatttatttattcattgagacagagtcttgctctgttgccaggctggagtgtagtggcgccatctcggctcactgcaacctccgtctcccggattcaagctattctcctgcctcagcctcctgagtagctgggactataggcgtgcaccaccacgcccagctaatttttgtttcatcatcttgtccaggatggtctcgatctcttgacctcatgatccgcccacctcggcctcccaaagtgctggaattacaggtgtgagccaccgcgcctggcctatattatttattagagaggatttattccataattaacttgacatggcaaatataaagacccatataacatgaactgcatttttttctttgccattctccactgttagcatatgatcttaagccaaacaatgaaaaattttttccagttatcactagaataacattatttaaagatttgcataatcatctagagaccaaaagaatgaaaagatacttgagaacctgggtcatatttccttactgattttaataatgaatctgatgttcttaagcaggttgttctttaggagtcaaagaatactcttctttatagcataacaaaaaaatcaatataggaatcaatagaaacttatttacatcactctgatagcaggtaagagaacagagagagcatgattagcagttcattttccagactgggcagaagagtccgaggaggtacagttgttctcagattgatatagggaagcagcagcagtttaaatgaaagaagaaataacactgagtcgcttgggtagggcaatggggagaggcaggggtagtgaacagggcattccagattgggatataacttgaaagtaggagtggaatgaagaaatatctgaaacaagtgaagaaaatgacatggaaaatgaggtatgtcctagctatctaggaaaggactttcaaactaagcaaatctgaaatgcattttaaaagcatata

SEQ ID NO: 47457 - DNA, 1096 bp, Homo sapiens; identical to SEQ ID NO: 47456

SEQ ID NO: 47458 - DNA, 1031 bp, Homo sapiens
tatctctaatatgtaatttagtgccaggcacaaagtatctaataaatgttagtttttttttctgtcctaggtattacagaggatttcttctttcctaagtattatagaggatttacacacaaacacagatatacataaaaatctagttattttaaccatatagtagtattatccatcagtaatatgattacaaaataattccagaaacacattaccatctttacatacatggttaaaaatataataatggactatattctaaactagattaaaatgctattttcaagtaatactttcaattaaccataactaattagaatagatatgatcaaataatattaattattaaaatttttgagggggtctaagaatttatagtatttcttgcctctgagttaagtgtaaaataagacaaaaagtaaaatatacaccaaaatattaaggcagggtctccctctgtcacccaggctggagtgcattggtatgatctattaaaggctaagttggggaatagaatttagtttgagagtcaaatgagcttgctaactaaacaccagaattagacagagttacccacccagtcctagggtatgctggactgggataggataccccactgggtccagggagggcgggggaggtcaggggcactgcccagaaaagagtcatgacatagaaaaaccaaggagaattcctgttcttcttgggcaaccattcccacagcttatgtccaatttattattttgacttacaattcagatcattctttccatcccctctggagagatgtataaaaaggcaaagaggccaggaacttaacacttaattgaggaaacatcaggagtacagaagcattccctcataacattaatgttcttttaattgtttagtaaatgaatggctaattttttaaataagaaaagataaaataatatttaaagatttcagaattttgtgatcttttcaatttttattcttttttacatttcctcatttcttgctgctttccctcactttctgttgataatata

SEQ ID NO: 47459 - DNA, 1031 bp, Homo sapiens; identical to SEQ ID NO: 47458

SEQ ID NO: 47460 - DNA, 1020 bp, Homo sapiens
aaaattatgtaaagtctttattgtgatatataactaatgagattaaaataaaacatatcattcatgttttatatttttgatatctaataaattatgataattctaaagttggaaatgctgttgggaaatggctgcaaaagaattgcttgatacaagattgccacaaaacttccatttgtaaaagacacaattatctgtgaagcacaataaagtgaagtacaataaaatgagatgagcctgtatttttaaaaaaaaaattatatacaaatggccaatgaacatgtaataagatgcccaacatcattagtcagcagggaaatagaattaaaaccacaatgaaataaccacaacacacccattagaatgattaaaatttaaaacactgccaataccaagtgttagcaaggatatggggtaactggatctctcacacattgctggtgaaaatgtgcaatgatgaaattactttgtaatttataaaagtaaacatacacataagactcagcaatttgactcctagatattcattcaagagaaatgataatgtgtggcctggcatggtggctcacacctgtaatcccagtactttgggtggaccagatgggaggattgcttgagaccaagagattgagaccccatctctaattaattttttaaaaataaaaaaaatttaaagagagaaataacatgtttccacaaaaagacttgcacaaaaatatttataacttttattcacaataataaaaaactgggggaaaagcccaggggaattgataaacaaactgtggtatatccatacaatgaaaaattttttaacaataaaaataaatgaactagtgatacacaacatcatgaatgaatctcagaaacattatgctcagtggaagaaggcagacacaaacaaacttatactatttcattccataagtgaaattctaggataggggaaacatataatacatagtgacagaaagtataccagtggtcgtcaaggaccaggggggtaggttagtgaggagg

SEQ ID NO: 47461 - DNA, 1020 bp, Homo sapiens; identical to SEQ ID NO: 47460

SEQ ID NO: 47462 - DNA, 1221 bp, Homo sapiens
tcacttgaacccaggaggcggaggttgcagtgagttgagattgcaccactgcactccagcctaggcgacagagcgagactctgtgtcaaaaaaaaaaaaaaaaagagagagagagagagagagatgaagcacagatacatgtgacaacacggataaaccctgaaaacattatattaagtaaaagaaaccaatcacaataaaagcacatattgtatgattccacttatgtgaaatatccagaataggcaaatcaacagacagaaagtagattctgattcagttagtccgttttggagcctgagattctgcatttccaatctatttctaggtagtgttaatgctgccagtccaaaggcctactttgagtaacaagatgcgagatgatctctaagatcttttttcaccttatgaaacaataatttagttttcaccaaactagcctaattattgcctttgctaaacacttattgcatattcctgtgtctatgcctggagacatgctgtttcctctgcccaaaatgctttctctcaagttaatttctctttgattgcccagcccaagctcaattcctacttctgtgaagctgacctctcctagttataaatgcacagctctaccaatctaactcataaggtgaaaagacatcttagagatcgtctcgcatcttgttactcaaggtaggtctttggactggcagcatcattaccacctagaaatagattagaattgcagaatctcaggctccaaaacagactaattgaaccagaatctgcattttaataagatcctcaggggattcatatgtacagtaaagtttgagaagcactgatccatcatcatcatactgataaaatgagggtcacaggtaaaatgaccagcaaagtagttagcacttgacttttccagtcaaggcttaaaagctacatattttaattcatagtgcagagcttttttcactatgcctttctgcttcctcgctgctaggagtttactcatatgatacatacttctaattggctatatgccttgtaatagactttatgttggtcatcctatattaccatttaattcttgcattgttaattttttctatgtttatctattattttcctaacctgactttaaattcctaggtgacagagatggtatattgggcttcactgtatccagagtctagacacctttcaatgtttttttgtttcttttaagcacaactaagg

SEQ ID NO: 47463 - DNA, 1221 bp, Homo sapiens; identical to SEQ ID NO: 47462

SEQ ID NO: 47464 - DNA, 1033 bp, Homo sapiens
atatatgtaacttaaattgtaaaatataatgttcacatagaaatataatgtttacacagaaactgtaccacaatgtatagttataaaaattattttaaggaaatgtccatggagcctcccctcaagtgaagaaacagagcattggaatttcagaagcccgcttttcctttctaatcacaactctccctagaggaagtctccctctagacctagagattactataattctgactttatggtaatcattgccttgcttttctttaaagtgtttcacccaagtatgcatttctaaatgacatagtttgcctatttttgaatcttggtgtttgtgttactttggttcttgcttcttctattcagtggatgtttattgtatatgatgattcaatttcatcaatttcattcgatgtattatatatgatgatttcagttatatatgatgattattaaataggatacaatagtatcctgttgtataaacatacttcaatttatccattcaactgttgatggacctttggattattctaattcttgtatattacaaagaatgctgctacaatatccttgtacatgtatcctagtacacatacatgtttctctggaatatagatttaggaaaatgttttggattattgagcatacatatcttcacatttattgactaacaccaaactgttttcctaagtgattataccgattcacccatcagtaatgtttaacagtctgtactgctctatatcctcaccaactcttagcaatttcatacttgaaaatgttgagatctagtagatgtctagttgcagcaaaggctggaagatgcagtgttcattctgaacagttatgtgcatagttactatttggaaattctattattaatataagaaaaaaacatatattgggaaatacacagcaatctctgccacattcagaatactaacttaaaaatagctgccaggctgggcaccgtggctcacgtgtgtaatcccaacaatttgggaggctgaggcaggaggatcacctgaggtcagaa

SEQ ID NO: 47465 - DNA, 1018 bp, Homo sapiens
aaagagtaataaaatgatttaaaaaaaaaaaaagggccaggtgtggtggttcacgcctgtaatcccagcactttgggaggccgaggtgggcggatcacgaggtcaggagttcaagaccagcctggccaacatggtgaaaccccgtctctacttaaagatacaaaaaattagccaggcatggtggcacactcctgtaatctcagctactcaggaggctgaggcaggggaatcgtttgaacccgggaggcggaagttgcagtgagctgagatggtgccattgccctccagcctgggggacaaagcgggactccgtctcaaaaaaaaaaaaaaaaaaaaaactgggggaaagggtcctgatatctaaataggtagaggccaagaatgttactaaatgccctgcaatgaacagaacagactccatgctcccggagaatgatgtgttccaaaataagaatagtatttactactgattaaaggaaatttaagaaatcttgatctagactaatctagtcccatactcttcacactcttctagtcgtatatatgaaacctacctcatttcctgcaggtgacctcacattctgcttgagtgggaggttgtctctttttatctcataatgtctatttagcctcatttggcattttcttactctcttctttctgttttcgttctaagatattctctttcaatctctgtgacttatcttattccccaaattatttatactgacaaaaatgcattctgtatcacagaatacaaacagataaaaaggcagagtactatttcccttagatgcaatatctcatccccactcacctcctccagaatttagttcgtaggtgttttcctgtcatgtacatcttcatttcctctcctataatggattttctgtgtctaaaacgtggttcattatattctatcctaaaatattttctaacactcttattttgaaccttctacttttaaatttttctgtattccctatgactccactacctctttcctagactactgtaa

SEQ ID NO: 47466 - DNA, 1054 bp, Homo sapiens
ctgaagtcctctgtatcttcagcctctttttcctgacataattgatgcaggttctcccctgtagacatttcccccacagtcctttccatactccatctaccacaggaccagaaataagatgagcattcatcttacatcccaatgccttctacagacccttgcttctatgccctcaagtaaaaacttttcttctgttgaatttcaggctgccacattaaaccacagccctcttccttgacctactaccatcgtactggccccgatccacctcgggtcccacaatcaccatgagtgaccacagtgtccatgtacataacccatccaacagctccttgaccttgtcaaccctatgacctccatgtaactttagtcacccccattcttggatgaatcttggatctcattgattgcctcaaattactccacctccagaaacttaaattctagtatcctatcctcttcaactttccatttctctcactcatttctgcttctagacttactctttgatcttaacaagaccttcctttgatttttccattttcttccagcctatgtgtctctcccctatccaacctaaattcttggctcttcaactcaattactgtgttgacaaaactgtctatttttttgtcccctcaaccttcatctaacccaactggaaaaacagctagaccttccatgaagcagatccctggtcatttctctctcctattcccccatagcaatgaactccttcattctctttcaactccctagttcctctgtatcccattctacctcctcttataagatgatctcatttaataccttacaaaggaaatagaaagtattgaagagtaattaccttaagtctctgttcctcaactccagtatgcaaaattaccttcatctgtccatatctttttctctttcctctcatctaaagctaatcctcttacctaaagctaatctaaaactagagccacctgtactctgaattttaccctgtctacctcatcatgggcctgattccatcagttaactctctggtatcattagtgtctctgtctct

SEQ ID NO: 47467 - DNA, 1028 bp, Homo sapiens
ctgaggccaggagttcaaaaccagcctgagcaatatagcaagaccccatcgccacagaaaaattttaaaaaattagccagaggcagtggtatgcagtgagctatgattgccactgcactccaacctgggtgacagagcaagattgtatctcaaaaaaaactagaaaaattaaactagaagccgtctgttccaccctttggccctttcactcactgtcaggtttcagtagaaactagtgtttgtttactgttatcacatttcaactcccattcatttactttttaaccgatttttagctgtctacccttatcctccatgaactgccccaattcttgccaaaagtgctcagagatagcagcaagtacatatgtaatctactggacattaccattcttaccttggtctctccagcagcattcagtgttattctttcttgaaccctttgagaaagaaaacagcctggccagataaacccttctgtcactttacttgcatcctggctgtctttctgcttctttgatccccacttttagtctccttcatgcattactctttttttttttttgagagggagtttcgatcttgtcatccaggctggagtgcagtggcacaatcttggctcactgcaacctctgcttcccaggttcaagcagttcttctgcctcagcctcccaagttgctgggattacaggcgcaccaccgtgcccggctaatttttgtatttttagtagagacggggtttcaccatattggttgggctggtctcgaactcctgacctcaggtgatccacccgcctcagcctcccaaagtgctgggattacaggcatgagccactgagcccggcctctccttcatgcattactgattcaataataatatattccttcttggccatcttctaagaatgctgtgcctcagagagcttgtgtatttaccttacggtggatggcttctgtatttttatctctaggctaaccttacctgctgagctctctgtatctgtttatttatttactcttcatttatt

SEQ ID NO: 47468 - DNA, 1056 bp, Homo sapiens
tgattgtaactgtcattcctagaacttgtgtggttcttttcatattatttgtggtcatatataatgatttccctcatttccttctcttctcttgggttttgttcaggtacacagggaggttgcattcttggcccaaacccacgtggtgaggtgttctccaagaagacttttttcttttttgtttttgtttttgtgtgagatggagtctctctctgttgcccacgctgaagtgcagtggcgcgatctctgctcattgcagcctctgcctcccaggttcaagggattctcatgcctcagccttccaagtagctgggaccacaggtgcacaccaccatgcctggccatattttgtattttttagtagagacggagtttcaccatgttgaccaggctggtctcaaactcctgacctcaagtgatccacctgcctccacctttgaaagtgctgggattgcaggcatgagccactgtgcctggccaagacttttttcttttattctatttcactgaggactgaatccaagatagagagcatccgcatcttccctctatggaccaggatttttctgcttgcctttcagggagtccagatttacccaaggctctcagaacagttgtcctgtcattcttatctcaggcttctctccatctccaggtcaccagtagatggtcaggaggcaagcatggactctagcactcagtcactgaagaggtttttttctcatttctgaccttagagactcttctttattgtcctaacggttcaattatgtattttaaaacatgcttttactacacttgtattaaaaaggaagagagacaagtttatgaatatgtacatatataattcatatataccataaatgtgtgtatatattttgacttgtatatgcatttttaaaacctctggaaggacaagaaactagtaatgctggggaagcagtaatggaaacaggcagatggggggccagtggtgacagatttcttttatcagaccctcttaatatttttagtgatttgaaccatatcagtatattaccagttcaggggctgaac

SEQ ID NO: 47469 - DNA, 1034 bp, Homo sapiens
tttagccttatgatgaatttgtttgaagggcattttctttatgaacaaaggcttggatgcatattcctttctttctgtgaatgggtattattccctgaggaaagttgcacagtgaaaaccagtctggttgtgacccactacatgttttgtttttaatcactattacctgagttgaactttgctcaccatgtttgtacttgttggtctgtttaatgaagtttggttgatgccatcctttgcactgccgaagcgtaatcttgtgtattacttagctctctgctgatctcagtatggacagtgtaacaacaaaaccaaaatggctggacagacttcttgtgttttgtaaatataaactaggacagttctgtaggtttgttcagtgtgctagtggagtatttccttaatgtaaaacttcacttaacagagagattctttgtttagcaagcttggagtgatgataaaatggtaagaaataatataaatgttgaagaaagcatcacaacagaactataggagtctaaatttaataaatctttaaaaaaaaccagtgtctagaatatataccatgttttattatttaaaatcattgtcttaaatttttgttcaaaaaataaaaatttgaatacaatcaaaacgttagcaatagtgtattttttgttcttctgtatttttataagtagcatgttccaccattcacatcagaattattagaagagttctgtcaagtattccttttgaaatcttccttttacctgagccataggtaaaataaataaggacataggcagtcctgtgacttaagtatggcttttctacattggttgcctgttaaaatcacctggagaacttgtaaaaaaaaaaaaaaatacacaacacacaccctgggccctgtacacaacacacacacacaccctgggccctgtacacaacacacacacacaccctgggccctgcccacatagattttggtgtaattattttgggtgaggcctgagctcttctacccgtgattctactgtgagaatgactggctc

SEQ ID NO: 47470 - DNA, 1028 bp, Homo sapiens
agaatagttgctgcagccttgatctctcaggctcaggtgatgctcccacctcagtctcttggttaggtgagactacaggtgtgcactgcctcgcctgggtaattttttgtattttttgtagagacagcatttcgccatgttgcccaggctggtctcaaactcctgggctcaagtgatccacccgcctcaaccttacaaaatgctggaattacaggcatgagccaccatgcccggcctggaagtatttttaaacaggtttttaaccttacataaaattacttttatacttctgttaatgtttcatctgtgcctttgggtaatttattttttattattaatttctaatgccccaaagctagctatcacctgaaaggtgcctttaggtgaatatactgtttccaaaaatgcatcagtgacactttcctatcctcatactttcaatattgcctcttctctgttctttttggatgtaacttcaatgattgtgttattcatgaagattttaaaatttcaacacctccaacactccttggctgtgttcacagcttctaactttatagctgtaggtatttttgaatgccagatgtctggcctgtttgatgtaaataaaatttatttataagatattaagggcaaataaataatagaactttaaattttaatctatttgtcttttaataggataattttacccatttacatttattgtcagaattgattaatttgacctctggtctttacttttatgttttgaattttttcttatgctttgtttttttccttttgttttctattttctgctatttagcttaaagttttattacttagacctttagtagtgtttggaaaataaatgtttctaactctattagtacttgtctttatttctttgcataataagaaaaaggtttttaaaattttgactagcctacctttttttcccttcactgttcagtattggttactgagcaactagtgtgtgtaagacatggagtactcaatggtaaagaaaagagacaatctcttcc

SEQ ID NO: 47471 - DNA, 1055 bp, Homo sapiens
taggctctctgcaagaagaaaaatatggctctttttgcccgatgccgcaggcagtcagaccttatggttgtcttcccttgttccctaaaaatcactgttattctgttctttttcaaggtgcactgatttcatattgttcaaacacacatgttttacaatcagtttgtacagttaacacaattatcacagtggtcctgaggtgacgtacatcctcagcttacgaagataacaggattaagagattaaagtaaagacaggcataagaaattataaaagtattatttgggaactgataaatatccatgaaattttcacaatttatgttcctcttccgcggctccagctggtccctccgttcggggtccctgacttcccgcaacaagaaggaacacaagcgaccattaacatgggaacaaaaatatattccacctcattagtaactggggaagtgcaaatgaaaatcaccttgggatatcatttcataatactgaattggtgaaaaaactttaaggtcagaaattaccaagtgttggggaggtggtggagctacgggaactcttatactcattcactgctgctggtaaggatattatcctctttgggcagggcatggtggctcacacctgtaatcccaacactttgggaggccgaggtgggcagatcatgaggtcaagagatcaagaccatcctggccaacatggtgaaaccccatctctactaaaaatacaaaaattggctgggcgtggtggcgcatgcctgtagtcccagctacttgggaggctgagtcaggagaatcgcttgaacctgggaggcggaggttgcagtgagccaagatcgtgccactgcactccatcctggtgacagagtgagactccgtctcaaacaaaacaaaacaaacagaaccacaaactggatggcttaaaacaaatggatgctctcactgttctgtaagctagaattctgaaatcaagatgtcagcagggctgtgctgttgtagttctgggtagaatccttccttgcttcttcccagcttctgggggtggccagcaatcctt

SEQ ID NO: 47472 - DNA, 1032 bp, Homo sapiens
ttccctcaggtatgttttgttgggtctgcaaaacttggcccagacagtgttaaaacaaaattgttttcattagttacctacattcaaagttttattagttagggccaggcatggcggctcatgcttgtaatcccagcactttgggaggctgagccaggcgggtcacttgagcccaggagttcgaaaccagcctagacaacatggcaaaaccctgtctctacaaaaaatagaaaaattagctggggatggtggcacacgtgcctgtagtcccagctacttaggaagctgaagtggggggattgtctgaatctgggaggtggacgttgctgtgagctgagatcaccctactgcactccagcctgggtgacagagcgagaccctgtctcaaaaactttattggttgcttatgttgaaaaaattagaagatttatacaaaagtccagatttctagcttttcttgaaatcttagaagatctggccaaatagagaagcattaccacatggcaatagttgctgtagctgagtggcagggttatcaactgcctcatcagatggggccagagctctgttgtcttctggatgctgaggacagactaacaagttatatcattgcatttacactgttgtttttcttatatgaaagaggaaagtgaaatatttctcataaccacatctctctctgaattgggaaaatgagacttatgccaagagggccgtatgttcaagcaaaatgggtgaaagcttacttgtttgtagatgtaaggcatatttctataaattcgatatgtaaggtaggtctctattgaatgaaaccatattgaatccaactgtagtaagaattatggcaaatggctgggcacagtggctcatgcttgtaatcccagcactttgggaggccaatgcaggcagatcacctgaggtcaggagtttaagactagccaggccaacatggtgaaaccctgtctctactaaaaatacaaaaaattagccaggcgtggtggtgtgcacctgttactggactattccggaggc

SEQ ID NO: 47473 - DNA, 1007 bp, Homo sapiens
cccaaagtgctgggattacaagcatgagccaccacgcccggcctgtccttgacactcttgaggtgcatcttgggtatgatagggtgagagtatgtagactgttaatactaacttcaatctgtttgttgggaaacaagttcaactttttattgtacaacataagatccttttcaatcatcttcctgccttggcttagactacatgagtgactcttcagccaatagcctttgtaggaacattgaccaccggaacactttaagaatcttttgaaggccaacaggagaagctgcacttccccaactctttctccatctttgtttctggaaactacctaaattctgcagattctcatacttttgttttctcctcacacattctaacaaatgctttttaacatttttgtattcttactggccttgtctttttcctttagaaaaagctggattatctttcctttcacatgaattcttctgaattcacagagtacctggaaccctgtgagatgacagaagaacctgtgtatgcctgggcttggtgtgcaaatttacagttatgatataacagaagttgatggcttccttgctgggcaataagatatataaaaatgagggaaagccagcaaaaatgagaaaaaaggaaagcctgtctttcttataggttcttaccctctgcttgtatatcagagtagcttaaaggaagaaaaagagacgataacatttcactacacatttttccatgtactagtgggtaatgcccatgaaaaccttaacttctttttatcttaagtgtaaatggtgccgggtgtggttacagatggctcatgccatcccaacactttgggaggccaggatgggcagatcacttgaggccaggagtttgagacaagcctgggtagcatggcaaaaccccgtgtctactaaaaataggataaattagccagttacttgggaggctgaggcatgagaatcacttgaactttggaagcagaggttgcagtgaacccagat

SEQ ID NO: 47474 - DNA, 1080 bp, Homo sapiens
ttaccatatagaatatgatgtattctaatatagccatacataggagttatatttatttgcgctaaagtatattttaaatattattcattaaactgagcttctaaatgacacaaaccacgtttatatttgtatcatccctgctcatctctgcagttcaaactaaagtaaatagcggattatagttttacaaagcactcttatatgcattatctatttagcctgcataacaattctgtacggaaagtaatgcttagtgattaagaacacgaaatttgggagaagacaacccagcttcatattgcagctctgctgctcactgctatgcagctttgagcatgtcacccagtttgtctgtctcagcctcaatttccatattggtaaacttaagagaatgatacatttcatacaagatttttgtaaaggctaaatgtgataatgtataatgtgtttggcacagtgcccagcatatagtacactcagaatatttagtagttaatatttacaagtggaaaaacaggctcagagagattgagcctttgcctaagagcagatggctaataggtggcagaacctgaccagattcaggtcttccgggtcctggtacccaggaatataattattaccttaggttttaaagacacagtgtaattgtgcgcaagttttaaaattttatttaaattaaaaatcctattaagtattgagaacttaaaatgaccagatactatgatattaggatataacaaagatgaattcattcctgccctccagaagtttgcttaaacttctgaaaaagagagagagagaggcaggagaccgaggcaggaggctcatttgagcccagaagtttgagaccagcctgggcaaaacagcaagaccccatgtcaaaaaaaaaaagagagaaaagaaaaagagaacaattgagattgttaacatctcactgtactacagttttgaaggctttgtggcctttaaatcttctagtgtgcacatgtcttggagttatcagtgtaattaaaacagttaacctatttgctaaccacaaccattagctgaaaataagacccagtggaggctgtgtgc

SEQ ID NO: 47475 - DNA, 1081 bp, Homo sapiens
ttgaggccgggtgtggtatctcatgtctgtaatcccaatcatgggtggctgaggcgggtggatcgtttgagtctaggagttcgagaccagcctggccaacatggtgaaaccccgtctctataaaaaatacaaaaaattagctgggcgtagtggcacatgcctgtggtcccagctactcaggaagcttgagctcaggaagttgaggctgcagtgaaccttgactgtaccactgcacttcagcctgggtgacagagtaagcccatctcaaaaaacagaccaaaaaaaatagataaatattggaattcatagctcaattttaaaattggcttctaaataataataccttatattaatagtaatgtgtctcattcacttacactggtgtacatttggaaaataactgggaagtggcattgctcaaataagcattgcaaaggttataaagtattaggttattgtcactgaagcatggggaatacctttttcaaattgaactggtgaagacgaactgttggccacatttatgttttcaaattgtagaataaatatgtatgtgtgtatgtatttacatattcagccttatattgtttaattcagtgtctattcaaaaactgtcttatctaaaatagtcttacattctatcccagctcttgctctttttaaagtagaacccatcacttctcgacttaatttcatgtatgtatgcatgtatatgcatttgcatattgtctgtctatactagtcagttttcttttaagtctgcgtctggcttggtgtcatggtaatactgacctcacataattaattagaaagtgttccctcctcttgcattttttttttttggaagagatttgaaggatcggcaggcatataagaatagatactgtgtgattgattccatttatttgaagataaacatgagacaaaactaatatatggtgttagcaattaggaggggttgtggagtgggcttctgggatacctgtaatatcatctttcttgacctaggtggtgatgtttgatctggatacatctgatcactgtttctgaatgtatgttacatgtcaataaaaagcagtgt

SEQ ID NO: 47476 - DNA, 1011 bp, Homo sapiens
attgaaccttgtcctcaatctgttcatcttgcagcctccttcccaatggtattttaatgttctcaattcttttctaactttaaaacagaacccagtgacaataacaaaccacacagcccatcttttttctccttttcagagccagacttattttcatctacaactcattcccctgaacacaccctgctgataccatttgtttccatttcacataattggttttcagcaaggtccttgatgacttccctgtcaccagtgggcctgtgtcattcctcccttgtgaccactctgcagcatttgatactgttgaccacactttccttctggaaatgctccttccccagtccttcattgtaacctccttgctttccttccctgcctgtgatcacaccttgtcagtctcccttgctggctgcttctcctctatccttcccttaagcaatgttcttcaggtcactggctcagcactctcgacactctattcctgacactttctctaggaaaccccaaccattcacgcggcttcaatgaccataggaaccgactgattatgtgtccctgtttctagcttagccagacttcatttgacatttttagttaactgtcacaaagatgcctcagcctgaaaacgtccaaaacaaccattcccaggaaatggtttttttgcaaccacccatgaaatctgctgagtgtctggcttgctgtgtctcttgggcagtgtcgatccacaccctctctctgcatgccttgaaaaattgtggaaatccctgggtggctcgtgcctattatcccagcactttggaaggccgaggtgggcagatcaacagaggtcaagaccagcttggccaacatggcaaaacctcatctctactaaaaaatataaaaattagccgggcttggtggcgcgtgcctgtagtcccagctacttgggaggctgaggcaggagaatcgcttgaaccccggaggcggaggttgcggtgagcccagatcgcatcactgcactccagcttg

SEQ ID NO: 47477 - DNA, 1074 bp, Homo sapiens
tttttactagagacggggtttcaccatgttggccaggctggtctcaaactcctggcctcgagtgatctacccacctcagcctcccaaagtgctgggattataggcatgagccaccgtgcccagcctcgtgtggttttaatttgtattttcttactgataatgatttaaacatattttcatgtgtttgatagctacttatattgggtgaattgtctattcagtctttgctcattttaaaattgagttgtcagccaggcatggtggctcatgcctataatcccaacactttggggggccaaagaaagaggatcacttgaggccaggagtatgagaccagcctgaataacatagtgagaccctgcttctacacacacacagacacacacacagacacacacacacacacacacacacacacacacaagtaaaattgagttgtcttttgaatattgtcagattctttataaattctggatgcatgttctttattggatatgtgatttgcaaatattttctcctagtatgtggtttctctttccattttcttaaaagtatcttctgtattacaaaagttgttttgttttgatcaagtttaatctattattttttcctgttatcattcatgcttttcccactaaatattttcttttttaccgttgtgaaatgaaattattgtcgttagtttatttccaaattgcctgtttctggtatatatagctataactaatttttgtgtattgattttgtatcatttgaattaatcagtgaagccattttgtagctgggattttttgtaggaatattttaaattagtaattcaatttctagttgtatgtcaatagctttttaaaaacagctttattgagatataattcatataccatacagttcacccacttaaagtgtaaaattcatctgttgcttttaaaacattttcgtcatctcaaaaagaaacctcccacccattagcggtcaacctcatatccctctatatccccacctctacccctaaacaaccactaatccactttctgtctctacctatcacctgtcaatgtaatatccctcaatatc

SEQ ID NO: 47478 - DNA, 1047 bp, Homo sapiens
tgctacacagctgttgtcctagaaatttaactctctcctgcactgaatctcctgtttcctggatcccatgtcttctttcttcctttacatcttcaatttggtggcacacattgtccagtagtttcatgagaaaggatacattagagataatttttgtgtgtatctgaaactactattattctaccaactctcttgattgtttgtctgggtagagatttccaggttgcaattcattttccctcagaattttgaagccattgctttatcatcttaagattatcgttgagaatttgatgttgttcgtcttaatcttttctatctacccctgtcctttctgaaagtttttgaaatcagagacatatttctctgtggtagtctgatatttcacagtgataaaaggtaaatgtcattttcccagccccttgaaaagttcttatattatttctttgatagttctctcagttttctctcttctgactttctggagaaaaagatcatctgatttaatcactcatttctcctattacacatatatttgtataattcttttcaccttctaggagatcgactcaccttctttttcctacctttctattgcattttaattttgttgactaaaattttactttctaagagctcatcttgttttctgatggtttttcttcctcctcctcaatccaacccatcccctctccttccctggcatcactgcctttccccctttccctttttctcctctctccctctccttcatcccctcttcttctcctctctccttcctgtgctcctcctcttccctctttctccacctgcatcctgttccccatcccttgctgtattattttcttttatctctgagggcagagattgtggaatttttaatttgttctccatttactctactttagttatcttttgtctgagccagcattctgtttcctccaagttgctcttatctgtgttttggttttggttatatttgatgtccattcatctctatgggcaaggctctgcaaagctcattggaagatgtgtgtgagtggggtg

SEQ ID NO: 47479 - DNA, 1064 bp, Homo sapiens
ctgggagctggcccttccagaatcagaggctaaatagagaaggtctattcctgccaaagaacacctgcaaaagccagaagagggggcggtcttcttcttctttttttttttttttttgagatggagtctctctctgttgcccaggctggagtgcagtggcacaatctcggctcactgcaagctccacctcccaggttcacgccattctcctgcctcagcctcccgagtagatgggactacaggtgcccaccaccacgcctggctaattttttgtatttttagtagagatgggatttcaccatgttagccaggacggtctcgatctcctgacctcgtgatctgcctgccttggcctcccaaagtgctgggattacaggcgtaagccaccatgcccggccaggggtggtcttaaatgctcagacaacaatgcaaggacacaaagattgcaaagaatcagtgaatcacttccaaaagacaataataaagcttcaataatgggccccaaagaaatggagatctaggaaatgacaaagaattcagaataataaagaagttcagtaaactataagaatatatggatagaaaatttaatgagatttggaaaacaatacacaagaaatttgagaaagaaatagagacaataaaaaagaaaattctagagatgaagaatacaatgactgaatggaaaaattaagtagaaggcttcgatagcagactcgatcaagcagaagaatagatcagtgagctggaaacagaacatttgaaattatccagtcggagaagcaagaagacaaaagaataaaaaagaatgaagaaagcctgtaggaattttgggacaccatccagagactaaacctttgctcaacagaaattttagaaagagtcaaagagccagaaagcatatttaaagaaataacaggccagacacggtggctcacgcctgtaatcccagcactttgggaggctgaggtaggtagatcacttgaggtaaggagtttcagaccagcctgaccaacatggagaaaccctatctctactgaaaatacaaaattagccgggcatgg

SEQ ID NO: 47480 - DNA, 1032 bp, Homo sapiens
agaggttgcagtgagccgagattgtgccactgcactccagcctgggtaacagagcgagactccgtctcaaaaaaaaaaaattattattattattttacataagaagaaacaatgcaatgattgatttttgagtgaaaagttaactttatatttctaggaaaaatcccatttagtcatattgtattacttatatattggtggattcaattttgtatttgtgtccatttgccatattggggctgtagtttttgttgtttatttgtttgtttgtttgtttgtttttgagatggagtctcgctctgtcacccaggctggagtgcagtggctcgacctcacctcactgcaagctccacctcccgggttcacgccattctcctgcctcagcttcccgagtagctgggcctacaggcgcccaccaccacacctagctaattttttgtatttttagtagagacggggtttcaccgtgttagccaggatggtctcgatttcctcccacctcaacctctcgatgacctaggaccaccagcacacaccaccatgcttggctaatatttttatttagtagaggcgaggtctcactatgttgcccaggatggtctccaactcctgggctcaagcgattcacacaccttggcctcccaaagcactgagattacaggtatgaaccacatgcctggcaatgattttttacaaaatactttatgttttcctttattttcttacttattttttttttgggcggctgggggagggtctgttttctgttttacttgatttctactatcttcattatttgttttcttctactttgtgtttaatatgtcctttcttgtagcttctgaagattaaaacttagttcattctcttgggccctctttttcttatgatacaaacttttaagccataaatttcacttttagaactgccttagcattttcccacaaacatttgatacattgtgtaatttttcattcttcgagagattttcctactttccttctgagttcttctttaatcaatgaggactat

SEQ ID NO: 47481 - DNA, 1074 bp, Homo sapiens
ctccacctcagaaaaacaaaaaaagaaagaaaagaaaaattagctgggtatgacggcacccacctgtagtccctgctactcaggaggctgatgtgggaagatcgcttaaatgtggaggtcaaggctgcagtgtgctatgatccactttactctagcctgggtgacagagtgagactgtctcaaaataaataaataaaaataatgaaagaaaggagcttgtattctgcaattgttgggagaaatgttctaacgtatcattttgttttaatgcctctttttgcttctgcttgaaagtcttatcttcctcatccgtctccttggcctgcttcttgggctgttttagggggttcttcttgctgcacatggcacctgtgccccttcctcagactctgccctctattggactcctttttcctttttttttttgagacacagtcttgctctgtcacccaagctggagtacagtggcacaaacacagcttactgcggccttgaccctcctgggaccaactgattctcccacatcagccttccaagtacctgggactacagatgtgtgccaccccacccggctaattttttgattttttttgtagcgacagggtctcactttgttgcccaggctggtcccaaacacctgggctcaagcaatcctcccaccttggcctcccaaagtgctgagatgatgggcgtgagccaccatgcctggcctacgatttgtatttcatgcttcctttttgaaacagttttattgagaaataacttacataccatacagttcacccattaaaacgtacaattcagtagctgttagtataatcagagtttcataaacatcatccaattttacaatattttcatcaccccaaaaagaaactttactccttagtagttacctcacatttccaccaaaacctctcagccctagggaactactagtctactttctttccctattgatttgtatattctagacacttcatataaatggaatcatataatatatgaccctttgtgactggctcctttcccatagctttgtaaacttttccaggtttatccatgttgaagcat

SEQ ID NO: 47482 - DNA, 1035 bp, Homo sapiens
gtttttgtttctttttaagagacaagttttcagtctaatccagggtggagtgcagtggtgtgatcactgctcactgtaaccttgaactcctgggctcaagttattcttttgccttagtctcctgagtagctaccattataggcatgtgccactatatctggttaattttttatttttttatagagatagggcctcacaatattgctcaggctggttttgaattcctggcctcaagtgatcctcttgacttggactcccaaagtgctgggattacaggccctgagcgactcactgtgcctggccagtttgattctttcgaatgggaatttttgttttgtgtgacatcaatcaaacatctatacctataagatcaaagtataaccctaaaatgctgtatctgtttttctttctctctctctctttctttctttctttctttttctttctctttctttcttttttttgagagatgaggtttcactatatttcctaggctggtcttgacttcctgggctcaagcagtcctcctgcctcagcctcccgaagtgctgagattataagtgagattctatcttttagccttatgtggtaattctaaatatttttgtgggtttttgacccctttgagaattggataaaatctttggactcctttcttattaaatacatatctatatatacaacctataattttgtatacattttaggaaatatgtggactcttggtggactatgcaaacaatctctgttttgtgtatttacattttagcatatgactttcttttaagaatagaaaccttaaaggcttgaaaaggattaggagactgagcttcggagcttccagggaaaatttacttttttgagagaggagagattaacatgctatttttccatcagaaatccatttaacttgctttttcagataaatacactactagtatgcatctagttaaatcattcttctgcaccgtaggttatgaaaaaatagtgtcttactggtgtattcacaaaggcagtctagaaaggaaaaattaa

SEQ ID NO: 47483 - DNA, 1140 bp, Homo sapiens
cccattgtgtcgaccctaacatctgacatctacctcttgggttacagcaggtgaagtagaaatttgaatccacatggcccagattgcttttagaatggatagtgggagtactctcaagttaacaggtgtaggtagcttgaattatcaagatacagggctatgcgatgacaactgggcaatgtcatttctacccacagcacagctagataccatcatagcactcatcctcacagccacccctcagaaatggatttcttgtttgcacttatgattccttatttgagaagtggtattacattcaaatgctagggattgagggtggttccattaggatgctgagatttttcagttacctggaaattggttgtgttcattttaaagtactaaccagccagcctgggcaacatggtgaaacccttcctctacaaaaaaatacaaaaattagccgggcgtggtgatgtacacctgtagtcccagctacttgtggggctgaggtgaaaggattgcttgaacctgggaggtcaaggctgcagtgaaccgagatcgtgccactgcactccagcctgagtgacaaagtgtcttattaaataaataaataaataaataaagcaccaaccggtagatatgtggttttagatttgtcctggattaaatgaaatttaaaccatttatcagatctggtctctggcctagaatttcctcaccttgttttatgcttttgaaagtcctgggaagaataatcctgaattggactcagatctcttgcttttactctttgacttcatgggtggatagacactgtttcgatggggagttatgttctcagaagttaccacatgtatcaaatatgccccaagtagagaatatacataatatgcaaaccccagaaatggtttaagacaggactcaagtatgagttgataactgagggaacacttaggtttgtaggtgatgaagcacaattgcagactgcattgtggagattttgagttattcttactttggggccatagtttcccattcccctgactctccctgcttactctctccacctccacatatacaaaaggctttagtggctcttctagccaactaatataccccttctagtcgagtttctaaagaatggtgtgtatgtgt

SEQ ID NO: 47484 - DNA, 1038 bp, Homo sapiens
agaatgggaaaaagaataagactggaaaggaagaaactgtcaagtcagggtttggcttttcttgttatatgccattctattaaaatatgtatatttttgtactttttttgaacatatgaaatgatcatattttacttgacatttatcacttatttagcagcagaaaaatacatgtaaatggaaatgctatcatccctttgaaacatgtctttttaacacttaggattcgtgctatttgccaggagggagtttttctacttacagagcatctgggagatgaattggaaaggcagacttctggtctggttagcacttttgttgttttttattttctttttgggtcccatattcatgaaagatttgtcttagcatttttagataaatatttctttagtgatacacaggtttctttgtttttttttttttttttttttagtgaatttcaaagaataatggctgccattcttggatcttggcctttattgatttggatattattgatgtatgaaatacataaacttgtcagatgctttgtgagtctctcctgatcttaaggcattttagagcatctagtagtagagtgtccttgagttagctaaatttatacttattttgaggctggcaaatttgtgtaatattgatgacctagaaatgagataggagttctgcaggactggtttcacatgatacaggtcataaagaccccactgagaaaacaggatgaggtaaagaatctggccaaaacccgccaaaaccaagatgccaatgaaagtgacctctggttgtcctcactgctcattatatgctaattataatacattagcatactagaggaaacccccactagcactctgacagtttacagtcatcatggcaatgtagggaagctaccatatatggtctgatgggggaggaaccctcagttccaagaattccctgcccctttcctagaaaacttatgaataattcaccccttgtttagcatatgattaagaaaaaccataaaaatagccaactagcagccatcacagctgctct

SEQ ID NO: 47485 - DNA, 1032 bp, Homo sapiens
ccaaatatttctcagcattgctatgggctgaatataatcatatttagagataaggtccttaaaaaggtaatttatgttaaaatgaggtctttaggctggcctctgatcaatatgaccggtgtccttataagaagtagaaatttggatagagatttgtacaggcacagagggaagaccatgtgaagacaccagaagaagacagtcatctaggaactaaggagagaggccttgggataacccagtcctgctgacagcttggtctcggacctttagcattcagaactgtgaaaaaataacttcctgttgcttaaggaatcctgtctgtggtattttgttatggcagctctagcaagctatataaacataatagcaaatatctggatgactagattatatagtgtttagttttctgacatgtcaagaaaaatatttcattcaagatggtaacgacatatgcacctttatattgcttgacagataatataaactcagtaatggcattgtggaaaaggactgtaacaaacatgtttccatatcctcatttctctttctcaataaagttcagattatttcccttgggttttataactctccgtactattacaaattatttttcataacttgtatcttgctacttcccttagcctattctagtctcaaggaaatgaaagtgtttgctgttttctgtatatccttaacttcccactttcttgtcttcactcattgtttatggactttcaacactgctttgttctattcatttagttagtccacaagtatttattgatgcctcagtgtgtgctggaaactgggctaggagctgaaagtataatgattaataaaaccataagccttctgctgaaggagctaatactctggtaggggtagacatttaaatagggtaacatagggctccagggaagcaatggaccaagccttcggtggggcgaggggaagagctgcagaaatgagtctaagtcagtggttctcaaatggggatgaaaagggaggaagcatttaacaatgtctgga

SEQ ID NO: 47486 - DNA, 1854 bp, Homo sapiens
gaaagttttgctaccaaatacacatgccctttcatattcacatcactcctacttaattcacaagctttgctctccacttttgttgtaaattgtatatagtacagccctctcttcacttagacttctttgtaaaaattataattttttgtagagatagggtcttactgtgttgcccaggctgttctccacctcctgtcctcaagcaatcttcctgtctcagcctcccaaagtgctggaattacaggcgtgagccactgagtccagcccacttaggtttctttagtgaactaggcaaaagattgtacaggctttctgagtcagtttgattgcaatgaaaacgatgcatacttgttgaaagattttaatctagggagtgttgcagttggattgttgacccctcccctctctgaatcattgctatgcttaatgtaatcctgaatgggcaggagtgccctctgttcttgtcagattgggctgggggtagtggggcagggagacacaatgctaagtagaaggttgagcgtacaggtggacagaacaggtgggtagacatatttcagatcacagtattcatgagaacccagttgcttttgttccttcagtattcattcagtgttttgtttttgtttttgttttttgagacagagtggcccaatcatggctcactgcagcctcaacctcccaggctcaagtgatcctcccacctcaccctcccgagtagctgggactaacggcacgtaccaccacacaaggctaatttttccagtcttttgtagagacagggtctcactctattacctaggctggccttgaatacccaggcttaagcagtcctccctggttggcctgctaaagtgttggaattacaggaaccaccacacccagccccattcagtgtttcttgaatgccttctgtgtgttaggctttgttcaaggtgctaaagacagtgctgggcaaaatttctaccctcctatagcctgcattcaggacttagagaaggatcacagagcacaaagatgcctggccctggcacacatctgtccagcccctaagcagtgtatttgtgtaatgatctctcaaatcctaaaaaatatttagaaatctaattctgggattcaggcctcagcagccaggaagatgtctctgccagctactgagatattaattagggaaacattagggtatatatctcagctaaccagattcacagaggtggatgaaagcatcatctcatgagacagtaccatgagaaaaggaatgccaggaccactgatgaacctagttttaaggtcaaagcaagggcgatgagccagtgacagaaactgagaagtagctgtaggaatctgaggtaggtcaacgctgagaaatctgtaaatgtaacttacgacatgaaaaacaaaaatatcatatttatacttgaccaaatacttgataaaattcaacagcttttccaactaagaaagacagaaaacatttttaacatagtataagaaaatgttataggaataaatacctaatatcatatttaatatgatatggcatactggacactttgcataaaagttaggagttagaggctgggcgcagtggctcatgcctgtaatcccagcactttgggaggccgaggcgggtggatcacgaggtcaggagatcgagaccatcctggccaacatggtgaaaccccgtctctactaaaatacaaaaaattagccgggcatcgtggtgcgcgcctgtagtcccagctactcaggaggctgaggcaggggaatcgcttgaacccgggaggcggaaattacagtgaaccgagatcgcgccactgcactccagcctggagacagagcgagactctgtct

SEQ ID NO: 47487 - DNA, 1026 bp, Homo sapiens
tcataccttttttttctgtaaagaaatttttctcaaacttttgaaagaaaaagtattttcatggacctttgtgactagtgctggcttaaatagtttttattataatgctacttaaatgtatgtaaacataaaatttatagttctgatacagctataaatcaaaatgtacttacaaattcaacttaaatctatcaaaccagataatatcaaattaacaacattaatttatagggaaccagacttgagacagtatcttcctactattgtaataccagtggccatgtaatataaataagagcatgggctctagagtaagacttaagttcagatattggctctgccatttactttgtgcaagtgacttatttatttctaaaatgaggataattaatttagtcaaattagaattattgataataattaggattcttggtgtgatgagtcataacagtgcttggcaaataagaattgtctaaaaaatattagctttagttgcaattattgttgtattattgttctactgaaacctaatgattaattttgagtttaatggtagaaaggctgattcgatatttaatgtgcttctgattttggctttcataatataaatgctaatacatagattgtctacttgcctaagttcatagcattgctaacatagtgtattatacttaacctaaactccaccagctagaactccttgaatttcaaggttttttgttttttgtttttgtagaaacggggtgttaccaccttgcctaggctggtctcaaacccctgggctcaaacaatcctccttctttggcctcccaaagtgctgggattacaggcatgagccactgcacctggcctgaatttcagtttttaatcaagtgtcacttgataactctgtaagtgtcttatccaatcattgcccatgtcagatatggggaagtgccacctgaagttattttttaattcttgaaaatgtagaagcagcattgtttttcagcatagagattatcattgactgctgatggcaatcag

SEQ ID NO: 47488 - DNA, 1054 bp, Homo sapiens
gcgccacaatgcctggctaatttttgtattttaagtagagacggggtttcaccatgttggccaggctggtctcaaacacctgacctcaagtgatccacccgctttggccccccaaagtgctgggattacaggcatgagctactgcgcctggcccagaagtatttttagagcatggcaaaaatgaaaaaaacatgctttatgccttcaaggctattttatgcttgctttaggtaagaacagtgatcagatttataatcaagtaaatctgatataatgattgatgcaccttagttggcttattgaccattatgatacacctatcagtctgcttttttagtactgccttaaaatggataggattgctttcttagacccaaagaaagcatttttattgcctttttcaattttctttatttttgtcatggtaatacatatatatggcaatcaataaaacagtaatattcctgaatagtaacaatgtctcaccttggttttcaccccaatgccagctcttcaaaggaaacttgttttcaattcttccaaaaatctgaacaaatgcatatacctctgtttcttgatttatcaacttaataaaatatccatagactctgctgtgaaagatgaggatttaactcatttttgttaactttccaatttgattgttgggttattaaaatacacaattaagcagtagaagaagttaaaataatgagagaggaaataaatatattttctccacctaaggatgaggatattagggatatcagtgtccctattcattccactgttctctcctccctgctcctgcttctcacaatcttcttattgtcacaagtttgtcaatatttttactcttaataactaacccttttctgctttatccataggttgattctaaatattcagaaccactaacaccttttatgtcactttcacagtgtaaatattgttcctagctattcatattctaagattgcatttcttttcatcccgatgagtttcacaagctctggtgcagtcagagaagaatgtttctaagggttgttgggtggat

SEQ ID NO: 47489 - DNA, 1107 bp, Homo sapiens
atagcctaactcagaagagaagcaggtaatttattatagctttgtgcatttccatttttatgtgttatctgttttccttttgctttatgtgccatacatcttttgtttcaaattgattaataatacctttttgtttttgatttgtactatgcatttttagtaaaagatgccttcatattttgatccttactgattaatatatgcaataaatgtagatatgtaaattgagtaaatttaaaggaaggaatggtttctaatcaaatgtttgtaataactatttctgttgtggtatagtaacagtatttcatctcttaaaattcatcagatgttatctctaatgttttgttagagtttgttctcagtcattgcagccataaaatttcagcaaacttgtgaaaaacacctttcagatactcagttctgactgtcatactgatgaactgttaacaaaggtgatcttatttaacttcccagactcctcttcagtctgcagagtcatatgctgttggctctctgtgattactacatgcaaaatagcaataataatagcccacacttctagtgtgcttattatctcactaattatttatgttaactcagttctcacaactctctgaagataggactataattaactccatttcacagataaagaaactaagtcacagaaagattagagttactggaggtcacacagtaagaagcacggaaagctggaattttgatccaggtggtttgattcccaaatttatgctcttaaccagtaggcccccttgccatggtgatgcttctcttacatgtctcagcatcctccctcttggctgttccaggacatgggccaactttccctgagtttgctttattcctccaaaaacttcattgccaaaacttctcctcctgctcttctttttcttgttccaatctctaactccttcgttagatggaaatcagagtgtttaacagttgagggagacacgtacagacatgcttaaaacaatgcctaccatgttgagatgctgaatatgtttttgttgaatgttgaagcaaatatgcaaatagtaaagtttctagaaatgaaaaaggagatcactttcattttctttgttt

SEQ ID NO: 47490 - DNA, 1031 bp, Homo sapiens
taatgcctgtttagaatattctgtgctgtatactaatggagtcattaaagaatgagctgaaaaggagagccatatgtgcaaagctgtggcttcatggctgaagctgtggaaaatgtaaatgtcacatctataatgaatccatgtgtcttctacaactgccttaactcaaggaaagtgagagttaaaaaacaagattctttttggaaattgtatatgatgtcttgtatatcaaagtctgatggcagcagctcactatgtattttatgtattataccagcagcagatatttcagacatatcagaagaaggttctcttgattcagtgtctctggcatataataaaaaagtgggggagaaatttctgcagtctctaataagcaatatatcaatgagtactgtcagattctgtagaaaagtccacagcatgatttattacattaattacagtcctgtgggtttcatgctgctaagccggcaaatgcagctacattctaaagttgatttaagaatatattttggccgagacgaaagtgcttcttattgtgattaatatagtacaatatttattctcttgttctactcttctttcaccttggctgtagcacagaatgcttaatttcttttctgtgacttggaactggaattcacttttagttttgaggagcttcatctagttatttatccgcacctgtcatctggtctcctttttgcctttttgtgtcttggtagattcacctaatgttgcatctcctccacgtgtgaagcctgtttgaattcactcccttctagcacagcagggctgtcctcaggcttgttaggtcacacctgcaatgttacgtctctttttgaggggaaggaaccattgaggaaaaacttcattgttgtaatttaatttttaaaaagtagcattcttaaaggggagcattctctgattctacccttgtttagaactgtactgaattcatacagtcacatagtgtctcttcttacagtgacacaattagcttatcaaatcacagaattttcagcttt

SEQ ID NO: 47491 - DNA, 1025 bp, Homo sapiens
cacagtttttacaaactatgattttttgctggggctgaggatgggttggggaaaagtgaagtggtggttgacttggatgttctcctgttccctctgcctctgacctcctgcttccactgaggtaattgaggttatggatcatttcgttttctgagaatatttcataccaggtcatctagacatcagcccagcccctgcccttcctacttacacaaagcagagtttattgaagattttcttaatatgggagaaaatgggtaggtttgtatcataacagagcaatgcaaatctgaccatgtacttttctgaccaactagttttcttaggataaaacacaaggccctgcatgacctggccccagtgggctttcaaaacctgtcctcataccattcttgctcttagtcacttcactccaggcacagtgatactctttcagtttctcaaattttgtttccattgcaggaacttctcatatgctgttccctctactgctcctccttctgctctttgcgtgactggcttttcatttttaggtcttaactaaaagatatttttagagaggacttcctagaatatccatccttaaatgtgtcacttatcctctctgataacacccattatttttcttcatagcacttctgccagtttgtccaagattttcttatttgtattcttgtctgttttccaccaccagatggtaaattccacaaatgcaagactgtttcccttatatccatctctgtagacccagcctacttaattcctgacatgtatcagttactcagtcagtgtgcttgagtgaatgaatgaggtagctcggcaggacctgattgattaggtgtagcagaaagggagagcaggtatcaaggatggtgtgcaggtttcaggcttcagcacctgggtaggtggtggaaacactgagtaggtggatgggcaagtttggggacagatcctaagttacatcttaggtctgggtacagatgttgattaggcttttgggtacataggttcacgggagccataag

SEQ ID NO: 47492 - DNA, 1136 bp, Homo sapiens
aaacattattttaaattatttctaaatatttatggtaattattttaaaccatgacaatgaagaaatgtctaattgttaaaagttgggagggtagtaagtgggaaatagtataaaacaagattcaaaagatatttaaactaataatttaaactaataattaaactaatagtgtttataaacctttgatggtataacaggtaacattagaaaaactaaataatatgattaaaagctaacaattacatagaccaagaaaaataatgtaatggaaaaatgattagttggagacagaaaaggaagcatatggtatattaattctgacattttttgtagtggagtaccaaaatatgctgtataaaaatagagaatttggctgggtgtggtggtgcacacctgtaatcccagcactttgggagtccaaggtgggtggatcacttgagctcaggagtttgagaccagcctgggcaacatggcaaaaccgttatctataccaaaaatgcaaaaagttaatcgggcatggtgtcacatgcctgtggtcccagctactatggaggctgaggtgggaggattgcttgagccctggaggtggaggttgcagtgagccgtgatcaagaggatttaagctgggtggggtggcatgcacctgtagtcccacctgctcaggaggctgaggcaggaagattgcttgagcccaggagttcaaggccagcctgggcaatgtagcaagagccccttcctcagaaaaaaagagaagagagagaatttatgatatgatgcaaagttataacaacagtgataacactagaaaaatttacagtagaatataaactggaaaaagtttctttactcctaaaaggagatactgaaatagtctcttttcagcctctggctgttgtttttctgcctgagatgaagccaacagaaggaggaggatttggccaacagaaagaggagctgagcaagagccctgatgcaacaatggaaacagagagcttgacatatattcacatatatcttatgtgtattcataaaatcacaatataactataaactctgtagagactctcagattagatcgcaagttacctgctgtgcaggtaactgctatcaaatgatatatgcgtttctgaaaacag

SEQ ID NO: 47493 - DNA, 1045 bp, Homo sapiens
ttcaatttgtgaaaattaatcacatgcacttaatgactagtctatttcattgtatgtatgttacacctattaaaaagattttaaaaggaatgggtcagaaaaatttctaaaactagaggtaaatgcagacagttgtaatagttttgtattttattatcagtcttctctagtcttacttgattttgttattaactaaaaaacttattcctattacttgactttaaaactatttctttccctcttactcatgtaaaatcaatgatggtgtctttaccctttcaacctcttcatgtagctcattcctggctattaggaaaggatatgacagtgtgacatttgtctttagttttattttcctgcagatggaatggctgtttgtcaactaagattgaggcccagtagaaaagagggaaaggcttggctgaagatgagttgaaaaggtgtgaatgtgtcagtcatctttgtgtatgttagcatggtgctgaaatgtggaggagatacagaagtaggagagcttcactcgggactgtggcaggtgacaacatccacaccagcattctggacccttccgtggttgtcttcaccagttccactaatagcagactgactaatgctgcttaattaaatccaacagacttaaacttttttgcttacatatcccttaaaagaactttgaatagtctttaccactcacttttaaattgacacccaaaggtttttcaatatgtttcaatcaatttacttttgtaaaaaaggagtagtgaatattttataaaaatgaagaggaggaggccgggcatggtggctcatgcctgtaatcccagcactttgggaggcaagacgggcagatcacctgaggtcaggagttcaagaccagcctggccaacatggtgaaaccgcatctctacaaaaatacaaaaattagccaggcatgatggcgggtgcctgtaatcccagctgcttgagaggctgaggcaggagaatagcttgaacctagaaggcggaggttgcagtgagccaagatcatgccattgcactccagcct

SEQ ID NO: 47494 - DNA, 1041 bp, Homo sapiens
ttgaacttaactattattttaaaattggtgaaaatagagtaagatttcctgcctaggacacaagcactagaactttgtttctcaaaatatattctctcaaacctcatcatgaacacagagatgctggttaagatacagattcctacacctgctacgtggtaatctgcattttgatcaagcatcctggatgattctgaagcacagcaatctgtgaagacagctattctagggcagcattacttaaccttggatgatccaaaacagaaagaggcacctcaagtccttggtagcagagtacaaataataaagtaataaaaagaaacagtggatcctggagacatacccccttttttacatcttgactataatagcctaattcaaatgtaactgtcctgtctttatagctatgatgttttatcctcattaccctccaaaataccaaatatttccattcatcacttattacaaatgccctgcaattacatgcagaatgcttataaactgtgtttacccaaattgctgtagaacaagtatttaattaactgccataaaagatctgctttgtcatttttaaatacagatttttagtgatgtgttaaaataacaaatacagatattttagtttaattcaataaaatggaaccagtacaacctctgttttcacaaatgaagtgattcggaatgagtttgtcagcgctaatggggctcttgcacgctgcagtaggataaatagcacatttctgtcccacatttttcctaaaacgaaggctgtctctaatctctctctttcgacaaaccttcatgcactaaactatgtgcccgtgacataggaagctcgttttgcttgtaatgggccatatgcttgtctagtagatcttttgtgaaactgaagttggctattataatgtgacaggtatgtaaataacatttatcagtgatctccgtaaaactgattcctcctttcccttgtcattataaaaggaaactttatttcagagtagaaagtgcattgtctgaactcatcaacaccctctctatccc

SEQ ID NO: 47495 - DNA, 1055 bp, Homo sapiens
agtgtgtatcagagctgcagcaccttgtctgaggcccagagcaaccagctcgtgctgatctgtaacaatctgagccagcaggctgcccagtcagtggccggccactccaacaatggcaatttcatcgtctccgcctcctatgactcttcctcagacaccgcttgaccaggtggcttgagcaagactccagtttggttactgtgtccggagaaactgtgattatacaccgcttctcgttccccttcctgtgccctcagtgttaattcactttataaaaatataaatatataatatatttttctttttacaaataagccaatggagataatttagtattactaacatagtatttataggcttaagacaaatgtacttgtgggcgatcaaatgtaattactgttacagactttacaaaaccatacgtggttctcaggcaacacaaagtagagagggaattctgttttttaaaaactgtcaaaaaggaaattgagagtcatcctagacttaacatgcttgcgtcctcaactcctgcttttcgttcccaccccaactccccttttttgtctccttaataaatggctttatttttttaatttttaaaattctatattaatcaagaggagacattaactttactgctgacgcaaaactgtattcagctagatccacaatatgaaaatgtataagctcaacatcaaattatttacatcttctcttttttaacttaattagagttttagctcctgtgcctcattttttacaatgtatgagaatctagatgtttagctaacatcttttctttttggggggaaagggtagaaggagggaataaaggtgccattctttttgggagatacatgattttaaaataatacccaaagtctaatattttggctaaaaagactgttacatagctcattttaactattgtgcttgaacctggaaagaatgtttctttttttgtccctaagaaatgggtataaatgaagtttgacaggaaatttaaagctaccaaagctttgaaaatgttgccaagcattagattgcctataaag

SEQ ID NO: 47496 - DNA, 1969 bp, Homo sapiens
aagcattaaacagtctcttttctcctgaggcaagggtgtgtattcgactctgtgattgagatccaaggaatattggcactcattttaggtaacaatattttgttaccagattttgctgaattcaaagcattcttgaaaatgtgcgagatttttctatagtaaatataaatgcgtttatctgtgatatcctgcaattattataataattttggttaaacatttgtggcagtttttccaaggtctttgttttcaagtcttgatgcctgtggtgaattattagttaagatatttcaaaaataaaataaatttagactttagagccacaataaagctgagctaggttcctattctgtataatcagcaacacacagaaactccaaatcttgattgttttgttggacccgtgaattctattgggaaatatttgttcttcaaggcaacctcataattcacattagctagaaaggtaggtggtattttgtacattaatttagtgtataaccaggacaaatttcattctgaattgctttgctaaatcatcacagagctgagctctcccatggtcagggaactccttccaacaccaagtcataagcacataaagacccgttcctctaagctgtgacctttcatctggctaaggagtgggaagtcagccatggactttgtgtcgtggagttaacctcatgttcatgacttttcctccatagagaaatattcatttatacatccagaaacaagaagaaagggcagagaatgtcttgctttatgtttttgtattgatagtgatgagagctgccatttttgagccagcatgcatgccagcactgtgctaagtgacttacatggatcacatatgtaagtcatagttactaatcttaaaaaaaaagaaaaaaaaaataggaaaacacagataaggataaagaaaacaaaatacgtactcgtaagtcttctagccaaagataactactgttaacattttggcaaatatttcttcagacatattgcagtacttacatatttatttctatatatattaatattttcagcaactttgaaaaggtgagttatctttattttatggtcaggtcaagataagtcaattaggtcatagctaaagaaatggtagtctgtcatttcattccagagtttttttctatttaagtttctcagtaccagctcatcattaatttccagtggtttgatccagagctggggacacagtgtcttaacatctctgaaggatgtctgatcaaaaggaatgctgagtaatcttccatggtggcagcatgtcctctagtcctctcccacacccatacatttggagccacagagcctctttctcccagttctctttacaaaaccttcctgttcgccttattctatagttagtccttacggcatcagacagcctactttaagggaactcttaaactctaatgtttaaaaaaaggtctctgtaaaacacttaaaatgttatggtgcatttaatttttaattgacgtagtttctaaatttttgatatgtttctgacagcacagtaagtttgtcttaaggaagaagagtagtcagtatgcactgtgaaagcagaactagaaaatgtcagttccctatctgtgtttattaaggtactaaaatgaaaatctttgtcctgcttaatcatattgcatcttcatttagaaaaacacaaattgggaatgtgaattatttttatttatttatatttttctgtgataactcaagccaaataggagcattgtgacttttagtttcagaaaactgttttctgaatgatggcttggtagaagcctagccaaattacagtatcagtctttgtttgtttgtttgtttgaacagagacagggtcttgctctgtcacccaggctggagtgcagaggtgcagtcatagctcactgtcaacctcaaactccagggctcaagagatcctcccacctcagcctcccaaata

SEQ ID NO: 47497 - DNA, 1023 bp, Homo sapiens
gtaattctgctttgagtattttctggagaatctttcttagagcctgttttaaaatcaataaagtgaaggcatttctgtaccatccactgtgttcatgtaggtgcacatatgcatcagagtgtacagatctgtcatcaatgactatcacctcttgagcactgacaatgtgccattgtactgagtgctttataagttgtttcacttaattctcacaatagtcccattaggtaagtattattatttcccttttataattgaggaaatccagaaaagtcaaatggcttgcccatgtcacagttaatatgtaagagcatccgtatctgaaattagatccagatcccattaagcactctctttttctgctgtagctacttgttcaagaagtgatttgctgtgcttctgtagaccctctgaagttataaattataaatgaaatcccaggtgtactaaaatcatcaaattaattcaactcattgattgagatcaatgttagcacaacattatttaggcgtcattactgtagtattttgagatgagatattaagcagtttgtttatccctggttaccagcagagagcagaagtttgtgtcactctaaaaaacacctaactttgtcatggaggcaagtgtgtatatgtgtataatttatttttaccccaattaaagccaaaaccccaatttcaagagagtcctttataattcaggcagggaagtgggagggtctaggcagagggactgcctataagccagtatcgattgccattgaccagatactaaatatgaattagaggtagactgtgaacctattcagattttttctggttcgactatctgcagtttaatgtgagacagacacttctgatcttaatcagccctcttctgactgattttctttatctataggaaaggtatattttgatccttatttctctagccaaaataaagctgtaatactaagcacctgtaaataaaaactctctcccagatgacagaagaaatagatacctaagcctagggaggaaa

SEQ ID NO: 47498 - DNA, 1049 bp, Homo sapiens
gcttttgtttttggagtgaatttttaatactctgtgttaaaagaaaaacattccatcttgtaggcagtgttcctcagtaaaaatctttgttgcattttcccatataaatgaatcacccttattaaaacaggaggagggagggatttgtggtgacctaccgctgccctccctttctaagagaagaggaggccatggggtatgataactaaatgaacatctctggaagttcctccgtctgatatgtgtattctgacataacagaatttcccaagacttctttgaggaaggctgtccacgcttcaggcaaagtttacccattattattatgattttgaatattccttgttcattacagtccagaaaatctgcagaagttctccatgttcagtggttgaccagaatctgattgttgcgctcaattaaagtgcttattatttagctaaaacaacttatatggaagttaattatttcaggaaatacataataagaccaaaaaaatcactggataatatgtagatatattttagttccattactattaatagcaattagataactctccctccccccattgaggtgagaatgggctcctagatacttggtggtcaatagaactgatttgattaactttcatttaactgtggttattgttacatctactgattttttcaaataaaaatttctagaaggctcagatttgactaagactgtgttacgtgctttctcacagctgccatatattctcatgtaatctttacaaccgctctacaaggtatgtctaattatttccattttacttattgagaatctaggctcagaggagttaaaattctgaaaatctcaccgataagttggagaatttaagtttgtaagttggagaatgcaggttttctgactccaaatctagtgctcagtccatgagacaaaactgcctcctggaggccatggaagtccattaactttaagaaagttaaacacagttttggtttgtttggcaaatatttcatctctcaagccatactgtgtcacccctccatgtattctcttac

SEQ ID NO: 47499 - DNA, 1067 bp, Homo sapiens
ctgatgaatgtattcaagaagcgtaagaccacaggaactctgaagcagttataataattgaggcaagaaatgagagtggccaggaatcaggatagcatcagtagcaatgaaggaaatggtcagatgtgagacacctttcaaagtataatcacaagagaatggtgaatgcttggagatgaaagtgaaaggaatggtaaacaactgaagttcacatttctgactttgtaactagtagatggcagcctgaaccatttactgagacaggatacacaagaatattcagtagctgattggagagcggggagaatgagttcaggttgggacatactacatttgaaatgcctgtggacatcaaagtagagacatccaggaggcagaggtggtgcttagaagaaaggacagactagagctgcaaatgcgtaagtgattagcacgtaaataacagcatgtgggaaaagatgcaactgtccagtgaaaacaggcaggctaggaagcctggtctagaacagaattcgaagggctgtcagcattcaagggacaaatagagaaatgtccacaaaagaaatcaagatagtctcctcctactgtgttttacattctccgagtgagcaaatggaagccaagagagtactttaagagagtgggccgggtgcagcggctcacgcctgtaatcccagcactttgggaggccaaggtgggtggatcacttgaggccaggagtttgagaccagcctggccaacatggcaaaaccccatctctactaaaattacaaaagtttgctgggtgtggtggggtacgcctgtaatcccagctacttgggaggctgaggcacgagaatcacttgaacatgggaggcagaggttgcagtgagccaagatcgtgccactgcattccagcctgcacagcagagaccctgtctcaaaaaaaaagaaaaaagaaaaaaaagaaaagaaagaaagtgatcagtggtgtcaaataacactaagatgtctgataagaaaaggactctggtctgccagatttaacccgggaaggttacaagagacctaggcaagaacattttctt

SEQ ID NO: 47500 - DNA, 1050 bp, Homo sapiens
ttccctgtggctggctttctcctacctcagcagcatgagggtcatcagaggggtgttaggacagttcagtgctatggtctgtctttgaaaagaagccagttttgtcttgttagatactggggttgtgatcctggatgacagggattctgcgtcagttctgggccaggggaatgaaggtttgacaggctggtcatagtacagggttattatgcaaaggggaattgctttctgagggcccaagatggtgcgatgaacagggtagcctggtgtcttggtccagctgacgcttgtgaatgaactctgtagtgcttgggtagaagagaaagactgaatatgatggactctccaccaatttctcaaattgttcaaatcatggtgtgatgcctcccttcataggctcccaaaggaggaatcctttctatctaccagaggttgccaggactaattcttttgatgcctgctaaactcactgggccttttttttttttttttttttttgagatggagtctcactctgttgcctaggctagagtgcagtggtgcagtctcactgcaacctttccctcctgggttcatgtgattctcctgcctcagcctcctgagtagctgagattacaggtgactgccaccacacctggctaatttttttatttttagtagtgatggggttttaccatgttagcctggctggtctcgaacttctgacctcagatgatctgcccacctctgcctcccaaagttctgggattacaggcgtgagcctcactggaccttatatggctatctccatctaaaatgtaaatacatcacttagccttactctccttttttaactttcatctgtaaattgctccaggctgcttctcctctgactcagcctctaacttctgtacccctcccaaaacttaatactggattcttaagccccattgtgtggctaacacctcctcccacatcctcaatctcttctctgaactcttcatctacttcctgcctccttaggtcacttagacgtcctctgaagtcttcaaaatagagaaggcttttcct

SEQ ID NO: 47501 - DNA, 1048 bp, Homo sapiens
atttcaaacagagagactataatacaaggagttagttgcataggtgatgggtggtaaattgacccagagagtagcagtagcaggaagttgctgttaccctcaggactggagggttaggggaagaggcgaagttaagtagaacccaggagcttctgtgagaactagacctgtggcagggtcattgagcaggagctgggaccttagaggaagggggccctggaggggaggcagccgctgccagtggcacgatctgaggcagagagcaggttgggacagaaataccctggcttgtctcctcatccttcccattctggtctaacatcaatatcttttattagccaaaatagcatccctggtggatgtgtgaccctaacagagccaggcagtctttcctgagatttatgagatggatgatgggggaaagaatgtcttgcctttctactagattgtgaatggtcgtgtccttcaatgcagagagtgcttggcttaagaatgaagccagagggaagtagagctaggagaggaagaggggcaagatcatttgagttcaggatccgactgtgccagctgtgcctgaagttagaacgggttcctggttatagggggtcataaattcccttttgttaatactgttttcaatttggtttgccacttgaaacttaaattaccaataccgtgaccttaaaatatgacttgaaaattgggttttacctgaggagtagggagaatggggtgtttattcctattggcagccccactagctgggggtatgtctgcagatcagctgaggtcgcagaggttgtgttttcaccaggtccgtgaagttggagggggctttcagatgtggggtgggaaaagccccaaggtgaagggcagagacaggaaagacctgtggccgctggaggaggactgaattgggtcatgcgttgggagtgggttttgagagtctagaggtggagattagtgagagacgaggtgggtagacaggtcaggaggttaatgagactgttttgagtgctgtgatgtggaggttagcttttattctttc

SEQ ID NO: 47502 - DNA, 1058 bp, Homo sapiens
gtgtcactgtgcctggctaatcttttcattccaatcaagtgttttaagcgggggaggaacagggccgtgtttggggttagagtcactgatcaagaactagctgggattgggtgggtggagcctggcggcaaggagtccaagaagaaggctgttgcagtgggaggttgggggaggcagtttcagtagggctttggctcactggattcagagagtgtactggttagtggtttgcttgcaaataatagatatctagcttgcattaacttagcaaaaaggtgagcctatagacaggcttgctttaacgtaggagtaagctggaaccaggggtctgaatgctactgagggtcggctttattctctcagactaacatcatcgacgcagggggagttgtggcagcgcgcctccctcacattgcacagctgtgcctccagaaagggagtgagtctatcttcccaggggaaaaggtcagggagacctggcttgggtcacgtgcctacctttaggctgatcaactgagctcaacctgggccaatcaacagtggcttggggaggagactgaaacagtaaggaagtcccaattccagctaccgggttcagaagcagctgtgaggtgtgcaggacaaacagtgaaagatcactgtggaagagactctagggtcactggctttaggaactggctgaatgatggcaagaatagaacaggaatttgaggaaaagtaggtcaaaaattatagattttctaaggcatgtatgccttttacaaattgtgatatacttcacataccataaaattcacccttttaaagcatacattttagtggttttgaatatattcacaagataatgcaatggtcactgctatctaattccagaacattttcatcatctcaaaaagataccccatacctgtgagcaaacactgtccattttccctattcccagcccctggcaactgctaatctgccatctgtctctggagttttcctattctggacatttcatataaatggaatcatacaatatgtgtggcctttcgtgcctggcttctttcagttaa

SEQ ID NO: 47503 - DNA, 1056 bp, Homo sapiens
ctaaggcatctctgtagcttggcatggaccaggcaccaccctggcacagacaggaagagctgaatcttcacttggcttctgggattccactcactgttggttccttatgtaccttactggctgttcctcctctgtctccttggctggttccgtctcatctccctagctctaaatgttggactgctgtaggactccattctgatatggcctctcttcatctgcatggtgtccctaagcaatctcatccagcctcacacatctacacactgataactccaggccagaaacctctctcctgaattccaaattcctgtctcccactgccttcttgatgtttaaccctgcatctccaacaggcatgtcaagctagttatctagctcactcttaattccaaggataagccttggaattagcctcggctcttccctttttcatcccatacctaagccatcagcaagtgcttctgaaataccatgtccagaatctcatcacttctcactctctccactgctgctaccctgactgctgtcatcccctcttgcctgcattactgtaccagccgcctgactcgtcttcctgcttccaccttcccaccttcagtcatatatccaggcagcaaccggagggattatttaaaacataagaaacatcagtcgcatcatgtctcttgctttttaaatttaattaattaattaattaatttttgagatggagtctcactctgttggccaggctggagtgttgtggtgcggtttcgactcactgcaacctctgtttcctgggtgcaagcaattctcctgcctcagcctcccgagtagctgggattacaggcacctgccaccacacccgactaattttttgtatttttagtagagatggggtttcaccatgttggccaggctggtctcgaactcccgaccttgtgatctgcccacctcgtccccccaaagtgctgggattacaggtatgagccaccgcgcctggcctcttttttgcttttgcttgaaaccatccagagacttctcagttctcacacattcccctcaaatcctcca

SEQ ID NO: 47504 - DNA, 1084 bp, Homo sapiens
tcatttgctaggcagacattgttttggttatgtactattgcttaaccaccccaaaactaagtaggttaaaacacaaatgtactgtgatcttttagggttctgtgggttgactaccctcaagtatgtgttttttgctctaggtgtctcttgtatttggagtcagaagttggctggggctgcagtcaactggaggttcattggactggttgcctaaggtgactcacttgtggccacagttgactggagtgcctatgtgtgacatcaccatgtggcttgggctactcaaagtgttgtggatgggtacctggagggcatgtcccaagaatgagcattctaagagtcagggaagtggaaattgctgggccatataagggctatgcctgaaattggcacaggatcagtttggccatattccttttttttttttttttttttgagatggagtcttgctctgtcacccgggctggagtacagtggtgcgatcccggctcactgcaacctacgcctcccgggttcaagtgattctcctgcctcagcctctcgagtagctgggatttcgggcacctgccaccagcccagcacatttttgtatttttagtagagagggggtttcgccatgttggccaggctggtcgcgaactcctgaccttaggtgatccgccagcctcggcctcccaaaatgctgggattataggcgtgagccactgcgcccggcccggccatattcttttggtcaaaatagtcagagggtctacccagattcaccaggatgggttgatagacatcatctcttgatggggaagtggccaggtcacatgacagataagcatgtaagaccagagatatagttaggaccttcctttgaaaaataccaactgccacagataccatgctggagatagaataacagctaccaggtccatgctttctcacaccttatggttcagtgccagaggcaggtggatgaacaggcaatgacagcacagatcataagtgttatgaaagagctaggtacaggggcatgatgagagaacttgggggggggggatttgcacagcccagactgggcaagtactggtgggtg

SEQ ID NO: 47505 - DNA, 1055 bp, Homo sapiens
agaagatgttgtccccctacaaatccccagacactggggtgtggacgccgtgtgtcccgtggtaccagtacattgaaaaggcagtcccatcagtggctgctgctgtagttggactctgcagtcacgtccacactgagaggggctgttgaaggtatgacgtcccagctgatgagcttgtccatctgccctgtagtcagaagcataacggaagagaagcggaggggggaggtctattgccatgagtaccttctgtgaaaaatggtacccttttagtaattacagtttttttgatattgcgtaggtatgtgattaaatgatctgtggtcagcagaaatgggagttgaaggtgctttttctgtgtactttccattaccccccaagttgggtgacattgcccttgaccccaggccacacttcttcactccgccgtgtcccattgcccttcccagatgtcccgtcatcagctagagctcatggatgtgactgctaggttaacctctaatttcctgtacgttctcttgcatgggggctaggtcataactcacctgcaaaactccaagaggagagaatatagggaaagcaccccctcctccccagcctgtgatctgatggcccacaggtcacccaggctcttcccatggtgtcatgtcactttcttgccatattctttagtctctgtttcccagttattccaaagcgatattcagaggccttcacatctgctgctaggcagggctctgttctgttaccaaacctccaaaccaaacaagataactaactaggccttcttagtttcacagccattttttgaatactgtagggacataatttattcattggcttcttaccaagaccaaagagcgaggtctgcaatttaaaaaatctatctttcccttcctttcctggcatttgtcccactgactaccctcctacccactactctcttttaaaaacgtcatagaaaattttaagcatatagaaaagggaagagaattgtataatgaacctgcaggtaccagcttcaatggtgatcagcttgggcatcttgtatcatt

SEQ ID NO: 47506 - DNA, 1070 bp, Homo sapiens
atctttttatcaccccaaaaagaaacctcacatcccttagctgtcacttacaaacactgtatatctcccagcccctggcaaccactcatgtactttctacagatttgcctattctggacatttcatgtaagtgaaatgatacacaacgtgattttttttgttactgggttttttcacttagcatattttcaaggttcatccatgttgtagcatatattaatatttaattcctttttattgccatataatattctagtttatggataataccacattttgtctattcacccttgatggacgttttggttgtttcaccttttggctattatgagtaatgctgctgtgagcgttcatgtacaagtttttctgtggacatgttcccattttggggggggtgtattcttaggaatgtaattgttgaatcatacataactctataattggccttttgaggaactgccagactgttttcaaaagtgatgacagcaacttacatttccacacgcgatgtataggagtttctccacatctccatcaatgctgttactgtctgtcttttggattgtagccattctactggatgtgcagtgctatctcattgtgattttaatttgtatttccctaatgatgttgagcatcttttcatgtgcttttgggcatttgcatatcttccttggagaaatatcaattaagatccattgcccatttaaaaattggggtgccttttcatccttaaattttcatagttcttttttcaaattttatatatatgtgtgtatatatatatgtgtgtttgtatatatgtgtatatatgtgtgtgtgtatatgtgtgtatatatatgtgtgtgtatataattttttttttgaggcggagtctcgccctgtcacccaggctggagtgcagtggtgtgatctcggctcactgcaagctccgtctcccgggttcacgtcattctcctgcctcagcctccctagtacctgggactacaggcgcccgccaccatgcctggctaattttttgtatttttagtagaaacagggtttcaccatgttagccaggatggtctcca

SEQ ID NO: 47507 - DNA, 1020 bp, Homo sapiens
tgccttctttcttttctttttctttttcttcttttcttttcttcttgccataacttttccatcatatcacgtgtacatcaagcaatgtaaaaattactgttgaatttactggataaatatctacttttctgtatttcagagactataatttagtgttttattccttgcattataaaattgacagggtatttactccatgtgtatttttcagaagtctttatattaatgactacatgaagatctgcctgattaagaaatacttttcttggatagaggggtaatagaactgtgtgctagcctggttgtttttccttgcaccatctcatcaattactctggtttttttcttcatgtcttcatagcctcttcccgagaagtttgtggtaaaaggtgttgtggatcgtttttcagaagagtttgtggagaccagaagaaaagctttggataaatttctaaaaagaattacggaccatcctgtgctgtctttcaatgaacactttaatattttccttactgctaaggtaagggcagaaatttacatcctcttcgtccatattaccattcttggggctctttcctaaaagctgttttgagcaggactcggtctctacaaaaacttttaacaaatagccgagtgtgatgttgtgcgcctgtagtcccagctacctgggaggctaaggcaggaggtagcttgagcccaggagtttgaggcttcagtgagctatgatcgtgccactgcactgcagcctgggtgacagagtgagaccctatctctttaaaaaaaaaaaaaaaaaaagcggttttgatctttcagaagccaccttcatgagcaaatggttcactgtaacagggttgtcataaaattggtctttttttgggtgcctgtgtccattagcatgcttttttgcattagcaaatccatatagatggattctatgttagaatttaggagatctgtccccaccccatccggggccccacccacttgcagcagcagaggaagttagaatatttgctctgc

SEQ ID NO: 47508 - DNA, 1098 bp, Homo sapiens
ttacagcatccatcctaggcctgagttttctagcaatgtttttctgccactgtttcctgctttccaccctttactccccttatatggctttagttggggtataaataaatgagtgatggatctcggaacctctgctcttcagttttgcttgtaaagacaatatagggtactttgtatgggagaaacagatacttaaaaaaaattatgttagaaacagcattgtgtttaaagggcagtgtgctcaggtgagtgaatttgattaaggattggcgttcagctctgctgaaagggatttaagtgtcaacctacaggagcctgagtctggtggttatgacgtccaggccaggttcctcctgtgaatgtgattagagcctctaactcagctccttgtttcccgagttctccatttccaaactgaagctgcttttagaagctgttttatttagtcctgcccatgtgagtgagtgagtgctttgagcttattcacatatcatcctcaggacctgaacgcctacaagaagcaagggatagcattgctgaccagaatgggcgagtcagtcaagcacgtcactggcggctacaagctgaggactcggccgcttgagtttgctgccataggtgactacttagatacatttgcactcaaactgggaaccattgatcgaatagcccagcggatcatcaaagaagaaataggtgagctgtctgttgaggtctcgattatgccctgcagccacattggcagaaatgccattcatgtgtgctacagagaatcaaactgcaaaatgctggagtgacagaactaggccatcttttgcttatcaaagaaatacaaggaggggaggagttacttgtgactggaatgtcactttgcaccccgtcctttgtcctgctgtgtcagccttgtgtttgcttttcccatggccagcactgctgattcgccaggtgtttcctcttttatgctctcttaactttagctttaaaagtggagacatagactcaactgcccttcatccatagggaacaataatttagtaaacaaacttagataccttttctggcagaaagatggttcagaaagatagcatggagacctgt

SEQ ID NO: 47509 - DNA, 1059 bp, Homo sapiens
atgacgaacacctttcctgtggaagggacagaggttactccggagtgccttgctgtccctgcctcactccccattagctgagtctctggagagttcttaggggacccttccttcttactctctctctctctctctttttttagagacagagtcttactctgttgcccaggctggagtgtagtgccacaatcctggctcactgcagccttaaactcctgggctcaggcaatcctcctgcctcagcctcccgagtagctgggactacaggcatgtgccaccatgccctgctaatttttaattttttttgtttagagatgggggtctcactatgttgtccaggctggtcttgaactcccagcctcatgcgatcctctcacctcggcctcccaaagcactgggattacaggaattgagccactgcacctggtgccttctcagtctttgtgtggctcaattcactaggaatcctgcctctatctagttgaatcttcccaaggcctgtggacgatagaatccttctttgactgtggcttttcagtgcctgactttctaagtcactcctatacccgtctccactctctgtgccctggatggaaaccagtgtttctagtgtcttcaaagatgcttctggaactgtctcaagtgccttctgcaggtctgtgcctcatgcttagcagctctgaaacagcccgggcagaagattccagagagattctgttcactactcaccataagaggagccctttatgagtttggacatagctgatcggatggttgtgacggggatgagagcaaacagcatgacggctcgagctgaaagagatcacacaagaacactccttgctgtagcccagcctgggccaaggaggaaattatcaaaagcctctcttagaacccccatctccccacaatccgaatgtggcttgacctggaggaagtcatttctctgctggcacactagcgccctcccttgaccagtctgtgaccctctgagctctgatgctgctgtgtatgctgcatatcagtctgcaaggtggctgggcacagttgacatggtga

SEQ ID NO: 47510 - DNA, 1020 bp, Homo sapiens
tccgtgcgccgggagcgcgccggccagtggcgagcagagccagggcacgcagcgcctgtgacagcagcccgcccagcagccgagtgacctcccgagtgactcctcctcaggccagaaaaggccgcgctccaccctgccctcgccacctcaggcagagtaggactggcgacagtccagggaagccaggcgcgggggagcgcaccgcgagtgctggctcctggcgccagcacccccggggccgacgggtcacgctgctcctgtgagcgcggccgcctgacggggccgaatttccccacagccaggcgtgcgtgcccggacctcccgcggatctctgcggaccccccaccaccggggcaggggctggaaggaagctccccaggactggctcagggagcgtttccaaattctcccatcccaggaaggcaggtttgcgcgaggggtgggacgcctaggattctgcctaggataagtattggggtgtgaagttttatttatagatttaatgcaacaggggcccatgtgctataggcagctgggtagcactttgagagaagtaaaaacttgggagccgccaggtccaggctcttctccaagccaaaggcctcttagagaagagtcctgtttggtacacctgcattggtgggcctagtgcctgggccttgtctagaaggctcctgccccaaaccccagggccaagggagagacggcaagatcctgccagccctagatgtccccctagatgataaaactggactcttgggcaggggcttgagcccactggaaggggcagagtcaccagggtcctcatctgaatcaagtgcccaggtccctttctgcttgttagtagtcactcttcttctgtctgtgggctcactcccctgggctgggctgagacctccacttcccaggtggcctcgcttcttgtttaggtacatacttctgcaaagaaaaccagggtgatggatggtgcaggggccaaaatgtaccacagagcatgacctgttccatggtcagccccag

SEQ ID NO: 47511 - DNA, 1050 bp, Homo sapiens
tccaaacctttaaggatctctggcatttgttaagtaaaggccagctgttgaatcgaattaatgcataacactatgatataataaagcatcttcttagagcaactattatatacccggcactaccctgaactgtttctgccagttcaagtccatttgatacacagtgggaaaagatggctattgaagttatcctttcccctttgatataatcactaaatgattgatctttttctcacaaatagtggcaatttggggaaatctcagaacaggcaggccttccaaatcaacgatgctagataacgttttgctttataaatacgaagttgtcccaggttgactgtgggaagagcaacactggttcattgcataaaacattacacaatgtttgttgatctaacttgacttgcaagctatcctgtgagttttatgataatttatgccaattggtggtatgatgcttgagttatggtaccttatgatgttgcttataagtgaaatgaagtatactccaatgtagaaacacctacaatctgattaaattgtagggtgcatctaataaatggtttctacagacatacttaaagtggacagaaaagcaaaatatgtgtctaaacagaaatgttaaaggggaatattctgattactgagttttcagcaacccttctgcccacaatctttcctgaagtttgggtaaattcatggctgggtcttcagccatagaaagtctgtcctcatcctttcttttttctttcttgaatttcatttcattgtggtaagaggacttggtaagagatctaccctcttaaaattttaaatgtataataccttcttattgactaaagctgccatgactgtagatatggcagaggaccgacaagctatagagatctgccctcatccattctctctggactcttgtgtcaggttgcagtaggtcccccacattaaaatttcccactaaacccaaatgtaatgcatctaactagtttcccccaagccagatggcaaaaaacccttctagccttgtcttaaaatccttagcattatata

SEQ ID NO: 47512 - DNA, 1047 bp, Homo sapiens
aatcaggagaaaacacatacaaaggaagcaaataatcactagaggcctagcaagtggttgaccaccctgtcttggaaagaagggctgggatgaggtttgggggtctggagctgaaggacagactttgagtcttatgtcaaatgattgttctatagtttgtaacttgcaaacttctgggttacatgcaaacctcttgtattgtccattaacttgggtcatggttaagatagattatcaataaatatgtatgggttcaaaaaaattaagttgtcctattgtatctagcttatttcatttaacataatgttttcaaggtctgtccatgttgagtatggtcagaactttactcctttttagggctgaatccatttcattgtgtgcttgtacctcattttatttatccattcatctgttcatggacacttgggttgtttccacattttggctgctgtgaacaatgctgtaatgaacatgagtggaccaatatttgtatgatttcctgttttaactctttggggtgtataccctggagtagaatttctgggttgtgcagaaattctatgttggggcttttgggggaattgccaaattgtttttcacctcgacttcaccattgtacattcacagcagcaatgtgcaagagtttcactttctctgtatcctcaccaacacttgttattttctattttttcccttctgaggtttgctgacttagaaggtgtgaattcatattattttttaggttaaataaaaatcatgtttcagaataagatatagtggtgtatcctaccagagatgatgtattactagagattaagtttgtaggtcctcttcccccaccaatcttctgttacaatgaaccaatcattccactccttgtatttattagaggtagcttctgaagaagctccctaagaaagagtaggtcccttagaaaaattacttagggtatccttccttagaaggtaagacaggggttcccctggagtccctgagtgtagcctccttttggggagggggacaagtgagtagccccattgtctgggg

SEQ ID NO: 47513 - DNA, 1047 bp, Homo sapiens
actcattcactcatcactcattcactcagcactaattaagcagagaagagagagaacacaggaacttattaaacattccttgcattgcatgaatgatgaagagaaattctattacagagaaaaatgatgaagaaatagttctgaccctgtattctaacttatgttgtataccagaaaagggggagggaggatgttgagtaaatgacttttgcttttttgctattgctaatgccatcttaaccttctctcagctgaatacatgaaaaagagaaaggaagtaataaagggtcccaggtttgtttctgccatcttcaacatcagaagttttgaagaatttttgataaattgaggaataatggcaaaatctgtagatatctcttattaaatatttgctttatgcaagctgctaagactttcacatacattatctgaaagccccacgataaatctaaggtagttgagaaaactcaagatctattttccaggtttgtggaaaatgggaagacagttccattcccaggttagacgtcaaggacatacagagtacagaagaagaaatgtggattataagttggagggtgagatggcctcctgggagttggtccacaaacacagaaacatatttgagtttcatacaacctactactttttccatttcgaacgtgaaatcctagtgatttttagcacatcttcaattactgggcccttttcgcaagcattatatctacacagcaactctgtaaactaggcatcattgtttcctcttcttttttttttctccctttcatggagaatggtatctcattatgttgcccaggctggtcttgggctcctgggctcaagcgatcctcctgccactgcctccctaagtgctgggattacaggtgtgagccactgtacctggcccattgtctcctttttaagtcttaggttatttgctcaaagcttatgggagaattgggtcctctatccaggtcttccaactccagatttcaagattttcccacaagctttcctaccaaattatttttatggtatctttgggtg

SEQ ID NO: 47514 - DNA, 1164 bp, Homo sapiens
gtgagaccctacctctatgaaaaactttaaaattagccctgtgttgtgatgggcaccggtagtctcagctattcaggaggctgaagtgggaggaccacttgagcccagaagattcagtgagttccctccactccatgatggcaccactgcactcaaacctgggtaacagagtgagaccctgtctcaaaaaaaagagatgttgaagaaataatttctggtatagtttgtatatttgtccccaccaaaatctcatgttcaattgtaatcctcaatgttggaggtgaggtttggtgggaggtgattggatcatgaggacagatccctcatgaatggcttgggccatccccttggtgagaagtgagctctcactctgagttcacaccagatttggtgatttaatgtgtgtggcacctccccctcactctcgcgctctctctctttcttgctcctgtttttgccatatgatgtgcctgttcttgcttcttcttctgccatgcataaaagctccctgaggcttccccagaagctgatgccagcactgttttcctatacagcctgtagaaccacaagccaattaaacctctttatttataaattacccagtctcaggtatttcttcatagcaatgcaagaatggtctaatacaatttccccactaaaaagtctgcacaaacttataccttcagcaatagcatataagtctggtttgcaaattcccaaaccaaaaagaatattactgtcttttaggaagggggaaagtttaaatgatattttattatttatatttttaaattagaactattatatatctctacacactaaccagaatgacaaaaacacacaaaaacctcacaacatgaaatattagaagaatgtggagcaaccagaattgtcatacattgttgatagaatgtaaaatgatacaaccactgatttatatattagtgaatgaaaaagccaaaagcaaggcacatcacacttaaatttagaagactcaagaaaaagaaccagctgggcgtggtggctcatgcctgtaatctcagctctgtgggaggctgaggcaggaggaacacctgaggtcaggagttcgagaccagcctggccaacatggagaacttcgtctccactgaaaatataaaaattacctgggtgtaatggtgtgtg

SEQ ID NO: 47515 - DNA, 1050 bp, Homo sapiens
ggccaggatttgaattcttgtgctgaggcttcctagatatgtaactttgggcaaattactttacctctctaagtctcagttttctcctctataaaatggtgataacactgtcttctgcagtggttgctggagataagccagtctgtgaaagtgccaaacagcaccgccttttgttaagcaacaaagaaataattagttctcactgcctcccaggtccgcacacgggagacatatccaaagcctgcaaggatgatgccaggccagatgaagtggaattttgggtcctatcttttaaaacatttaaaatcaagaaacattttttattaaaattaattattctgtttttttaaagactgattgcataatctttggaagatcctggaatcaagaaaatgaccacaagtattttctcactactgttctctgcataagtcctggtcccatgagttctaagggaatggaagctgctctcaaagtgaagaatccctcaggtgccatgaacaatggaaagaagggaccctctcaccttctttgcatggcttcctagactgcaggactaagcctgcaggagcaagaggatgactggactggtcctcacagaaccatcatgccccagggatgagctaggactacagtggtgactttctttgaaagcctaaaagttccagggttaggtatcaaagggagtaaatatgccacaacgttttgtgcacattaactgacccagatctgtaagactcctacccttagattcccaaaagagcacagacagcccttggaaccaaactcaatttttctccaagggcttgggtcaagtttcattatagacatttattttagttttattttcaaagtcattgacctcttgtatcagatttaaggcaaagaagaagatacatgtcccaggactataggccaggctgttgactgcactgggatttagatggtgtaatctcccttagttctaccagggagacctcagcccaggtcttgttgccggggcacagttgagcactggattcaggtagaggagggctcccaggtcagtct

SEQ ID NO: 47516 - DNA, 1024 bp, Homo sapiens
acagctgcccacctgccatttgccccatcactgacactttgagcatggtctttattttattgtgtattgtattttttagtgtttactctaaaaacattgtagacaaagactctgttttatatctttttatacctctgatgtaatctctttatggtaatggtatcaataataccagattgtcgagctctgtaattttttttttttttttttttgaaatggagtcttgctctgctgaccaggctggagtgcagtggcatgatctctgctcaccacaacctccgcctcccaggtttgagcaattctctgcctcagcctcccgagtagctgggattacaggcgcgtgccaccaagcccagctaatttttgtatttttagtaaagacggggtttcactgttgagctctataattataaaataatgtagtgtctggcatgaaagtggatctttgattatgcctacctgatgctttgccttatccttcactagaaataagaacctatttcttaagccagctgtcatagaactatggggtaggagttaacaaggagaaaataaatagatggctccctgaatctatataaatttcctacccacagtctttttttttttttttttttgagatagtctcctgtcacctaggctggagtgcggtagtccaaccttgactcactgaaacctccacctcccaggttcaagtgattctcatgcctcagccacccgagtaactgggattacaggtgcatgccaccacacctggctaatttttttgttttagtagagatggggtttcatcatgttggccaggctggtctcgaactcctggcctcaagtgatctgcctgcctcagcctcccaaagtgctgggataacaggcatgagccaccgcgcctggccaatttattctttacctcttggtaattgtgtcttatttctcagcttatttccttcacagcatgaaattatatttattgtttctctccctatcaggaaccttgtcttattcattgttgaattattagcaccta

SEQ ID NO: 47517 - DNA, 2818 bp, Homo sapiens
gacagccctgtgctgtttcatttccatggaccaatcaaagaacattcaagtacccatgagttgccagagtggctgtccagttccagctgagctcatggcaagaactcttccctctttctcctgatctgcagaactcctaggagtccctgattgttgtgtccctgtttactctccaggcaacagatgctgagctttcctcacctcctgcaaacagtgctgcacatcatccaggtggtcataagctacttcctcatgctcatcttcatgacctacaacgggtacctctgcattgcagtagcagcaggggccggtacaggatacttcctcttcagctggaagaaggcagtggtagtggatatcacagagcattgccattgacatcaaactctatggcgtggccttatcgattgcagtgggaagttgttgaagacttgaagacgtgattcctgctccaatcatcccttcttgctcctctttgtgcacgtacacacacacacacacacacacacacacacacccctgctcaacagaggtttagtttacagtctctgaactaaagtagtaacctcccaaattgttttttctaataagctgagattcccatttctcttaaggagaagccacccatgagatgtcttttccttctccatcatcttagagccaagttatatgttcttgtctaatccatgtagctttttgttcaatgacttgatcatctgcttcctttttgaatttttaacagatagtaagtaaatttggtggttttttcccctgggtcagtgatggaaaggggttaacttcagccaggattgatggcagctgagggaaattcttgcccaactaaacccagaactcaaacttaacattagaaaataaggtccagggccggacacagtggcccatgcctgtaatcccagcactttggggggccaaggcaggctggatcacctgaggacaggagttcgagaccagtctggccaacatggggaaaccccgtctctactaaaaatacaaaaattagccgggcatggtggtgggcgcctgtaatcccagctactcagaaggctgaggcaggagaatcacttgaacctaggaggcggaggttgcagtgagccaagatggcgccattgcactccagcctgggtgacaagagtgaaactccatctcaaaaaaaaagaaaagaaggtccagcttttggattcaatgagtgggaaatacattgtgcctttctctagatgtgatacgttataccaaaatctttgtagtgtgcagagcggtggtttgagactaaatacaggcttagaacttgcagagtgtgtattcttggatggctgatgcatcgacttgcattcccacttaacactttgattagcatgaacttgccaatcaaaaaatgacaatcaatttgagaaaatagaaatagatatttttaaataaaaccattcacagtttactttgtcttgataccttggtttgtcccagctgaagtgaagcaagagagtttgaattaatttttccattataatgttttcgcatgtctgcctctaaaactgtgattttcaagctttagcgtgcatcagaatcacctgtagggcttgttaaaacactaattgctgggcctcaacccaaaagcccccaaagtggcacttctgagttcctgctgatgttacaagggaccacacttttgagaatctgtgctttaagctaaggaaatattgcctggtgggttggctgcctggtattgggcatggaaatttgaattgctgattggtagatggtgtgtctggacttaactcacgtagtaaatactgctgatcaatacctaatcattccacatttattgagctccacctgtgtgtatgtgtacccaagcacacatgtgtgaagggctatagccaaagtatttttactagcctgtatgaaatcactagtccttatttttaaaggtctatggtttcttggaagtagtttgattgttgagagagacctttgatctgcagtgtaaatctaccagtcatgggccagaagggcaaaagcccagctttctctttggaaagactcaggctgtggtttgttgatggccaggttttcctcaggctccaacaactgtgcttataccaagcagatcctcatcctccatataatcatctttgttattcgtgggggtttaattacattacaagtggccaaaacccctgttctcagtgaagaaccacattggatttgtattctgttcagttgtagtctacactgcagtcttattcctggttcaaactacctctttaaattgatttgtcttgtgctggtctgttaaatcctgccctccttggtgctagatccagttgtgcctcagggcagaggaaacaaaacacagctatcctgttggcctgtgttgtggttttgaagtttgtactttctctgtgggtgccagttaaatattggagagcaaggaatgtggacttgtatggctttgaaccaagagagggttatgagcctactggattgaggttaaaatccaagaaccaacatttagagctttgtgcttttctctcattccatcactttgtaatgatgatacttaacatgagcagggtgaatgacaggtactgacgaagtccaacacaaaggtataatacagcctgttgtctaaagccaaggagtcataaaaccatgagaaataaataggaatcaatagttagtagtgacattggtgctctctagaaatctcagcatgagctgctatagaataccctcccagcaacaaaacctaatcagtaaggccagctagacccaatggctcatgcctgtaatcccaaca

SEQ ID NO: 47518 - DNA, 1900 bp, Homo sapiens
agccaggcatggtggtgcatacctatagtcctggctatttgggaggctgaggcaggaggattgctttagccctggaggtcgaggctgcagtaagccatgattgcgccactgcactcagcccgggtgacaaagcaagaccctgtctcagaaaaaaagaaaattcaaggccagttaagacaaaatgctatgactttgaaattcacagaaagaaataacagtttagattaggtcttcaggtattcaggatagagataatctcctgaaaaacctgaatttcagagattcttagactggctgccaaaggatgaagctagtgaaggagaaaaagcttaaattccatcttgagctcttggattgtgataatacaatgatttcattaacttttcatttctgtatacctgttcatttggaatttaatgcttgacttctttgttcattttggatctaaacttctcttttcttccttccccattcacatctattagaagactgcatcaccatttctttggcccccttactctgttgtcctttcccttttctttcagtttttttaatcgcatgtctagtatattaagtctccatagccctcctgatgcagtagacagtgctatgctgtggatataataccaaccagaaattggcatttataaacctgttaagagactttaagcatgcttcaagaggcagttgacccactggaatttctataaggctggtacccttcccagagttacagaatcttaggtgccgtctctagtctgtgagggaggaactcccagcatccccattgcccacaaatggaatcctcactgtatccactaggagattagaaattaaggtttcttcactacttctatggtagggttgtctgaaattccctttcaggctgtgggtactggtcttgggttctagtcataaggggttccttataaggagcaggcggaggggagtacactttcatgtgatttaattttgatcctgccctctccagctgctccttcaaaagatacatcaaaagatagaaactctgggctgggcacagtggctcacacactttgggaggccaagcgggggtgcagatcacctgaggtcaggagtttgagaccagcctggccaatgtggtgaaaccccatctctactaaaaatacaaaaattagctgggcgtggtggtgcatgcctgtaatcccagctactcgggaggctgaggcaggagaatcgcttgaacccaggaggcggaggttgcagtgagccaagatggcgccattgcactccagcctgggcgacaagagcaaaactccgtctcaaaaaaaaaaaaaagatacaaagtctgcatttgatataatgccttaattactgggtctacaattaatgttgactgttttagattgtaagctcctggagagcagtattgctgtagtaggaatgttttaacagtgtcatatgaaaaagaacaaaataaatattttgattttgtgattctatgcaagtctttctgcccagagtgataatgcaataagctagtcttttcatagtctgcatagagtctggccattaccatcagtttttaagatgtccatattgtggccgggcgcggtggctcacgcctggtaatcccagcactttgggaggctgaggcaggtggatcatgaggtcaggagatcgagaccatcctggctaacacggtgaaacccgtctctactaaaaaaaatattaaaaaattagccaggcctggtggtgggcgcctgtagtcccagctacttgggaggctgaggcaggagaatggtgtgaacccggaagtcagaggttgcagtgagccaagattgcacctgggcaacacagcgagactccgtctcaaaaaaaaaaaaaaaaaaagatgtccgtattttaggtggtatgatcc

SEQ ID NO: 47519 - DNA, 1048 bp, Homo sapiens
aaagacggttacttagcgcaggactgtaacagtggagatgaaaaggtatgggtggattccagacatattctgaaggtagaatcaaagggtctacagacagatcgaatataaagcgtaagagaaagggaggactcaggaatgactgctaggtttctggcctgaggaactgaatcaatactgagatgggaaacactggggaagaatggaagggacgactggttcaagggagaaatcaagagtttttctctcttctttttttaacatgttaagtgtagtaggctgaaaaatggcccccaaagctagcaggtcctaatcctggaacctataaatgccttatatgggaaaagggcctttgcaggtgtgactaaattaaggatcttgagaaggggggattatcctgggttagtcaggtgggccctaaacacaatcacacatatcataagaaggaggcagaggaagttttcacagacagaaaagaagacaatatgactctggaggcagagactggagtgatacagtcatgagtcaaggaatgccagcagccaccagaagctagaagagccaaggaatggattcttccctagatcctccatagggaatgtggccctcctgacacctaaatttcagcccagcaatactaatttttggcctataaaactgtgaaataataaatttctgttgtcttaagcgatgaagtttgtggtactttgttacagcagccacaggagacatacatgaagtttgagatgcctgtaaagcatccaaacagagatttcaaataagctgttggcttaagagtctgcagttcagaagttaaagttattgtgtatgtatgtgtgtgtatatacatatttatgtatgacagagagtctcactgttgcccagtgtggagtacagtggagccatcatagcacactgtaacctcaaactcctgggctcaagcaatcctcccgcctccgcctcctgagtagctcaggcatgcgccaccctgcccaacatagagacaaggtctcactatgttgcccaggctggtctcaaactcctggcc

SEQ ID NO: 47520 - DNA, 1046 bp, Homo sapiens
tcaggaactgagtgctggataatgactatggttgttaaatgaaattgaggggtagagtagggatacatgtgggtccttgtttacaaccctgttgctcctggtgatggtgtttctgtgtcgcagggcaatgaaacgcttggaagaggcccgactccataaggagattcctgagacaacaaggacctcccagatgcaagagctgcacaagtctctccgggtaagatgctcccagcaattgtcccacatcttaaaggttcttcatgtttatttgatttttctactttggctcacctctgggaaggtagaggcaactagagtgattcctccctgcttaagttgagctgctgtgacatggaaggagccatcagttaatgtggcaggagcttactgtgctttgtattcagcagaggcctatggttctattctttatttctccccgttaatatgtcagagtttctctggggttttctgtttatatttagctgactcagaagttgtgatcctaagactgtagaaaacatctgggcacagtggctcagtcctgtaatcccagcattttgggaggcagaggcaggcggatgacttgagcctcaggagtttgagaccagcctggtcaacatggtgaaaccctgtctctactaaaaatacaaaaatttgccaggtgtgatagcatgtgcctataatcccaggtacttgggaggctgagacgggaggattgcttgaacccgggaggcggaggttgcagtgagccaagatcacgccactacactccaccctgggcaacacagcaagactctgtctcaaaaaaaaaaaaaaaaaaagactatagaaaacagcatgctggagtttcatataacttcatttatcaatgtatgtgtcttctaacagcagcaacaaaaccatagaagaatcttgggatgggttaaaactgaaaagctgctttgttgttctttttatggtggaaaagcaaaggagctcttagattaacctattaatgatcaccgtgtgtgtattttttttctttttaagtctttgaataatttttg

SEQ ID NO: 47521 - DNA, 1045 bp, Homo sapiens
taagctgggaagaaggtggaagttaggatcagccccaggtaaagacaccacacttccactgttcttacccaaagttcaatagtttttcaaacataaatgcttctggaattgttgtgtgccattagttgatttcaagaggagtgaaagggttgttttatcaattttgtccagctttatgggtattttttggggaaaatatttgctggtctccttactagaccgtagccagaagtttgaaatttcaggctataattttatacccaggttaactaactctggtcatgtgttcttactatgccgtgtggcctcccttatgttgctttagcatctgaaaatttacaaagttttttttcacaagtattacctagtacccgggacaattccataacatttttgtttctgtttttgttttttctagttttagagctgaagctattgaagtataagagatactggagataaatatttacaaagagaaaacttgagtttggagagaaggacattaatcaagaatgtaaaacgaatcaacgactgtgccagaataggaacctaggtcttccatttcccagctgagggtctttgtgcatcacccacttgctttcttttggaagaggactggggataaaaatattcctcatccctcctccaccccacctccatcatgaccttactggtatgaggaaaaagcccaagtcaaagggcaatagaccattggcactccctgcccctagagggtgctactctttctataacatggacacaggttgcctagaaaggtgatttaagtgtgaaagcatttttgattatggcaattgcatacattctttcaatcgaattctagctggattaacctgtctttagtatatggctatgaataatttatattattatctttcataatataattctgtttaaagtgtccattaacattgctttttctcagggactttccctcaactcctgagttttagttgtagtttgtagcagcctgttgaagcattcatgagtgaggatttaatcaggcaatttttgcaaaaatgatcag

SEQ ID NO: 47522 - DNA, 1079 bp, Homo sapiens
tccaccagttaatcattttgtggtgtttgccaaagtacttcatttccttgcaccgtattttccttacctgtaaaggtgagatgataatatattgatgatgatgattgaagatgatgatgcatagggttcttgtgaaagttgtgagagatgtaagaaaaaagttttgtaaagggcaaagttcttttcacttgcagcatgttatttgtgcatcatctagtccaaggatggtaaataagtagcatacatgctgccattccccatcctctagcctgtggcagacatcactaattgaccatggtagtcctttccattgagtatggccagcggcctcagagtccttagtattatataatgctacccatcagttgggcttagatgggacatgaagccagtttgtccttccttatcgacacacacacacacgcaccccatgggacatgaagccagtttttccttccttatcgagacacaaacacacagagagagagagagagagagagagagagagagagagagacagagaaactgaggccttgggaagaaggtggagtgacttacccaagacctcagtgaacaagcggaagtgggactaaaagcctcagatttcttcactcctcaaccagtgcttttcctgccctgtgtgtatacactgtatcaaaaggaattaaaattaatttggtcttgagaaatagcgagagaatcctgactcctcccttccctgttataattagatacccttggggttgtcatcaaagcagggctggatgacctgcttctctgcctgatcctggagtgatcaggtttcaaaggggagacgcctgtggctaggcagctggattggatggtgtctctcagcagtgtaagtgacgtggcagtggggcaaggcaggccctggggttcctggatgatgacctgggtttgggacaggtttgctgcttacacactttcaagtccacagacaagttctttagtccttccgtatcttaatttctgcatctgagaaatgggctggtaatgattcttcacaggaatgacataagataacaagtttgaaaatgctttgtaaactcttgacatac

SEQ ID NO: 47523 - DNA, 1025 bp, Homo sapiens
ggtcacaaaaagacacatgctgtgtgatcccactcataagagaaattgaagtcaaacgcagaaatggaaagtgaaatggtagttgccagcagctggtgcaaggacaatgggcagttgttaaataggtgagagtttcagttttgtaaaatgaaaaagttgtagagatctgttgcacgacagtgtgaacatggttgtcccttagtatccgtgggggattggttccatgccccgcccccccaatataaaaatccatggatgcccaagtccctgccatcaaatggtgtatttgcatagaactacgaacatcctcctctatatttcagattatctctagattatgtatagtacctaatacaatgtaaatgctgtgtgagttctgtatatttagggaatatgacaaggaaaaagtctgtacatgttctgtacggatgcagcagttcattttaatccaaggttggttgaatccatggatgtggaacccatgaagacagagggctgcctgtatacttaacactgctggattgtacatttcaaaatggttcagatggtcaaagaaaaaagttaaacacgtccataacctaacacatcaacagtttatcttgtaggaacatgcaagaaatatttatgtctttataccatgcaatatatgcataagtggtcacagtagaattgggtttataaataatatgaaataactggaaacaagcagaaaagcatttacagaaattatacatttcttctatttttttatataggttttgttgtacttaaatggtttatctatttggaatatatttggtttaaaggagggacatagggatcaggctctattttttcccaaatggtgagcccttgctataacgccaataattgaatgatccatcttttcctgcctgatttgaaatgctgtctttatcttacgttaaacttctatgtacttaggactgtttctggactgtctgttgtgttctcttgatgtacagatgtacaggtatcacactgtttatcactttaaagtaaacgtt

SEQ ID NO: 47524 - DNA, 1273 bp, Homo sapiens
gtttctaggtaggcaataatatcatatgcaaataatattcatttcccttcatcttttacaatattgtacttttttctcttatattatgcattgactagacctcctggaacaatttgaataataacagggataacaagtattcttgtattatcttatttcttttcttagtgagaaggattctagcgttttgtaatcaagtatgatattttattttggtttcagaaatgtatattttttatcactaagcatccttctgagttgctaagagttttttatttttaaaatttgtgaagatggaggtgagtgatacgatagaggagtgattttcaattttctgtatttgaatttttcttttgcaatggaggttgaatcattcccctcccccactataaagctatttagtaataagagggggtaaaaggatgatgaatttttaacaaatgcctttttattatgtacccagatggccatatggttttttccctttgatctgccgatgtgatgaattatattaatagattttctaatattaaactatcctggaaggaacccattttgtttatggtgtttttattcttttaatgcatcctgggtccaatttgcagcgttttgtgtctatatccattagtgagattgccctgcagttttatttttagtgtgctgtttttgtcattttttaagggggttatgctagtataggggttataaattagaaagctttccagtgatctgaaacatggaggataaatacatttaagattatgtacttattggtagtggtcgctgagattgctgtgttgagaaggattctgaggccttgtcatgtgtaaacaatttagtgttttgtaagagtgtaggaaatgagggtttaagtgtgcatgccagatgtttatttgtagtccctgcttggaatgatttatattgcacgggaattatcttttcagagtttaaaataacttgccattaaactctgtcttgtcaggtttttggagataattattttctactgtaatcctttcttcaataacattttggcttttgctcttttcatgcccgttttgaccatttatattttctgagaaatgtattcatttcatcaagaatttgaactgtatttgcatagaacagaatataatgttattttaagaatgtcctctgtatggttctatttcctaaactgattttttttgtagttgtattattttttttctttattccttggttgaatgactggtattcagggagtattttgttgatttctattgttttattc

SEQ ID NO: 47525 - DNA, 1083 bp, Homo sapiens
gccagagtccccattctagctgagtggaagctccagccaggggacagggttatcacggggtctcgtagctcataaacgccactgcttcgtggctgaactaaggcttacagcttcttaagtggcctggtggctgggtcccaaacctgcaagcaagttttgttctctctcctgctgcctccttggtccctaatcctctgagtcttttattccaaactcctgttctccggactatttctgttttgttttgtttttcctctgcgtgtctaactggtcttgaagctgggatactaagtgtgtcgcagtgggggggacatcgcgctgagcatctgtggccttgaggtgcctcttcatgcctttttgggcctgtttttgcatctgcataaaggggtccaatgcagtgcaatacagactctctttctgactttctgtgattctgagaagaaatggcagtgcttccattttctcagctaagtagggtaagaacaatcagaagctgcctacgtgagggtggagagtgcagacaccggagttcgccagcctggattcaagtcttgcctctgctccttcctccctgtgtggctctgagcagtttgctaaacctctctgtttcgtctttgtaaattgcagggtcaggggctggttcagagaaccccatgtggagttagttatgaagattaaatgaattaatacatgtaaacactcagcacatagtaagaactcagatgctacctgttttctttccctcccttttaaaagtcatgtgccacaagttaattttgctcagtttagggtgtgtggctatctttgcttgtgtagggtcctttctagctttgtttagtttttatccccattttctccaacttctctgctcctcccctacctccaagccgcttattctaatgtatttaacatgcatctttttgtttatgtgtttttagagacatgcactattgttttgtgtgcatgctttaaaaatttacataaataatacagtgtttgaatctcattctgtttctcacttttgtgcctctgctctgtttttgagatctgtccacattacttccagctgcttggtgcagccac

SEQ ID NO: 47526 - DNA, 1048 bp, Homo sapiens
ccccatttccagtgtgtaagtcctggtgacagtggagtatatcaccctaggtctttttcttatacatttacagatacaactgggagccattcatactgttttacagcttagcttttctcacttaatagggtgttcgcaaggtcattctatgttagccccaataaatctgcctctgttttttttttttaatcaacactcagtatttcattgtaagcatctatcatagtttatgtaactagtcttctggtgggtattttgatattcccagttttctggctgttataaccggagaaccagtgcttcctatgtaggtctgctgctgatgaattccttttggttttgtacgtctttattttgcttttgtttttgaaagatatttttgctagctatagaattcgaggttgacagggttttttgtttgtttctttctttctttcagtactttaaagatgttgcttcactgtttcctggcttgtttctgatggaaagttggctgttattctttgttcctctgtgtgtaatgtcttcaaaatttttttcttactacttttaggattttctccttatctctcattttaagcagtttgattaatgatgtgtctgtttcttctgcttgggatttattgagcttctgggttcacaccaaactagaaaactttcggccattatttcttcaaatatctttctcttctccccttcttcacccctccttttttttttttttccaaggattccaattgcatgtatattaagccttttgaatctgtcccatagctcattgatgccctattttttccatcttttatttttctgtttcattgttaataattattgctgtcttcaagttcatcaatcttttcttctttaatatctaacctcttctttttttttttctaacctattcttaatactacccagtgtatttttttaatcccaggcattgtatttttcatctctagaagtttggtttgggtctttttatatctcctgtgtccctataaggtgattatgttttttttcctctaccttcctggacatatggagtata

SEQ ID NO: 47527 - DNA, 1049 bp, Homo sapiens
catttatctttatggcagcagctatataaggagatagtattatctctttgtgctgacaaaggtgggccattctgagacatgcgcgtgtgtctgtgtgtgtgtgtgtgtgtgtgtctgtgtgactgtgtgtgtgtattgcagtgttggagagaagggcaggaacacccgaaagctttttttgcaacagctctgtgaaatattgatcaatttgattccattgtatgacccagggacaattttactagcagaaaatatgaccgtgttatatggctgcaataaaaaatcacagccatgagctcaggcccagaaaacgaaacaagctgatgatgtagcctggaccggtggattccgcatctttctgctagagttcatttgctgtttgtgccttcgtggtcctgatgataaggttacaggtctcagccaaaaacttaagaagagcctaaaactgatttcagtttgacccctcataagcttctcttgcagttaggaaatgcccactgttgttctgttgtagaggtaagtgtaccagtctaggttgggagctgtcccgtggaaagggaagggcactgaaggttttgaagcagagacatgattgatcaatgagtatcatggcacttaaccgtggagagttaagaatcatgcaggtggcagttaccctggtgtgagcgtgcctagaagatgagaactgatgagcttttggtccctctcagaatgagaacatgtcacccacctaactgtgattctcgtgttgcaaggtgtgtatccttcacccaacatggtcccttaacacatcttcgtctggtgctcaatcagaaaaacattgctctgtcccaattctggaggacaaactggttattgggcttctagaaaactgggaagacagtctccagcaatggtaccttcttaagagattgttcaagtgaaatttaaactttatttactggctcgaggactgaatctttcctaagatgctactctgccaagcctttgggcggctaatctggcatcttgttcagaaggaagaggggcatggagagggtggaatgggg

SEQ ID NO: 47528 - DNA, 1984 bp, Homo sapiens
ctgttcttctcaggggaaatgggactttctgaacttcatcattctgaagtgtcccacagatcaaatcctttttttgactactccttacataaaatatttttatgacaaagctttctacaaagcaaaagatgccttctataaagtgaatcatcacttcggatgcttcctttgtataaacctggcctttcttatgttgtagggagggtttttttttcctgttatttgtattatccaaagcaatacatgttcgctgttgaacagttaggaagttccaatgagcaaaaaggaataaaaaaatcaaaatcacccataactttcccatgcagagataatcactttggatgttgatttttgatgtatcgatactttgatgtatgtactgaaaacacatatgacatgtacataacttaaaagcttgttcattcaagaagtatttattgaactcctactctgtgtgtgatcctggggataaaccagggaacaaaaaataaacacaatttctccaggggacaatttatgcagataaaaggaagagaagaaattggaacagaaatgggactgaggaaaggcctgaaactgatagtgaaagtcgtcatgggctctgagagttttgatctcactgtggagtggttaggtatgaaatggagggctggacggggcagagggaagataagttggcagctgcccagagggccaataccttctatccaaagaaagtggttgtggttggtgtcctaagttatgtacactggcagacaggggcaggccggagagggttttgttttggtttgtttttttttttttttttttgcatgcggatgcccagttccagcaacatttgttgaaaagagtatccttactcctttgaattacctttgtgcctttgtcaaatatcagttgactatattagtttgggtatatttttgggctttctattctgcttattctgtctgttctgtttattgtgatctacttgtttattctttcaccaacactacactgtcttgtttactgtacctttatagtaagtctcgaagctgggtagtgtcaatcctccaactttattgttgttctttgggattgtattggctattctgggtcttttgcctttcagtatatacactttagaatcagtttgttgatatgcacagaacaacttctggacttgtgattgggattgtatcaaatctttagataaagttggaaagaaatgaaatcttaacaatacggagtcttccctccatgaacatggaatatctctttatttatttagatcttctttgatttttttcatcagagttttgtagttttccgtggatatcctgtacatgttttgttaagtatttatacctacgtttttatttttttggcactaataaaaatggcattgtgtttttaatttcagatcccagttcttcattgctgggatatgtgaaagcaattgactctagtatcctgcaagcttcctataatcacttattagttccagtttttaaaatggattatttgggattttctatatggacaatcatattatctgtgaataaagaaattttttttgttttgttttgtttttacaatctgtataccttttatttccttttcttgtcttactgcattagctacgacttccactatgacattgaataggaattatgagagaggacatctttgccttgttcccgatcttagggggaagacatttagtttctctccgttaaatatgatgttagctgtaggttttttgtagatgttcttgatcaagttgaggaagttaccctcttttcctagcttgctaagagtttttattatgaatgagtgtcaaatcttgttaaatgcacatctatgatatgatcctgtgactattcttttttagcctgttgatgtgatgggttacactattgattttcaagtggtaaaccagtcttgaactctaagaataaatcccatttggtcagggcatacactttttaaaacattttta

SEQ ID NO: 47529 - DNA, 1044 bp, Homo sapiens
tggagggtgtgctgggcttgatggacttagacttcaggctgctgctgtttggaaggaagttagagggtccatgctgtagagatggcaaggagtggtgagggggatactcaccctctggggtgccccaggcccagcctcaggtctgccacccactggttgatcttgggcaggtgactcttcctcatctgcagagtgtagatgacaattacacgaacctcctctgtggattgtgaggagtaaatggacaaaacacatggaacgcgctgaagcccgtgttcggtttatggaaagcaccacagactggtcgctcttttcaccaaagcacatctgtccttacatggggaagattcatttctagagagagatttgcaaatgtgttccccaaaatgggattgttggagtgagaatatagcctcccaagggcactttgagagaaatgtacccggttggttatgagcattctggcctgttggttaagcattggtctttaggcacatcgtgaagaaacagctaatgatacaaactggattaaattaattccggaactctgtgtgactcgaggcagacgtgtggagtcagggaaggccttgggcgtgaggatgtgcctggccgtggcccgagcatggagaggctggggaccgccagagtatcctatttgtacagcctttatgctttctaagctcatttgctacagcaactccatgaaggagccgtgcaggatgaggaggggcgtggggctcagcatggttaggtcatgcccagggtccctcacaagcctggctgtccccaggtgcaagcccaaggggcataagacccagggcctgatttaatgcagggccacaaggctggtcaggggtgagagggacctcagtggcctggctgaagcccctgggctggcatggggctgccgacgagggtcccctaacctggcaggaagctgctttatggcccaggccctaggaaggagaggctcaccatgccatttagagtggccccctcctgatgacctctctgggtagtgcccctgtgggagcagatggacat

SEQ ID NO: 47530 - DNA, 1030 bp, Homo sapiens
caaatatttgacctccaagggcatttacattttcctcattctccttccatagtttgtttttagtaaatatgacatggaattttatttccaacttaaaacttctttttctgcattgtttttgggggttatgtaagagcttccttgagattcacagctcttatttccagttactgtttagacttaatctgttttgttgggttactttctctttctttaaaaattctgtctgatgtcttctttcttggatttattttccttaatgtttttcagaaaatgtgcccaggtgacctgaatgtctctgcatatctgaagaggccattatttttttctcacatttgagtgatgagttggtttgcatttgaattctagatccagagtcccctttctcaggatcttgtagctgctgcagtcttgtcttctgcctcttgatcttgcagatgagaagtctaatactagactgagtcttacttctctaggggatttttttcgtctatgaaagcatttaggatttcctctttgtttttggagttgggaaacttttatcaggatgtgtctagatgtcttgttttattcttctttagtacttgcaccttttgtaatgaaaatttcagccttttgtactgttcttttctctgccatgcagagctgagtgaatattgggtcttcaggatagagagaccatgagacgctggcagccagattgcctaggatgccaggtgcagctggacagctggtcaaccctctccagactcactttcctcctctggaaaaggcaggtgaacagctcctaccacatagtgctgttgggagacgaaataggacacaacggacaaaacatttaggacaatgtctggtatggaggaagtggtcaatacgggaactgttttttctgtaattcctcgtgggtatcagagacggaggaagaagtgggcttttgagcaggactttgaaggtggacaaggtaagaccttctctgagcctcaatctccccactgaaaatgatggagcttgataggtttttaggtaatag

SEQ ID NO: 47531 - DNA, 1023 bp, Homo sapiens
tcactgccaataatagtgcgaagcctccaaatctgagggcctttctaggatcgtttcctgattaattaggtcagcatctccaaaatcaatttccagcgaagtcgcgccacctggtagcgccgttccctgcccagccaggcgagggagttggcacgggaggcaattccctggcctctggtgcagttcaggtcttgtctctacctcatctcttctgtgattatcctgactttttattttatctgcccccctcaaatcttccattaaacccccgtagatcctgcttcaaacaggcaattagactaacaacgtaattatatccctcaattctaattgtaactggtttagaggaaaaacaaagagaaagaggcttcaaaatctctggaaactaaaagcagcggttatggtttccaggtatttttcttccctgtgtgtttctttgagagccctggttgctggcaggctggcatctctgtagcttgcccaatgccataaggaccaccgtatctgttcccctcttctgagcatgtgctagttgacacccccacctctgtccttctctgggttcctggctctgctggctgtgtctctcattgtctctccctgtctcaaccactttcaccctattagatgtggtcagcttgccggtgttggaagaagtagcatttcttctggctcttgctagcactccatcatcgccagtaaccatgggttgatgatccatgtgagtctgtcttggggagattggaagccaggcaagctggacctggtcttggggtttgagcccagccaggcttatgtgacgaggctgccacagggagacgtcttgcgccacctgcctatactcagcattttccgagtctgttttttgagcaaggcctgcactctgtgaataagccttggtctctgcctccaggctgccctcggcctggggaaagaggcattcaaatcattgaatggtgggaccgctgggaagagtagacatcagaggggctccaacccggcctcaggtggcagggtgagatg

SEQ ID NO: 47532 - DNA, 1039 bp, Homo sapiens
agtagccatggtgatacctaaatttgcccataaatggccatagtttgtcaacccctagtctaaactgacccctacctgagagcttctgcaactgctgttccctgtgtctggaatgttctttctctgatcttcccatgatgaatgccctttcatctttcagatctggagtcagttctaccctcagggaagctttccctgaccctccgtatcaaggtacctgcaccccagtatgtggtgtgtggccttcatagcctgtttatgctctttaattatttcattttcattattcgttatttcattcccttccctgtgttcctttttttctgtctctctgagaatgccagctccattggcagagaacatgtctgtcttgttcactgctgtgggcctggcccctagcaggctctcagtacgtgtttatgggatgggcacactagatgagatggaagaagatgtgccagtgatgtggagacagggagtgtgggagaggagcaggtagagctcagagacggtgcacttaggcctgtggtcattgggggtgacccaagtagccagcagctgcccagcgttttgtgtttctctcctgggtccctaggagtggaatttgtgtaagaacaatgtgtgaggttgtggcctgcggggcagtagcagttgtcagaccggtgcctggaagtgtttcttggatcaggaaatcaggactgaaaggggcattaagtttgtctagaccaccctgtcattgtgcaatggggagatcgaggcctttgggaggaaaggccctgcttaggggcgtataatgagtcagtggctgtgttgggccttgaacctgccaaagctggtgctttctccactcctcagtgctatgcccaagtgagggtctagccagcctctcccactttcctcccactttcactaagcacctgctctggtaggcccagtgctgtatgctgtgaactcaggctggttaggtgctaatttattcacccagccagacattctagtgtctcctgcatggcaggcactgttcgaagtacttcgtgaa

SEQ ID NO: 47533 - DNA, 1072 bp, Homo sapiens
tccctggccccatcacaaaggggaacctgaagcccagagtcgggctgagcgaggcgcaggtgggggccctgggctttaggctgtgcgaggggcaggcggggccctgggttttaggctgatcgaggggcaggcggggccctgggttttaggctgagctaggggcaggcggggccctgggttttaggctgagcgaggggcaggtggggccctgggctttaggctgagcgaggcgcaggcggggccctgggttttacgctgcatgaggggcaggctcagggtccctcctaccagcacacagtgctcagtccagagactccgtgtgccagacaggctgcctcactctgcactgggggtcaggagccagccgaggagaggctgaggagccatcatgccccccatgactccttctgtggggtgacacctgcaggcaaggctgcatgtgcccacagctctcccacagcttggggtgaactccatactgcctgccaatcaggccttgacttggctgtaaacagtatctactccactgacttgggccccccactgcagttgggccagggtcctgcctctgtgcccccaggccctgcacttgctgccctaacgccatcatcgtgcgttgtccctgtgccagctggcctgtctgcttcctattagatggaggacagggagcacaccttgctcattgctggggcctcagtgcccggcacattgcaggcactcgtaaattcttcactggttgaaggggaattggcagaaactgctgaagagtgggtggaggcagcaggaagagagttggaggcattattactcagtgacagatgagtacaacagcaagacaccatggatttatggagccctcgctgtgtgccaatcacagggctaaatacaaagaaatatgcaatctcatctttgtcctccacgtgattgtatttttccctgtgtgacaagggtaatacacatacaaaccactaaataacagactcctaaatcccacgctggtgttaggatgacagcggcccttggagtgacccacagtagtaccagtggcaccggctcctgttcctcagtacct

SEQ ID NO: 47534 - DNA, 1031 bp, Homo sapiens
ttataactataggaaatgaagaacctctcattcccattttacagatgaggaaaccgaggtgcagaggttaggcagcatgtctgaggtctgccgcacttatacctggtagagttgggtttgattaggcagcatgaatccagagcctgcctccctgaacggattcacagtggcatctaagagacaccgagctctcgtgtctgaaaatgcagcggttctgaaaacgtgctttcactgacaaaaaaatgattctgctctcctttttggggataaccctcttggcctaatcatttcctgactgacgaagacctgggagcgggctccccatccatgtcaaagagatgtcacggtgtcagagcagggtgggggtattctcagcagcagaaacctgggggctcacgttttattggaggtaacagatgtggccctgaagtgaggggtcaggcccagctggccagggaggctgggtagagacaagcaagtgggcaggtggcggcagatggcgggtagcagtggtcagcttaggagaggaatgtcaaggcagagcccagtctggaaccagaccccaggtggccttgacttctctgtctctgttcctgggcaggtgtcctgcacagaaggcagggttgcaaaagagacactggggaccatggtctggacgggacctgatggggaagttgtctaagttgattgctggctacatgaaaggattaaagcctgggccaggcacagaatcctagaaccaccatcctgggagaggccccaggaatcagctcatctacatccctttcccagctccccaaattatgggggaaaacaaggaagcaggaccagcctctcctgccccacaccttgccacctctttcttggatgattctggtatccagcatcctcagaatgtctccaaggaacctgtggctccttgctcagggaccagtttgtgtctggggctctggcacctgctaaggcattttcagagaatacgaagaggtgaagctggtggtgggagggagaggtggctaatgccatttgtg

SEQ ID NO: 47535 - DNA, 1083 bp, Homo sapiens
ccacatgccctgactcagccttagcttggagttagtgaatgtttgaatcctagctctcccttcccctccccacaccgggcagccttgagcatatcaccaagcctccctgtgcctggggtgatgggattgataggccctccctacatcagcccaaggaacacacacatgaggttcgtgccagtgcaaacgttagagtgtgccattgtggagggggtaatgtcctgtgtccagcctcagcctcagatgttgggtagacccaggggatcatccaaactccaacctcatgttagttacctattgctgtgtaacagatgtccctaaaacttaatgactggaagcaacaagcattgattatccctcagtttctagggtcaagaatttggatatggctttgctgggtcctttggcgctgggtctttccctggctgcaggcatggacttggccagggctgtggtctcatctcaaggctcaactggggaaagaactgcttttaaactcactcatgtggttgctagcaggtttaacaaccctgctagggttctgtccttcccacactcttagactgaaggcctcactggctgttcaccagaggccaccctcagctcctggtcacctgtgtctctcatggggcagctcacaacccagcagccagcaggtgtgacctggacagagaaggtatgcttgagacagaagtcccagtcttttgtaagctaccctcagaagtgatattctgtcacttttactgcattctgttcattagaagtcagttaccaggtctagtccagactcacagggaaggggtgatgtagggcatgagcatcaagaggcaaggagccctgggtgctgtccccaaggctgctcatcaccggccctcccggctgtgcccttggggcaaatcccttctgatcctcagtttcctcatgtgtaaaatgagagactgcttcctccctccgctagccagactgggctagtttcatctttggtttctgagatgatctggccagaaaaaccccaccccacaagactgaagccctggtaaccaggtgtgtgttttcatcccatgcagacaatttcaggtacac

SEQ ID NO: 47536 - DNA, 1027 bp, Homo sapiens
tgtatgtggattccataagattttctatatacacaatcatgtcatctgcagttagagatcattttacttcttccattccaatctggatgtttttctttttttacctaatcgtctagctagaacttctaatacagtcatgcaccacatgatgtacatgatggactgcatatatgacagtggtcccataaaactataatatcctatctttactataccttttttatgttcagatacacaaatatttaccattgtggtacagttgcctgaagtattcagtacagtaacgcactgtacaggtttgtagcctagaagcagtaggctataccgtatagcctaggtgtataataggatataccatctaggtttgtgtaagtacactttatgatgtttgcacaatgacaaaatctcctaacaacacatttctcagaatatatgtccaacatgactctacatgttgaatagaagaaatgagagtgagagtgaacattcttaccttgttcctgatcttagggagaaagctttcagtgtttcatcattaagcatgatgttcgctgtgggggttctggtagatgctctttattaggttggaaaacttcccttcgattcctagtttattgagtgtttttatcatgaaaaaggtgttagattttgtcaaatgctttttccgcatctattgagatgaccatgtgatttttgtcttttactctattagcgtggtgtattacatttatttgtgtatgtttaatcaactatattcctggagtaaatcccacttggtcatggtatggaatcctttatctatgttgctggattattacatcacaggatcacaattaggcagccaggttcatagcagaacagtaatattgaaaacagcagagccagaaacctaggacttgggagtgtggttaagcaagctgtgatatatcgtatatgatagaagtgcatgtggccatgggtagtgacaagaatgtgactcagaccatttcctatttagaaatgatcccataaacatgtcaaggagtaa

SEQ ID NO: 47537 - DNA, 1437 bp, Homo sapiens
agcaggcagtcatcgagctgagcaacgagagccagcccaccctgcagctggtgctgcccacctacgtcaggctggagaagctgttcacggccaaggccaacgacgcaggcactgtcagcaagctctgccacctcttcctggaggcgctcaaggagaacttcaaggtgcacccggcccacaaggtggccatgatcctggacccgcagcagaagctgcggcctgtgccaccctaccagcacgaggagatcatcggcaaggtctgtgagctcatcaacgaggtgaaggagtcctgggccgaggaggccgacttcgagcccgctgccaagaagccccgctctgctgccgtcgagaaccccgcagctcaggaagatgatcggctaggcaaaaatgaagtgtacgattacctgcaggagcccctcttccaggctacccctgatctcttccagtactggtcgtgcgttacccaaaagcacacaaaactcgccaagctcgccttctggctcctggcggttccggccgtgggcgccagaagcgggtgtgtaaatatgtgtgaacaagcgcttctaatcaaacggaggcggctgctcagtccagaagatatgaataaactcatgtttctgaaatccaacatgctttaagacttgacttcgggggaaaaaaaaagaaaaagagaagataacattagaaaaaaaccacacaacactgtcacaaagaaaaggaatttaagttctaaacactgtggacctcattataaatgccccctggaaacttaagtgctttttttatatgtgtgtgtgtgcgtgtatgtacacagccacacgtgtgtgcacgtgtctgaacacgtgctgtggttgtgggggtgtgggggggtctctgtgctcatctccatggccagagaaactttgcacacacgcacacacacacacacacacacacacacacacacgaccctggtgcgtgtacatacgcctgtgcttggacgggtgtgcattgaactgggcgtgtcaggaaagctgagcgattgggaaagagggagatgtttcacctccttttctcagtaagggggctttagaagactccgctttcaggtgtgcagattggcagaaagctgatgttgtgaaatgttcaggcagctgagatctgaagtgacttgacgctctctgtccttcaccccggtcctccttttccctctttgaccctcttccagccctcctaccctcctgatcccattgtgcacccccccacacactcggctgctctgctgtggactctccacactgcatcagatggacggtttctgcactggactttgtttcttgttcaccttcagggcattgagctgctgcctttgagataccccttgggtgtcccggggcagccgccttagaaacacacctatctatctccccaaatcaggaaaggagacttaaagagtat

SEQ ID NO: 47538 - DNA, 1055 bp, Homo sapiens
gcagggagtaaagttgattgcaaacctcatgaaggcttaggatcatggacctggaacatagtgtttgggggccaagcctgcacactttgcctcatgagaactcacccagctctccccttgaaacttggacacactgaaatggatcaaagtgggccatttccacatttgctccagcaaactgtggtctcaggaactaccatgccatttcctctcctggagaagttctaggtattacctccacaacatttccaactgggggactgagcccacttatcagagaagagccgccatccacactggagcaggaacagggagaaatccagacaggaacctcatgtcacttcctagggaatatgggaagaaacatcagcagactttatgatgtcagttgggcctttggaggcattctggaaggtggcctcagcatcactgatgattgacagatgctacagcaaaaggtccctctagcgttgcttgactgctggggaagggacagtgaccggcactttgacccacacaaggataggagctgcctactttgtgtggtaggtgagagcagagcctgggagcccatcctccctctacttggagcaaagttgtgctggtgatgccccattattgggccagttgattagaaaataggcatttcactttcttggaaagccatcggactaagcccagatgtgcatttagagcactcagcattcttctctttgaagcatgggatgtctgtcctccaggaagagatttgatcttaggttgttacctccctttcacttcttttccacctcaattcaatacttaggggttggcttgcctctgcaggtttgatgtgaatgccactgggtactcagaaagctgtcctctggggctgccttgtccagttagataacaagatagcagatgattgtttcttgcaacctctggttccctccggaaactggtgtcaccaacaggaaaggctgtaccaaggtgccctcttctcagacaggctgttctcagagtgcaaatcctgctgcaactaacagcttaataaaacccaaagatctcacagg

SEQ ID NO: 47539 - DNA, 1777 bp, Homo sapiens
tcacactgtcctttggaactcttggtggctctttggcctgcgtctcactgcccctgaggtctcgggtttgctgtgtgtcctcaggttcttccctccccctctctggcacccatatttggctttatccatttggagtggacttagggctctcaagggtgctatatggacagatatggcatggaacagcaatgacctcttgtaggtctcagttgtccattggggatatcaccctttgcagcctggggtggggaaggggctccagaagatcacatcccttcggctggtgagcttcagtgtttggccaggaaaactgccttggggaatatatgacccttgcatccctcttcctgtttctgcagggctctcctggagtaggggtgcggacataggtacctggaggggccatgcggggaggagttgagttcctcctgctggagagaggctgggggacagcttggcaggctgcggtggctgactgagctagcccaagcccgagagggaaaatagctcctatgtgatgtgcctggcaccttcttttatgctgccttatttgacctctcatgcccaccccaagttcccatgggacagtgagatcattctcattttagagatgaggaaactgagtaggaaatggcaaaaccaggactggaacccaggctcttacccatatactggaacccttggagatccccttagagggaaacctacctgcttcccttagagggctgagaccaacagcacccggcatctgtgcccaggctgaatcagcctttcccacgctgggtgcctggtgaggccctggcagaggtagctgcctggggcatatttttagctctgagcccagcgagtggttctggttatgcaattacccaagccctagttccctccagacctggccctgtgctccctgggcccagggctctggaatctgccatctgaagcggcatttcctcctggcttcagagccttcatgaagcacgtgccctctggggaccacatagatatcacagacgctgctagcccatgggaccttgcagcctgggaccaggatgaggccgttgacctaggcagcctactcccttccccaacctcctgagcccccaagcctctgcggttttgctctggctgtcctcctttgtaaacttgtcctccattcatgtctaagagcaaatgccacctttatttctgatgaccactcccttcttggaactcccgcagtggttcccctgtcccctctggatggcatgggccactttctcaaagctctcattgaccactaaactctgtttgctgagccacatgtgcaggatctcattccaccttcccagccattctgagaaacaggtttcaatctattcccattttacagatgaggaaactgaggctcagaaaggtttagttacttcagataaagtcaaagagagtaaatggcagagccaggattgaacccaggcagtctgcctccagagcctaccatcttttttttttttttttttttttttttgccagagtctcgctgtgtctcccaggctggagtgcaatggagcaatctgggctcactgcagcctccacctcccaggttcaagggattctcctgcctcagcctcccaagtagctgggattacaagcacacgcccccgggcccagctattttttcgtatttttagtagacatggggtttcaccatgttagccaggctggtctcaaactgctgacctcaagtgatccacctgcctcggcctcccaaagtgctgggattatgagtgtgagccactgc

SEQ ID NO: 47540 - DNA, 1030 bp, Homo sapiens
gttgctagggcttggcttggggagaagataaaccagtgggtggagggaaggtgccaggcattgctgtcagaggcgagatggcccctgttttttgtcacctttttttgtttttgttccttgtctctttcagggtcctcctgggccttatggaaatccaggtctccccggccctcctggagccaaagtgagtatttgctggagatgtggccatggagtgggtgctggggttggagccatgtttgcagtgcttcccaggggtgcctggtgggagggcttcaggggaactgagggggattcccgcctaagccaggggcaccctctgggcccctttccagggctgggccctgtgcctggtccggagacacagtgcttccgtctgggagagacttgggagagtcgggcagttggaacccagagccttcaggggagtgggcagagaggtgatttcttgctaaatagggaaggctggccttgaatgtcagactaagaacataaggcttaccgggttgtaagatgcatcctggggagggatgtggaaagatgacgttttagaaagctcactggatgccctgaggaggatgaatgcggggtggggaaccagagccaaggccgggagaccaggggtgatatgggggagaaaggaggctagtccgggccaacttaggggtgtgggaggaggtagggtggaaaggatggtggtgggtgcaaggtgagagacagttacaaacaccagacagtttttacctccctgatgttagccttggggactgaactgggtcccaggaggaggagtaagatgatgttgcacgcaggaacatgtagcccggtcaagtgatcattcatggacagatattctggaactcaggattgctctgagctggagacagagccagggggaggctggcgcagagatgccacctcccccagggagtcttcttggaatactcgaattcacttttaatgagaccttagtggctgatgctttgatgatatgggaacaccacttgctgagctcttcagtctgttcccg

SEQ ID NO: 47541 - DNA, 1025 bp, Homo sapiens
tcctatttggttgaatttttacaatgtctcttagtaaactttaatggtttttattacataagccctgcacatttcttattaggtttatacttagaaattttatatatttttttgctgtcctgaatggaatattctccccattatattttctagatagctctcatctagtgaaaataactattgatttttgtatttttttactttttgtatttaatttataaccatccccttactgaatcaccttattaattctattagtatttctgttgggtctcctggattttatagataggcattcacattatttgcagaaaagaacatattgttgtctcattttcctcaaaggttagtagttcttatttatttttcctgccttattgcattgtccagaacttctagacccatgaaaatagtcgtactgatagtgagaggcctagtgaaaattcagagacagttctggggcaggagccagatttgacccattcctatccctaccattgtctcttgagactctgttcactcatttgctcatttgtgaaacattttatgttgacttctctgggccaggccctgtgccagatactgagaccaaggatgacatatataggaggcttccagctcagaatttctcaatatttattcatttatttgtttgtttgagacagggtcttggtctgtcatccaggctggagtgcagtggtgctatcatagctcactgcagccttgacctcctggactccagcagtcctcccacccagcctcccaagtagctgggactacaggtgtgcaccaccacacccagctaaattttttgcttttgtggagacgggctcactttgttgcccaggctggtccagaactcctgggctcaagtgatcctccttccttggcctcttaaagtgttgggattacaggcatgagccaccatgcctggccagaatttccaaatcttttgtgatttattcctcccttgtctcaccccatctctgggcctcagccacccaagccttctgttctatttccca

SEQ ID NO: 47542 - DNA, 1066 bp, Homo sapiens
ggcctatacacgaggaggtgggaggcgatctgacctgactccatccaggtggtgtaggcctcgaggagtggttctagccaaagccagggcccctgctgcgctttcagtggaatgagtgttaaccttgggcccagccgcaggggccagtgagaggtcagagcctgggaaatgacactccaagtgtccccataatctgatgccccctccgccctgtccattgggtcattcctcatggggtttgagtttgggggcccgtggagggacacaagtaaactatctgctagcttgacaaatgagcttccagctttaccactccagcaactgtactgagaaattctgctcagagggaggctggaggaggtccctgagggaggcagggaaccccatcgctcagggaaggccagtcctgggaagaaggcccagatgtccccgtggccatctgtgcctgctcaggtgagtgggagcagaacctgggtggggtgggcaggaggtgagagctctctgtgtctgaatcctgactttgctacctcctgactgaacttcaccttggcctcacttccctgagcctcagggatcccctctgtgaaatgggatcattgtatccactcttattagaaccacagaaacacacagtccattccagtccagtggctaagagaacagtttctggaaccagaccacctaggttcaaatcctagctctaccactcatgtaatcacaatcctgagcaaaatttttaaccaccctatgcctcggtttcttcatctgtaaaatgggaacaatagtggtacctaacttggaggattgttgtgagtgaggatgtagataaattaatatgtgaagtgcctagtatgtagtaagcactcaagaagtactagttatgataataatagctattgttggtgttattatattacacacacgtgatattttacacctggtagcagctatccgggttactgaattgacaaaaatttcacagtcacattggaacttggtgggagagagtgctgcaattgataagtgatgtctgccttggctggggttgaggaagtgtcaacacatg

SEQ ID NO: 47543 - DNA, 1014 bp, Homo sapiens
ctggacccgaggtatgtgatgccccatttctccgtgtctggctgctgctgggactcggtcttgtccttgggaaactgaggcccagggatggggaaagacttgctttaggtcacacaggatatgagagatgaggctgagaggagaaactcctagatcagcaatcatttattttccccttctgctcttctgctcttactcaggggctctcaaaagtcaacagggccaaaaggtggcctcagagtcctctgccaactttgtggccaccgcagctttgtgattcatgaaagccctctgtgcgccactgtctggtccctcacaggagcttcccacattctccactcagagttccctctccaagccctggaactttcctagccacccacagccactctggaacggttcagggctcagagcttccgggtatggggagcaagaggtaaatgcaaaattcgggcttttgaatgaagaatgagaaataaggatagatttagcaattaatataataactctagttgagtcaggagagagcctcagggtttctgatgtgtgtgatcattggcataggtaggctacacctgaatgatcaactcggaattcacatgtaatgttgcgaagcaagctggctgggttctttttgacgcccccgtctttaacaggggtctcgtgtctagagagctgggctgagcaggagccagggctgccgtccctctcaggatcattggcacccaggccaacctcagttggagccccccacccacaactccctagcctccaggtcttgctcacccatgaggtctctgcatccaagacaaaagtgtggctctgtggataggccggaccctgccaaagatcacttctgctatcactcggatggatgaggaaatgtttcctaaaagctacaagttctgactttccactctgttgactttggccatgacacagtcctatctttagacaaatggacttggcctctcctccatggccccaattccctcctctggtcgctggaaaaag

SEQ ID NO: 47544 - DNA, 1054 bp, Homo sapiens
caggcgtgagccaccgcacctggcccagaatgtgcatttcaaccgggcagaccaaggtttcggttctagccctacctctggctcactgtgtgacctcaggcaggtcacttcacctctctgggcctcattttccacctccacaaaatgcaatgggcttctgaaggacctagatgagacatacacatccaggtgctgagtaagccaaggccccctcagagggaatgggtgactagagtcatgtctgcctgaggttctgtccaagtacccctttgactctgcccatttgttgggggtctccaaggccacacactggagataagatccctggttcatccccactaatggcagctaaggccagcaggcctgggacttccccaggaggtctagactttcatctcccatcccaatccatcctcctctttgtctctttgcagggggaaccaggggatcctggtcggccggggcctgtgggagagcaggttagttagcaacggtctctgaatgagtggctccatttattgggcccttactctgtgccaagccctttgcccagcaccctccatgcaccacctcgtgtaattctcagaacaactccagaggtaggttcagtcctctacccctttcacgaatgtggacggtgaccctcagaacggggaagtctgtaaatgagaaagctgtggatcatagtcacgacagcttttccccacagcctgactctacacacaggtttttggtgcatttgcccaaagaggttatgtgactgctcccccaggacattaaaactggaggagcccttggcagtcgttgctcgtgttcccatcagcttatagatcaggaagccaaaggccagagaagtgttaccacttgccaaggtcccttggtctaggcatccctaaattatatagaagatgaaatccaaaccagtggctctggctggttgagaagctgggtcaaggtctgaagaagagaagaggttgcaactagtcattaaaatgaaggtttgaggatcacgaccttcaattaaagtccagagaaacagctctgagggatgggc

SEQ ID NO: 47545 - DNA, 1038 bp, Homo sapiens
gaaaaaaaaaaaaaaggcaatttgatcagcaaattcagtttcatagttatgctaatggtagggccctcgggaaatagatatgcagggtcttggaagtcagagcacaaagatccttggaaatcactgtatctaagagccctaaccatattttgtgccttggatttctttgccaggctggaaaggcccagggatccccttctcagaatagagtttataaatgcataaaattaaaaacaaaggaaactgattatatagaaatgcaattatgaaaatatgttaaaatataatatattcatatatatgcttctttggcaatgcattaaataatgagttctagtagcaggtgtaacagcggcctcaattttgaagtaatgccaagccttagtgatgtattttgagatctctgcagcaatgattgtaatgtgccatgtcactttctgggacagtcccaggtcctggtagtactactgtggtttgttgcctacactcatattcgaggcaaatgctaaatttcaattagaggttcatgaaaatgaaagagttttaatttttttccattcaagttgatataccctctgagttccattcatagagactgacagagaccccgggtttagaaccctcagattctagtccatgttggcaatctgggatttatggaggagaagcacgtttgaccaagatcaccaagtgggatagtggtagaactaggcccaggaggggtgggaaccttgcctggagcagcccagtctcatttggtcagcagaacacccggcttgctgcccaggcagcttggacagtagcgggaaggaggcagagctggaaccctgtggctgctataaggcacatggaggtaccatgccagccgttcccttggcccccaccccatgtggtcacagtgaaaggggaggcattttctgttcactgcaggatcagaggatccctgggaaagttctgaagctcacaccacaggacctccttgtaatcatagtactgggtcggtgcaaaagtaatcacagtttttagcattataatggc

SEQ ID NO: 47546 - DNA, 1031 bp, Homo sapiens
ccaggatgttctgggacagtaccccgggggggtcccaggggtgcgggtcgggggatggggcacttgctgtatggctcttattcattaggatcttgtttggtttcttgttagaggtttatgacccgcttgccttccaggacccaacatctcataaatttaaagtagctatgaaatttctgtttctctgggccagtcaggcaggggccttttaacagagcagtttttattcccttcattcggcatcctctaaatgtctgactgctcccttgtgggaagcccaggcctctgtcttacccctgtgcccttgtaaaataaattaagaggggatgggaaagagcgaacatgtatgaagtacctctacgcatcgtgcaccatctcccgtattcggaacagtgccaggaagtagggaggtacctttattgtctcccattctgcagatgaggctcagagagactgatttgcccagaacccacacacctgaagactgaatgacagttacatagataaagtgccaggtacagggcttggcacacaggaagtgctcaatacgttgaagccgttgttataatattgctatcacttagaaaatgctctaattaatttttaaaaataagttgttgcaaaaatcaagtatttggttattttctgtgaaatgttagctgtgaccttatacctagtgcctcatccctcttaccttatacttcagaaagttctctgaacccagggaaccaggggcaggtgcaggatccaccatgcgtagtgccagcgtggtgctgggatgtacgggagatccgggccctgttcacagccacatgctttggaggccttgggctggaggggaaggtgcgtggtctttggagccacacaaccagagcggacatcccaggctgcagcagcaagacacgtgtggccctcgctgaagtgaccactttaaaactgtctttagataagaaagtgtggatcccagaggtaaccctctcatggtagttaactgacagctgggccggccttattgactgagtacacaaact

SEQ ID NO: 47547 - DNA, 1043 bp, Homo sapiens
acagtaaagaggcctccgcctccccgattccaatcagttctcttggcggaggctgttacggtatttctgtcccagccagcgggtttgtttcactctttgaaacagccccagagccccgaaagatgggcacagatggcctcttcccagctcagcttaagccaccccccgcccaaccccagctctccaaacgtggcagcctcccagcctgcttctggcgcgggaagaatgtgtggcgctcccagggatgttggcagcggccccgctgcttggcttcaaaatcagaaccatctggtggagtgagggaagtcagaacggtgcccagagagaggcagcgctctccccggcacaaccccatgctggctgggtgaccaggcacgggtgggagacacctgggagatgagcttcaggggaaggagcgggagggctgggtccccggattcacgttgtttctcttgctttcgggaatgtgtctcatagggatttatgggattcattggtctggtcggggagccaggaatcgtgggagaaaaggtaagtggtgttgaggggaaaagataaacaattagagcttgtgttttgaaattgtaaaaaggtgaagaggccctttgacctggggatttcagaataccctcccctagcctctctcctgacctggcattctgagtctgccaagagacattgttccctttcctggcatcccttggggttctatccctgccctactgtcatcagcctcaagcacagttagacttttgtgtgacaaccagcagatgcatgtgacctgggctcctcacagctgcctactggccctgcacaggggtcggcgagagcagggaggaaaagactcatctttacaaagaggaaagatgaggttgccttgctaagcctctgttttagatgagataacagaggctcaaataggggaggtgacttactccaggtcacccagataataagtggcagtgctgagatttgaaccaggttcattgccaaaggttagctacactttgctcactaagacactctgcctcatgttggctccc

SEQ ID NO: 47548 - DNA, 1034 bp, Homo sapiens
gggttcaagagattctcgtgcctcagcctccctagtagctgggatcacaagcgtgtgccaccacacccagctaatttttgtatttttagtagagatggggttttggcagttccaggagctggggatgtggcagcaagaaaggtagaaagtggtcccttcctttggagcatgtagtctggtatgggggggcagggtagatagaacccagtaagtgatgtctgttctggaagagcaggcacaaagatgggaaatgctggacaaacagggctgagggtcctcaggggcctgggcttctcatgatgactgaggaagcagggttggtgggaggctctcaaggcagagtggtgggagaggctgggagagctgggggaagggtgcggccaggagcactcaagttcaagagccccttctccttcccaggggtgatgatgtgcagggggtgggggtgggcttgctctcatttggagcaggtagaacttgcttcagatccctgtttctgccaatggaggatggaaactaggaaagggcactcgcttcagccaaagccaggggtcagggctgggagcccagtccgaggtgggcttggggaagttggggagggtgtgggggtagagggaccagcccaggcacagatccggaggtagggctgaggggcgatgagctcaggttgcctgggtgtctccaaagtccagactgaggagttccctggggtctgatgaggaagggccctgaagcctttcatggtttgaacccaggggaagctcgcataaacctgttctctactgtgattagggaagcaaggccaactcagctcctacactttttcatgcacctgctgtgtgctagcataagctcctccctggaggtacaaaaatggtaagaaagagttccagctcttaagactctcactgtctggtggggctgtcaagtataaacattctctccatcattaacagacttttatcgagcacctactctgtgccaggccatgccaggggccgaggaggtagaggggtggactagtccaagggtga

SEQ ID NO: 47549 - DNA, 1042 bp, Homo sapiens
agggaaccatggaagggcttgaagcagaaagggcgatcagcttgccttccagaagatgtccctgggaggacaggtgtggggggacagtccaggaaccccatgaggaggctggagagtggtgctacaagagatggcagagagaggacagaatctccagggggctagaaggatgactcctgcacagggcaggggaggacaggaggctcccatcctcaaggccgctgctgcattcccacatcttgaggcccaaggagtcacccttttgaacagtgggttggctgggggtgggggtttccagacatggatccgaggtggaagagcgttccaggcaggggcaacagatgagcaagactcaagagctaggaggtttctgatcagggagggccccctgggctttaggtgggtggataggagagtgtgcagctgtgttggagggagtatgacagataccagtgatgaagaggggctgcagacaccaggaccctcggtgtggctggggcggactaggggtgtgcttcagagtccccagttctgggggtcagctccctcattcacccctccagatcccaaagagggcccaggctgacctctcccaactgtctgtgtgtctgtctgtcttccagggccctcagggaccccaggggccaattgggcctccaggagagatgggacccaaggtgagtgtgagagacccttattcgtcccatgatgctgctggggatgtatcagcccttcccttccctcctccccaggagcctctttctgccattccctgtcctggcccagggagatggtcatgtaccgtgtagttcagagaagggtggacgccctggcagagagggtagatccatcctggtggcataggttgaggagctggctcctagtccaggggcattgggtgggacacagaggtaccaggacccttgtgggggttggcattgcctctttgggcatcactggaagcatggatgcttcccaaccttgaccttgctgggactttgccccagcagaggtttgactgtccatccagcccccaagggtc

SEQ ID NO: 47550 - DNA, 1059 bp, Homo sapiens
ctgccccagagctcaggcctcagcaggcccagcttgaagcaatgagcaatcatgagttgctttcttgagcctctcttctaggcagggccaagccccaggctccagcttcatgccctctgcttcctgtgctctctctcctctggatgcacaccagtttatcagtgtccctcgtaaaccttggcactgggggacagaactggtaaagacacactatgcttttccaagcctgctcttctcgcccatcccttcctgatggacgccgcccctcagcagccatgcccgtgctgcactccacacctgctctgctcacggtgatgagggtgacagcccacgccccatcctggaatcctgcatgccccatcctggaaccccacctgcccccaatctctctcagagtacgcaaagattaccgtgatgagataaggcaagcttagagtgacactgattgcttcaaaaccataaaaagcccatgccagcctggtgcagtggctcacacctgtaatcccagcactttggaaggccaaagtgagtggatcatctgaggtcaggagttcgagaccagcctagccaacatggtgaaaccctgtctctactaaaaatacaaaaattagccaggcatggtggcgcgtgcctgcagtcccagctagttgggaggcgggggcacttgaacctgggaggtggaggttgcagtgagttgagatcatgccactgcactccagcctgggcaacagaatgagatccgtctaaaaaaaaaaaaaaaaagcccatgccaagggttgcctttccaaggaaataacctcaggtgccccaaaggtccgaagccccaagaagaccttggttacagccctatcactgtaaagaggatacgctcaggatcctgcttcaaagtccagctccaccgctagccagttgtgggcctctgggccagaccacttgatttagctctgcctcagtttcctcttctgtaaaatgggactaaaagcggaccagccttagaaagcttttgtggggattaagtcagttaatagatgttaaaggactcagactatggtcctgaca

SEQ ID NO: 47551 - DNA, 1021 bp, Homo sapiens
tgggtgaaaacttgaccttgaagaaaccaatcacaaaagcggcgttgggtcagggctaggcttagaggtgaagcatcaacatggaaccatctcaggaagccgcatcgcctcttccgaggtcctcacttccaggagcctgtccttgcaagatgcaatcatcgttcctgctttttcattgtcattaaattctgtagaaacccattgtcattagctccaagtgtaaatttgggtcaaggagacagaataataatgggaatctcggagttcgacaccatagtgacgttcagcgtcctctgaattgtgctacatcagcgaacaagtcggcgcttgaattggattttgaggttattttaaccatggaattatttttatagaaggggaaaatgtatgtgaaagtctctatttgtgtatttctctcctaaagttgtgtctctttgggaattggatttgatttttattatttaatacctcactttggcccgtcccccctcccaacacttctgtatcctcgccctgccgccccagcctggacgctctgcgtggaagtgcgtgtttgtagcagctcgggcctcatctcagcgctcggatccctcctgctgccagaatccactggcctctgtctcattcttgggttttcctgctgtcttcgtttacgtctctgtccacatgtcagtgtattaaaaccccaatgggttccgtttctccttttcccctctggattttaaataaatatttaaaactgaggcaatggaatgacacgcctgtggtcccgtgctgcttctcaaagctcaggggggcagtttctggctgggctgggatagggagtgggaggagatgctcagaggatgtcctccttacgctgtaacaaataccacaaacttggtggctgcaaacaacacagaaccgtctctctcgcagttctggaggccagaagttcacacaggcagtgttggcagggccacactccctccaaagcctcaaggggaggatctttccttgcctcttcccgctcctggtagcc

SEQ ID NO: 47552 - DNA, 1078 bp, Homo sapiens
acccatggccttcaggccctgtaggatctcccataggtctctcctctctacccctctcttcctttactgctcaacactccaccccctcacactagaggatctggctgaccgtttagctcctccaaggtgatgggcactctctcacctttaggactttgcacatgccattccctccactgaagatactcttctatctctcttccttctgatgtctgctgagataccacttcctccaggaagccctccctgaagcctctaaccggaccagatgctccttcgctgtgctcccacagtcctttagtcctctgccatcatggtatttatcacaatggagggcactactgcctgtttctttgtctgttcatcctacaagatggtaagctttaagaggcctaggatagagtcttgtccactattgtattcccaaggcctggcataccctagacaaacaagcctctaattcctccactgatgtcaggggaggctgcaggggtagacttactaaactcagacaaggaagccaaacaccagcagctggacacaactttgcacgtaggcaacatgacagcctcatgcctgttcgagccaaagaaaccttggctgggccaccaccgagcagtctccccagcgcatcccgggacagacacccactccagcaagggtgtgtaagtgatcactggccaaaagcaactaagaggaggtgtgagagaactgaccaagcgattttaccatttctgttcaaccaaggaagtggaactttcttagtagaaaaaatgcacacgaaccaaaaaaagaaaagaaaaactcagaaggcagtagcttcttggtccatacaatcaatggtcaaattgcagaaaagatagccctagaaaggacaggcttttctcggaaaagagatgatggagagagagggcataagtgtcagcaccagaaaggtgaatctttaggtcatattccactggctggagaagtgtgtcctcgatgtctagatcaatgaggtcccacagaaacgctgggaactgggaggcaggacacctgggtccgtctgctcctaccaccaccatctgtgtgagctggg

SEQ ID NO: 47553 - DNA, 2628 bp, Homo sapiens
ctctgctgcttagaactgtggacacgtatggaaagactggacccccattgctttcattgttcagagaacccaggagacatgaagatgaccagactgggcaaattatgtgtccaaaacttggcctcagatgatgtttccatctccaaccccttcatgccagatggggaaactgaggctcagagaggatactgctctatgtggcattgccttgaacccctaaaattatcagacttcctttttccaatataaagaaaaaaagtaagttttcagaattctctcaatttttaagtttttctcccccatattttgtgaaaagcagtggtatgtgtacgtgttgtctaccagtacacaggctgcagaagacagagacagaagaaagagatcaagggcagataactgttgataggaatatttgagaaagattgatcctgtttgacttgaggacttattttgttcacaggcatgcacgcttgtggttgtggttttatattacagatgtagaacaatggttatgtttcccgacatgaacattgtcctggaatgaagtgtgatcagccacttgtggaattctttgaagagctcagaggcttccaagtgatctgctcctgaacaagtttgaagacctattgtttcatagacccaagaccaaacgcatctaaaggatccccagcccccaagacctagcctttgtctgcgattttggcttcatctcccacaaaacccctttatgagttcacgctctttcctggactgacatacctattcctttccatttgttggactcctattcatgcttcaaagtccagctttcttaagcccttctttaggaagccttcccacacagccaaccctgctgctctctgcctcctttaaattcttgatacagctgctgcttgttctgatgttttatggtattgattctgttttcctgtgtatatgccagtttttctagctagactgtaaactccttaaggacagagactacaccttgtactttttgtgcatgacctggacctgctaaggaaaaaaaaatcttgtggattgattgctttgccatccccacagcagcttttgcaaattgctttccaaactcacttgaatgatgacattgctgtggacctgggttctggacctgatctgccacttcaagctgtgtaatttttggcaagttgctttctttgcctggtcctcagtttgcccatcaatataatgggtggattggatgatttttttttttttaattgagatggagtcttgcactgtcacccaggctggagtgcagtggcgcgatcttggctcactgcaacccccgccacctaggttcaagtgattctcatgcctcagcctcccaagtagctgggactacaggtgtgcaccactactcctggatatttttttgtgtttttagtagagatggggtttcgccatgttggccaagctggtcttgaactcctgacctcaggtgatccacccgcctcgggctcccaaagtgctgggattacagacgtgaggcaccacaaccagcctggatgattcttaagggcccttctaggaccaaagttctgggaatttctagcttattctgccccctcatagcccttggcctatctatctttatccacatgcagaaacatctggcaaccccacatggctgagatgacctggtcctaggacacccttggacagaagactggcctacctagcagacctggatttttcttcctgatctgctgcttccaagttgtgtgaccttggctaagtcacttaacctttctgattgtcatttcgctttttaataaagtgggtctggtgaacaagaaatgtaataaacacgtggcttgccattcaagagatgagtctgaccattcactttctgtgtgccagagaagagagatcatgggtatagaccagcccctggaaaggctgctttggtcaaggctgagagcagctttgctcaaggaaattattcacgaaggtgaccactgtctttctgacctggcacagaggaaatgttggctgtgaatgtgaccaatagaaagaagcccgtatttctcagtcagtcctagaaccccggtaagtaattaacagagaataaaaatgtgtttgttaaatgacaaagcagcagtttttcaattgtaaggtctgcttgagagcctttgatgtgtgtttcttttcctgacttttcctttctttagaatttttgatggtctcacctggtgggtggggctttcagggtatgcccacaatgtacatttctcggcatctgtgcctcagtttcctcatttataaaatccctatgatctctgtctcacctactttacagggttgctgtgaagatcgcatactacacacaggaatgctcatcagtttttaaattttatttaatttttatttatttttttttaaatgtaattttttcagagagataaggtcttgctatgttacccagcctagtcttgaactcctggcctcaagtgatcctcctgccttggcctcccatgctgctgggattacaggtgtgaactaccatgcccagccagctcctaagtcttaaggctctgtgttagtgatagatgtggccatggtgtaggcagtgcaatgtcttcgagtgagagtgaaggtggtaac

SEQ ID NO: 47554 - DNA, 1704 bp, Homo sapiens
accttttcctgctaaatattgccaaccttcttaatatggtcatctggatgtcccataggcccctccagcttggaatagcccaaaattaagtgatctgctgttgttgtcaacttggcctcaataccacaaggacctcattccctagaatcttctttcctgtatggttctgagttagaattggccagctttgcctgagaaatatgactcaaggtcctcttattcatcctgactgctgctgccctactttaggcctgtatcactgtctgtcctgattgcctaggcagtcgcttaatttgttttgttttgttttggtagagatcgggtcttgctgtgttgcccaggctgatctcaaactcctggcctcaagtgatactcctgcctctgcctcctgtatttctggggccacagacataagcccagcctcttaatttgatttctgcattagtcatgatccacttgggagacagaaaccacataacaatttgaatatgagaagattaatataagtactaactagaacaggggattggagtaatgaaggagtggtaagaagtcaggagagctttaaagaatataggaataatggacataaggagcagccagcacccctagaactaagaaagaacacccccaggctctatccccagctgagatccagatgttgctgggaagggcatggctgtgcctcacaatggcagagaagtctgggagaatgttctagaagtctgcccttgggtgccagggaaagctgtcatggaacagtgtctgattagaggcacacctatttgtgggggcactaggagaagctgctagttgccaagtgctactgaccaccatcctctgcaggattcctgttctggaaaagttgcctgcactgcgggagggtgatgttggagaagctgtgagctctgtgctgttaagatgagcccagcacaaccagaaaggaaggcctcttcctcctccaatgtctctagctccccctcctgacagagcctagcattgcaccaactaccaaaagaaaaatatttaaagggccagctccatttttgaagagcaggcgatgaacagtaaatttggggtccagagtaataactgaatgtcattctaccattatcgaggggccgcataaccaagttgttaagagtgtggactctgcagttgggtttcttgagttaaagtcttagctctggcacttaatgtgagttagtgtaaaccttaaaagatttatttaacctgtgtctcacttccctaatctgtaaaatcaggtagtaacagttctaaccttgttgggttattgtgctgattgggttgatatttatgaagcacttggaagaggatctggcacagagtaagcaaggaaccaggctgtctattgtgattactattacactcaaatcgtggtggcatgcgcctgtagtcctagctacttgggaggctgaggcaggagaatcgcttgaacccgagaggtggaggttgcagtgagctgagatcgcaccactgcactccagcctggatgacagagcgagactccgtctcaaaaaacaaaacaaaacaaaacaaaatccatccttcacattatagccaggatgggcttttcattgaaggtatgaattttactccacattgccatggcatagacatcatattcctttattcttctcttttctgaggtggggaaggcataaggagtgctaattaataaat

SEQ ID NO: 47555 - DNA, 1048 bp, Homo sapiens
actttttcacatgcccttttataatttactaagtgtcatcaagtcattaggctgaggggtcacaaaaactggacagcagtagctgcaccagagcctggccactatctctcaggcctgctgggtcatgtccagtggtggaaagcaatactgatcacattgcttgggggcatgtgtttatttcctattcacaggtgaccaaccatcctggtttgccagggactgcgggatttcctaggtgtggaacttctggtgctaaaactgagacagtaccaggcaagcggggacaagttggtcaacttacctcatcatttgtgagcaccaccccctcttctgaaccaagccccttgtttgccctgaatctacaatctccatggttcccatgaactatacctgattcattttaggtgcaacaccatctttcctgactcagaagagtttgctcacagggactatttaagaattaaagagtaaaaagaataaacccaacatccctcctccccatcagttccccacccctacctgtgctctgtcctcaaaaagacctctcttagttggttaccataactgaatgaaaattttcagaggctccaggcacagacgctggtgcctgctcatattgtcactgagagcaaaacaataccaaaccataaaatatgaaacttacctatacctggaaattgaaattacacaattatttctagagtagctcattacaaaatggaggggttcattgaaaagcactctctctttctccagtctcttacttatatttgattttactttctggcagctgtagtttgctggtgctctaaacaagtgtttaatctgtcaactgggtacattagcactgatggttgccaaacaagaaaacatttctgttttatttatttatttattttttatttttatttttttgagacagagcctccctctctcacccaggctggagtgcagtggtgcgatctcggctcactgcagcctccgcctcccaggttcaagcagctctcctgcctcagcctgccgagtagctgggactacaggcatgcac

SEQ ID NO: 47556 - DNA, 1042 bp, Homo sapiens
ctcagcatgacagctttgctttaataagggggcacctgaagtggaagggctgcagtctactgagtagctgggtccagaaagagggaagatgggtgtggtgggatcccaggctatacaaagactggaggcagattcagtatctcaactacccttagcacatctaagttctgacttctacagctggagataggctggaggcttggagaattattgcattcagttccttgcgtttacaacagtgattctccgtcacttgatgattcaagccccaacatctcacctcagagcctcctgccatctactgctcactccacccaaccattttagcgaaacgtttccacttcctttggtataccgtgaatttcagtctaaatgaactgttcttaatctagaaaaatttacctctgtcttgttttatgctgtttctactgctcagagcactatacttatcactcacattttttgatatgtgtgctttctcaaactattaattcattcaacagatattgctgagaacttattctgtgctaggcactgcaccaggcacagagatacagcaaggaagggctaatattctctgtccttgaagcacttaacatacaccaaggtagtcaggcattcaacatgtgattgcaaaatgtgtgctcacttttgtaataaagtatgggacactaaggatacctgtggaaggaaaccaacataacccagctatcaaaaaaaaaagcctccctaagcctttctcgttctttaaaccactatttggtcttcctctgctagcactctccaaactctactttgtgttacaatcacactctacttggtttatcctctcttttgccctttgaactgtttgaaaccaatggcagtatcttcttcatctttgagtcctccattttgactgagcttcatacatttttttaaaaaattgaacaataaaagtgatgtccagagaaaaatagctgattgggccacaatcacaacaaaaactaataaaacagtagccatttttttctgatacttggtccacagtcagtatgttaaa

SEQ ID NO: 47557 - DNA, 1026 bp, Homo sapiens
tatgactaaatgatgattcactcctttgtattacacctgtttattgagtgcctcctacatgccaggcactgttttcaatatcgggaaatacagcagtgaaaaaacaaacaaacaaagcaatccctcaagagcttaagctctcatagatgatgccaatgacgggtaacttcttttgatcaagctttaccttacaaacatccctgcttttcttcacactaactgtccaggatgggtattactggagatgttttaaggcttttattcctacttcagagataagaaaaaatcaaacgccagaaaaatttcaaaagttgtccagagttatacaggtcaaaagtgattaaagacagaatcaggacttgaacctgattttgtctgattctcaagcacgtgctcaactcattttgctttgcaacctccagccgtgatgcaggaaccaccaaggtcccctctgcagactcagaaccttgggcagtctctctgatctgaggaaggaggaatagcagaccagcctgtgtttagaaagcaaatgtccttttcccaccttcaccgagtcatttgggaaatttgttttcctctgccttctcttggagtctggctgatcttgttgtttcagccccacttgggaggccctggtcagccccgggctggtaaacagacaggggttgggaggggcaggggtggaattttgagctggtccagatgagatcatacttcctttaagatgcaaatcgatacctgaagatcaaaggtcccccagctaatcccctgggctggaggtgaaaactaatcacaattcatttgcaagtacaaaagacagaggtgctctatctgaagagagaaggggcagttacaagcggatgaaaaccttcgtgggaagatttctcactgacaggcaattttctaggactaaagaggaaaagatagcattgcatcctcgcatctgcagtgcattacaggggtgcatttagacattctttctcccagtagattgtgagctccgtgatggtgaagaccatataccat

SEQ ID NO: 47558 - DNA, 1072 bp, Homo sapiens
acagtttgcagtggagagagaaatataatattgtgggcaggctgaaggtaaatgaggccaggaatcctccagctgtctgtgcttttgaaagaggtgccatcactgagtgacattcagcatttagatctctacccatctaaaccagtcatgccttttccctcaagtaaagcagttatctgttggctcaaaatggaagtgtgatctgagtctttttcctttttcccctttgatgtgaatattttaggctgtgcttagtacagtcgatgtttaattatctgctgtgttgactaaattgcagactagggccccaagaaactaatttgttcaattacagcagttttttgggttttttttttttttttgctttgttttttaaagcagcagtacccttgtccaaataaagtcttatatggaagtctatcatgtaaaatagatcaaagagcagctgctctggttgaagcaggtttgtgccgctgaagaatatgctgtttcctccctttaccttacctcctgtgctaccattgcaaaacttgtgaatctacagaatacttttctgaaaaccactgaactacagcattgcttaccttatagttctgtcttattagtcatgtggccttgggcaagtcatttaactcttcctcttctggaaaataacaaaaatgatccctgcctcctagaagggtatgagataacatgtgaaaataacctggtttcattcctggaatattccataaatgatggctgttactcttttatctagttgctcaaaagagcacctgatggtgggaagtggtccaaccatgctaaacagttcctttcttcttgcttaacaggtttctatttggtgattaaaacctttctcaggcatttctttcccctcacaagtctccaaatatatcaagttcatctcttcctttctactgtctatttcacattcctattatataaatcactgtgttgcaattatctgtccatatatttgagctttattgagggctaactaatctagctaccagcatgtaacatggtgcctagtatagaatatgttatcagttatttaattggttcaggt

SEQ ID NO: 47559 - DNA, 1032 bp, Homo sapiens
caacaggagagcaaatgtttacctttgggtttgataccaacatctaaagagttctctgaggctgctgtggtatgactgaaccaacaccaactccgtgattaatcagcctgggttcaaatccctgctttgccaaattccctggtgtgaatcctgacaagtcactttccccttctgagcctcagtttcctcaagcatgaaatgcagataacaatgcttgacttacagactttttgtgaggagtaaactggatgaaataatgtatgtgaaagtgctttgtgtgatgcactgcactgagcacatacagaggattattattcttggtatgcaccaataggaagaagactagggtgttccgttccagatggactcaatctaaaccggggaacaaatgcttttttttggtaatttcatcttgtggaaacggcagtctcatgggcctatttgtgtttaatgaaccacatcctgtatcgtctttttgcatggttctgaggagaaatacgttggctctgtcttctggcgtgctgtagactagtgagtgtcaagctcatatttaacctcctccagtctctctgccttctgcaagaaaacgcttccctagagctagattgatcctacaaataactgcacagaagctaaggcacaaagggagaggaaagggatagttagccaactctcaccaccatgctgggaccctaccatagacaaatgcagccaggctgggatttttcacctaggataaaattaaggagtttagattcagaggtgactgccctggggtcaagcagctaggaatcagaaaagccaggtttatctgagttcaaagtcagtgctttcaaattttcaacaaattgcttttaatacatcagtagtcttcatcctttctggagtcagagaaccctttgagactgcaagaaagctatggagactttcatcccaaataaaacacaaatgcagatgaacaacactttgcctataccactaaggcatttatgaccctcccaggctcactcaatctcactcactcatttattt

SEQ ID NO: 47560 - DNA, 1026 bp, Homo sapiens
tttagttatagtattcttcagatttgtaatttctgtttggtacttttttatactttctttttgttgaaattcccagtttgttcttatattgacctcttgactttggagagcatctttattactattattattatcattattattattattattattattgagacagagtccactctgttgcccaggctgaagtgcagtggtatgatcttggctcactacagcctccacctcctggtttcaagtgattcttgtgcctcggcctccaaagtagctgggactacagtcatgtgccaccacacctggctattttttttctatttttagtagagatgggtttccaccatgttggacaggctggtctcaaactcctggcttcaagtcatctactcacctcagcttcccacagtgctagggttacaggcatgagccactactagcagcctatcaccattattttgaattgctgtcaggtcaaacaatatctcccattcgtttgggttagtttctgtagaattatcttgctcttttatttgtttcttcatttcccttgactctctgtgttggtttctgtgcattagataagacaaataactcgtccagtattgtgaggctggccttatataggagaagaatctcacctatctgtccagccacccgccttggcctcccaaagtgctgggattacaggtgtgagccaccatgtcctgcctacagtataagttctttcatgtttttgaaagaaactggaacaaaagattttatcatattttttatattcataggatttttctcaagtgtgaatctgtttatgtttttgaaggtacctgatatatctgaatgctttccttattccttacaaggaacaggttttctatgcagtttgagttatttcatgtatttgacagaaactggaaaggccacatttttttaatgctcataggatccttctccatttttaatctattcatgtgttggaaaggaactgggataattaaatgctttcctacattcctttccttcattgga

SEQ ID NO: 47561 - DNA, 1030 bp, Homo sapiens
aggaaggtctttatatattttcttcactgttgtatgcccttcactgagcaaaaacggaaactcaacaaatatttgctgaataaataaatgcaacatatgagaaccaacattgtttaactcaaccttgtcaatctgggcaaagtgtgctgaagacaaggagttagtccttgacgagtgagtaagaggttaagaagcaaagttaaggaagagtgttagatacggagaccccagcaaaggtccagagacacaaaacaaacagtttggtaccactggagcattaggtgccagaagccttattttctgcacgggaaataaggattaggaagaccagggctaggttaatagaggatggcagataaaaagtctggaattaactgtgtgatcccatagcatcctgttcaaacctcaaacagcacctaatatcttttactgaaacaatctgtttacacatctgtctccttacttagtctctaaggtagcagaaggtagaaactatactatgcacttgtgcatccccagagatggcacaggctctggctcactgttaagtactcaagtgttgagctggcagggtcccagaaggacctatggaagtgaatacctaccgtaaacacttttaaggcagcacagtgtagttcagggaagggctgactactaatgccacggaagagctccagtggatcccgagataaagaagaaaaccaggattctgtcatcctcagaaggtcatcagtctgctgctcaggctacaggaaagaaaaggaaaatctcatcaaaagttaactgatctggagaaaagcacttatttagaagtcagacacctgagtgctgatggcactctgtcattaatttgttgtgtgaaactggctaagtctggaggactctttctcaaatccagcccagacctttcccagttttctttgaatgtggttgattaagcagtctctagagtctcttcagttctaacactctatgattccattttaaattaaaaatgtcactagtcatataatgagggttatcttcttgt

SEQ ID NO: 47562 - DNA, 1023 bp, Homo sapiens
gagcttgcaggactggaagtttctttcccagttagtcggtgagtgaatgtgaaggtgtaggacattacggtacactactgtagactttataaacactgtacacttaggctacactaaatttattaaacattttttctctcttcaatagtaaattagccttagcttgctgtaatgtttttactttataaactttaaactttttaaaaactttttgactgttgtagtaaaacttagcttaaaacaaacacattgtacagttgtacaaaattaatttctttataaccttattctataagcttttttctattttaaaaacttttttactttttaaatgttttcttaaaaactgagacgcaaacacacacattagcctaggcctgtaagggtcaggatcatcagtatgactgcctttcatatcttgttccactggaaggtcttcaagggcaataacatgcatggagctgtcatttcttatgataacagtgttatgttctggaatacctcttgaaggacctacctgcctgagtctgttttatagttaactattttttaaaaaataaatagaaggagtacactctaacaatgaaaagtatggtatagtaaatacataagccagtaacacggacatttattaccaagtactatgtactctacataattgtatgtgccaggcttgtgtacaccttgtagcacagtaggtttgtttacaccaacatcactacaaacatgtgagtaatgtgtagcactatgacattatgacatatatgatgttactaagttataggaatttttcagctttattataatcttacgggaccactgtcatgtatgtggtccgttgttgaccaaaacattgttatgtgatgcgtgactgtatgtatttcacaatatcacatatatgaagatgtttgtcattccactatccctttctaatatcaatttatatagcattaagacttgagctactctaaatccttggattaaaaactactttaacctaatatcttatttcattaaattttt

SEQ ID NO: 47563 - DNA, 1059 bp, Homo sapiens
gtagcgtgatgcctccagctttgttctttttgcttaggattgtcttggcaatgcaggctcttttttggttccatatgaactttaaagtagttttttcgaactctgtgaagaaagtcattggtagcttgatgggaatggcattgaatctataaattaccttgggcagtatggccattttcacggtattgattcttcctacccatgagcatggaatgttcttccatttgtttgtgtcctcttttattttgttgagctgtggtttgtagttcttgaagacgtccttcacatcccttgtaagttggattcctaggtattttactctctttgtagcaattgtgaatgggagttcactcacgatttggctctctgtctattattggtgtataggaatgcatgtgatttttgcacattgatttttgtatcctgagactttgctgaagttgcatatcagcttaaggagattttggctgagacgatggggttttctaaatatacaatcatgtcatctgcaaactgagacaatttgacttcctcttttcctaattgaataccctttatttctttctcttttctgattgccctggccggaacttccaacactatgttgaataggagtggtgagagagggcatccctgtcttgtgccagttttcaaagggaatgcttccagtttttgcccattcagtatgatattggctgtgggtttgtcataaatagctcttattattttgagatacgtgccatcaatacctagtttattgacagtttttagcatgaagggcaattgaagtttgttgaaggccttttctgcatctattgagatatcatgtggtttttgtcattagttctgtttatgtgatggattatgtttattgatttgtgtatgttgaaccagccttgcatcccagggatgaagccgacttgatcgtggtggataagctttttgatgtgctgctggattcggtttgccagtattttattgaggattttcacatcgatattcatcagggatattggtctaaaattctctttttttgttgtgtctctgccaggctttggt

SEQ ID NO: 47564 - DNA, 1050 bp, Homo sapiens
ttatttttatatagtctttctgtctttgttgacacatgtagttttacacagttgctctcacagtgcttataccattttaaatttatttttctcagccaacataatattaacattcttccgtgttgctacattgtcatctgatcatttgaaaggctacacagtattccactttgttaatgcattatcacttagcctattattatttgtcaggtcttatattattatacattgagcatttttatatagtagttctttgcttctgaattatttaccgagaattagagttacagtgaatggacatttttatgtctttctgtaccatcttgttttccaaaagagctgtactggtttacatggccagtagctgtgagtgagtattgtaactgaatggcttttaatgacagtttcttttctagacaaaaaatgctgttgaaaagttcactgatgccaagagaagtttattgcaaactgagtcagatgctgaggaattagaaaggagagctcaggaaactgctgttaacctcgtcaaagctgatcagcagctaaggtaggtggattccctaagccgttgatgtatacattgagatgaatgaaaagtttgcttctaaggggataataattggtttatgataaataatgcatggtaagtctacaggacctggggggaataaagcaatgtgctttagatcgctccaggctgatgcaaaggatttggagcagcacaaaatcaagcaagaagaaatcttgaaagaaataaacaaaattgtagcagcaaaagactcagacttccaatgtttaagcaagaagaaggaaaaactgacagaagagtaagtaaggcctctgtagggctacaaggggtttgtgctggaagacagctctggggttccgagtcccttaggatctgctctagtgttgctggtgctttgtaggcttcagaaactacagaaagacatagagatggcagaacgcaatgaggatcaccacctgcaggtccttaaagaatctgaggtgcttcttcaggccaaaagagccgagctggaaaagctgaaa

SEQ ID NO: 47565 - DNA, 1076 bp, Homo sapiens
gcagtggcatgatctcagttcactgcaacctccacctcccaggttcaagcaattctcctgtctcagcctcctgagtatctggaattacaggcgtgtgccaccatgcctggataatttttgtatttttagtagagacggggttcaccatgttggccaggctggtcttgcactcctgaccttgtgatccacacgacttggcctcccaaagtgctgggattacaggcataagccaccgcgcctagccagttttattacactgctgtagtcagtgcctacaaatttttctcatcctgccctttttggccaacattagctttaatcattatcctaaaaccaggaagctcaatctaccatgctttcatccttgaaataaatttgggaagtgacactcaggtcagaataatttatggtggatggagacaggtgagcagcaatggaactgtcaagggggaggatttttccactaccctctggaggggttagtggagccctgttgtatgaaaggaacttttaaaccatgtgtgtctctcaaaggggatacgctgataactagtgataggcagatcgtcataaagatggaatatagatgtctaaaatttaatcctaccagtaaccctgtgatgatgggtattattattctcattttacagacaattaatgaagactcagaaagggatagtagcttattatcaaaggtaatgctaacagactctgacgtgtatatacgcccagctgtatttgatctgcccatgaaaggccgatagaattatccccatttgacagctagagaagctgaggcccagaaggggaatgaagttatagagctagtgagtgtgtaagccagcaaaccacacctccatgtgttagatcgcagagttattttcttcctcctgtgctaggagcaaaaacaggagaacagctgcatacaaaaggaaatggcaacaattgaactggtagcccaggacaaccatgagcgggccaggcgcctgatgaaggagctcaaccagatgcagtatgagtacacggagctcaagaaacaggtgtgtgcccagaaagcccagctggccagcctgggg

SEQ ID NO: 47566 - DNA, 1052 bp, Homo sapiens
cagcttcttagattaagcatcttacatgcattacctactttaatcctcggtgaatgtgagtatcagtttcattttataactgaagaaacgggcactgagacgggaagtcacttttacaggctcacatagatgatagttgatagggctgggagtccatctgagagcctgtcctccctaaacatcatcctgtccccttcctgatgtgaatcaccaagcaagggacaacacaattcatagatccaggacaaggtttatggcacatacttctaaggggtgggacctggtatcatggacacggcattcaagagatagtacatggtatagagtctgtcacaaaacagacatcacatggtgcatgaagcatgacccaggggtaagaggcatgggatgccgctaaagggagacacacaggacaaagcaagaggaacgcagggcctgctacgtggcacagtcacagggtatgtgacactgggcatgacaaactctatgatgcagagacatggtacttaggatttgagacttgagctatggcaactgggcaggctcttggccacagtgggaccctttgtcatcagggatcctccattatgttggtgcctggggccccagcaagcaacagcaggaaccaagttcctcctcctcacaaaggcagtctgttttttttttcttttttttctttttttctccctcctcctccctgtctctttggatgccaaagagtgggaggggcccagcggagtggtggccagagtaaccccccgccatcccatcagctcagacaagggtcaaagcttggggccaagcccacggctcaggaagggtttgccaggcccccagatcccctctctctgagatagctgtgagcaccagtgttggctggggtgaaagccgggtaattttcctctaagctgtcctccctccgctcccctccctgcctgctggtgctggctgtgagcacgtctgcattccagagcttaggagagagagaacctgctgctgttaaggttgaggaagtagattgctaacagctgctgtaggaggggttggatgtg

SEQ ID NO: 47567 - DNA, 1050 bp, Homo sapiens
agacagtagaaaggtcaatggttgtgagagattggagggagggaggaaaaactgtgaagaatgtagggaatttttagggcagtgaaactattctatatggtactataatggtgaatgaatgtacttatgtgtttgtcaaaacccatagaatgtacaacaccaaaagtgaactctaatgtaaaccatggactttggatgataataaaatgtcaatataggctagttgattgtaacaaaggcaagaggtgttaattgtggggaggctgtgtgtgtgtgtgtgtgtgtatgtatgtgtatgtatgtgtgtgtgggagcaaaagtcataaaagaaaattctctgcactttctgctctattttgctgtgaacttaaaactgctctaaaaaataaagttgatttttttaaaaagcatgctatcagtaagccacccagacttcaatctgtttcactcttgaatgaattcacatcaggcatcctttttacataactttaaattgatttttaagaatgagacttagaatataaacactgatgatcctgccagacaaaaaagcttcttgtaaacatatataccattaggaagcaaaagaaaggaggaagttaaacaaataaaagatacataacaaatagcttcatatttaatgaattgatcccagtatgtcatttgggactagctgaccataaaatatcctcctactacccttgaaatattttttcttgggtcttcagcataatagctgtggagctactgggtccagttactgtattattgggtgttttatgggtgctatttgtacactgtatctttattttaaaaacctattttggctgggtgcagtggctcacgcctgtaatcccagcactttgggaggccaatgtgggtggatcacttgaggtgaggagttggagaccagcctggccaacatggtgaaacctcatctctactaaatatacgaaaaattagccaggcatggtggcatgtgcctgtaatcccagctactcgaaaggctgaggcaggagaattgcttgaatccgggaggcagaggttgca

SEQ ID NO: 47568 - DNA, 1074 bp, Homo sapiens
tggtctctgcccatagaatcctttctttttctttctttctttctttcttttttttttttttgagatggagtcttgctctattgtccaggctggagtgcagtgttgcgatcttggctcacagcaacctctgcctcccaggttcaagcgattctcctgcctcagccttctgagtagctgggactataggggtgcaccaccgcgttcggctactttttgtatttttagtagagacagggtttcgtcctgttggccaggctggtcttgaactcctgacctcaggtgatccacgagcctcggcctcccaaagtgctggtattacaggtgtgagccaccgtgctgggcctcttttcctttcagaagttatctcaagcactgtgccctccatgaaatttcctatggcccctcaaccttaactgccttagtgtatccttgttacgccttatgtctgcaatagttgtcggcccaagtatgttccatggaatggtaacctggtaagatgctttgtagaaaagaaggttaagaaaaggctgctgaatactttatgtacctgttttgtatagtaccaatccatatgaacaattttaaaggttctgagaaatcctgcagtaaagaaacctgctgagatttgtttactccagaactttccaaacctctgactgtagaacactttcttcttggaatgcctattgataagctttgcgacactcctggagaggtggcgttgtagacatctatataacagtttgatgctatctcctcttataatgaaggaaaccaaagcccagagaactcagtgactagcctcaggtaaatcccagtgtctaccactccatcacctcttgggtcaattggcaggtcctttataatgagtgtccaaggctgggtggcaaggaagggctggacatggtagccaaggacctgctttcaaataactttctttctttttttttttttttgagacagtctcactttgttgcccaggccagagtgcagtggcacaatctcagctcactgcaaccttggcctccctggttcaagcgattctcctgcctcagcctcccgagtagctgggat

SEQ ID NO: 47569 - DNA, 1803 bp, Homo sapiens
aagcagtgggctccctggaggaaaggcgcagggagctcagagagagtgttgcaggagggctgtggaggaggcggtgaattgagagaggggagtggtggtttttctggaaaggaagagtgaatgcgagtcagccaggtggctcaagagagctgtggcagggaaggtgagccagaaagagtggccaaaggccagcagggccagggcagctagggcaggggctgtgtttcagatttcactctggctgttttatggagaaccacactgaggaggcagcggaggatttggggggacagttcggggggatggaggtccccaaaggtagagatggcgatgccctggttctgggagatgtcaatgaaggtgatgaggtggacagcctcaagctggaatttggagctctgaagagcccatttcacagagcaggctccaagtctacaaagccagccccatgtcctgtatcctaggaggtgggaatcatgggagcaaagacacaaaggaaagaagcagtgaagggctgggggccagggtggttggggaagggataggagtagggtgtggtaagagggaagataggagtagggctggggccatatccactgaccactatcctaggctaggactagagtcaaggctgtgtgggattgaatcctgtctctgccactaatcaactcttgtgcctgtaaaatgggagagtaacaggattcactgcttttggtcattagaaggacttgctgaattgacactgcctgacaaaggggaagcactgaattgggattaagtatgcactgagtggccttgggcaactctgccctctctgagctttgctttcttctagcaggtctctgcaaaccctctaggccaaagtcctctaatctccctgtgctagcagtgtgcagctcccgagggtggtcagagcacagcggcaagctggctgtattgcctcagatgggaccgtgtccctctctgccctgtaaggggataccatgcctatcagagctgtaaggggatattttaatcagcccaggacctgctgaggtcagagggcatagggaccagaacaaagaatgccagtcacggctgctgcctggccctagatgacctgctgggccccagaatccagaccacatggggagcctgcggagggaggtggaagctgggggcctcactgtgggtcaggcactgttcaaactgggtgttctccattttgggcctcagtttgcccatctgtaccatgaggtttataacccctccctgcctgcagcacatggggtgctgaaaaaaaggaacaggctgcagtttggacaaagcagattcaggtctttattgggggctgtggtctcaaagcctgagagagagcaacaggtgggcgagtgaggctcagtgcggcccacggatgacctgctttggaatcacctgtgggaccactgcccgctgatgaaaaatgcagactcctgggctgttccccagactggctaacttagactctgcccggtgggcccaagtgtctgcactttaacccacatcccaggggactggaatgtctcgaagtccaagatctgaagttctgggcatccccttccttgcatcaggggaacaggggcccagagggcatggggtcggctggcccaagttgcttaggagactggaatcctatgccatgccactcaggggtccttcctgtgcatcgccccaggagccctgggagtcctgggtgatgcctggggcaaggggtactttatcctagggctccatagcccagcagggggcagcgcagatcagcacctgctgagggctccccgctgc

SEQ ID NO: 47570 - DNA, 1118 bp, Homo sapiens
gatgttgaaggctgggagggcaggatgggctgtctttggcttggtttagcagcaaggaagggttgtgtcctggctccatgggacccccactggctgccatgcctctggctggggagagggtaagtgccaagacgctagcctcagtgagtgggtgggacacgagtgggaaggacggtgggggcttctagggtgtcgagcgggagtcctggtccccatggccttcccgtgtagatgagcggcacagggcactctggggcggccacttgagttctgactttggatgaatctatctggtttatatggctgctgaagaggctttgttgaatgctgtctgcgtgctccgcaagctgctgtgttggggaggtggtttttttgcgctggaattctctcatctggaggttggaaaccagttggttctgtgctgggatttttttggctccctggaaaaggagtcggtttcaggggtggggatgccgaacctggctggttgggattgagggttgctatctggttgtgaggctggggtcaggccaggcagtgcttggttggcacagctgggctctgggggctgggggctgtaggacaggcttgagccttcggacttattcttctgaaacggcctcaggggaggttgccagctggtctccacagtctctgggtccctcagacactcatttcttcttcagaagctttggcagtaagcaccaaggacaggtgatcatttctcctgggtaacaaacacatgctgcttggagcgctttccaggtgaaaggtgtgccggcaaaagcattttcattttgcacactggaaatgctgctgcttcatttacagggctgttttaatgttggtaaaagtgatatagaggatgtggttctgtcagcccagaggataatttccaagtcattcatttatttattaatgttactgaggagctaggagggtcagttggcaatattatgctttcctcattccttctctctcctgatgctgtttctgggtgactctagccctccacacctgctgggaatatgcttcctttggcatgctacctgtctaaacttaccacagtagttactctaaagtgtctgtacccccatcaagctcttcccagtcatcct

SEQ ID NO: 47571 - DNA, 1052 bp, Homo sapiens
actgttttatatctcaaaaatcttgggttataccatacaccatgaaaggtactgcattgccacacctgacacttccattctggtcccaaagcaagccacacgggggctctctgatgaacagaatcctgctctgctgacacatggacccagatccagatccgacgccctgacttcctccatgatctgggacaagtcacctaatctctgaacctctgtctcctcatttttaaatgggcaccatgattgtggtgcctacctcccagggttttgaggtctacatgggatcatgttacatggtaatttgatcatattctgtcatcacacacatgtactcacattctcacacaccatgcttttgcttttttgtttgagatcccacaacctgccagcacatccaacccagtcttcccagggtccacctcatcatatatatagcaagagatggcccaagacacatgaagtgatgtttgtgctgacatttctcccacttagaaaatcaatattctgtggtctgcctaattgctctgttgctgctaaatgagtcattatggagggaaaatagcaaatgcattgtgagattaatgggagaaaatggttggcaaatgactttggtttgcttcggaaactctgagaaggtgttactacgtgaaatctgcagagccatgcaaggccgagtcctgagcagcagggagacaggcaggcagctattggcgctgtgagcctcccttttagggcggggcaccgattcaaatattatagaggctggactcaggagttactgagtgatgaagtcaggagccaacaatgggacaggtgctctgacaacctggtctcaaagaagaggatactcttcagttagagccagttacatgccaggcatggtgctaagctgagggatgtaatggtgagcaaaaccagccccagctcctcccctagtggaggacacaggctgaagtgcaattgtcctacaggtgactgtgtaattgcaattaaggcatgtgtcctgaaggcagtgagagcccagatctgaagggtttcatctggtgggggtg

SEQ ID NO: 47572 - DNA, 1027 bp, Homo sapiens
gtcagtgaatagaacctatcaccctctcctttttcgcccagcaggctgcaggggcagggtccctgggccagtgtgggtccaggctccgtaactgtgtggtcagcacctccagggacctaggcttcaggtattagacatttaatgtccaacacctatctgtaggggaggtgcatctgcagcagagtttctgcagatgaggaaactaaggcttagagaaatgaagtgcttgtgggagaagcagaccttagagtcaggcacagctggcactttctagctgtgtgactgggagcaaagaacctgactgccttgctcctctgatcccacctgtaaaggaggcataatttgacatacctcacagggctgggctgtcctgttgtagatgggttgcagtgtacatgccagcagcctgcccagggttaaccctcctggcaatgagaagtgtgcaccatgtgccaggcacagaagttggtgggggcacagaagttgttggggacacagatctctgaagaaggatatgcttggacatcgttctctccagatacctttcctgattccctgctcccaaactggaaatgctcctgcagtctctctaggtcccctgttggtccaggccctgccctggacacttttcaccacatcttctgggcctacagcctgttatatatatttttttgtttggtcctaatatttgtgtaccttcccctctctactaaactgccagtttcctgaggacagaccgggtgtcttgttcacctgtttggctcctggtgtcacttccttcccagctgggtggccttggactggttgtttaacccggtgcacctgttttcacatctgtaaaatgggaacagtgatctctctccctctggcacatgtcacggcaaggaggttaatatcacacatggcagcactgtgccagatggctgacggaatggagtctagagaaacattgggaggaaaccaaagcagaggctgcccctctgccctccttgaagtagggagtatctaaggaggcgaggcatagtgg

SEQ ID NO: 47573 - DNA, 1038 bp, Homo sapiens
actcagggacctctgggggacctcaggggaccagactaccgtccccgacccgttcgagtccagcttgacctttaaggctgagggcgggacctgtggcattggagcgagtctcatggggtgggggcggggctccttttaccagctaggaatttaggggatgctggaggaacttactaaagagtagccgcacacttgacgggaacgtttgagtttcagaacaatcccataggagtagatattattatctcccataatgaagaaacggaagctcacataggtaattttaccagggtcacgcggtcagaaagtgagggcgcttaaattcagacctagggctatccgactcctaagcctggacttttaaccaccactctgtgccacccagtggcaaaacagttgtcatttcagtagcccttctccatttacttaaccctgacaaatagtattgtcatttacgttttacagatgagacggaagtcctgagagtttgaccgatttaaggtcacgtgcctaggaagtgctggaaccaagactcggagttttctctaagtttagtgcctttattttgttttaaaccacactgttgcatttccccccattttggaaagctttatagttggaaagaatgaaaacctgatctgaccccttcattttatggttgaaacaaaatctacgtaggagaaatcacttggtacaagtcacaagtcagtggtagagctgccgcaaatgctttttgaatacgtgtgattatgaatctaaatggcagatggcagggagtgataaggtaggcatactggaatccagatctcttaactcttaggcaaaagccctttctctacctgttaaagtgtctcattccttctttggccgtgccaggtgcataatgattctgtgtatagtcagatactacaagtacctttctttacctggtactgcatttagagaagaacatcatctactatctctaagcaaaaatctggcaaaccagagacagtggaggcaacgctgggaagcccagaacctaccataatagtaagg

SEQ ID NO: 47574 - DNA, 1050 bp, Homo sapiens
cccagccatgctgagtgttctatatgcattgtatagcagttaataacatagactctagagctagattgactgaattcaaatcttgggcagatttttgcttctgttttcttatctgtaaagtgggaataatcatagtacttacttcagggttatcatgaggctgaaatgagttcatgtgcataaaccacttagaatagtttctgtcacgtagtcattgttatataaatgttaggtattgtcattattgttatcttttaaagtctcattaatatcactatgatgatgatgtggaagctgtagctcagagaggctaaatgacctccccaaggtcacacagctagtaagtgggggaattgagattccagttccagactgcgtccaaagctcagacacttccccacattgcttctatgtataggttaattttgttggctcatacttgggatctcaacaaatttttcttcaactttaattctttatctgtgctgaactgaatgttaatttgtatacccttaaggtaaaggacctaaaggactgcttttattgaacttccactttgaaatttcttgacttctgtgcaattaaaatctacgccttaagcatttcagcgatgtggtttatttatagagttgtcttccggttcacgtgtactgggtctgcttttgggtgctgcgttttctgtcaaaggttgtttatttctaacccattttgatttcctgttgctttgtgagttggtattatgacctgcaacaggaataccaggaaacctgtcttaaatggagcagccagattgagaccctgtagactaaaataaaatctactcattattctacagccatatttggttataagtatgagttaggcattggttttattagggaaaaacctagatatagaaacttcactctgagccaaacctctgtgaacagttctgctaaaatagagcttggctattagctccatgtccttggacagtgacttaatctctctgaacctcagtttcagcatctgtaaaatggggattattatacgttctttgtggcattattg

SEQ ID NO: 47575 - DNA, 1030 bp, Homo sapiens
agtggcatgatcatagctcactgccacttcgaattcctgggctcaaggatcttccggcctcagcctttcaagtagctgggaatacaggcatgccccactatgcccagctaattttttaaaaaaacctttgtagctgggcactctctctcacacttgtaatcccagcatcttgggatgctgaggcaggtggatcaccagaggtcaggagttcgagaccagcctggccaacatagcgaaaccccatctctactaaaaatacaaaaattagcctggtgtggtggcacgtgcctatagtcccagctactcaggaggctgaggcaggagaatcacttgaacctgggaggcagaggtttgcagtgagccgagattatgccactacactccagcctgggagacagactgagactcatctcaaaaaaaaaaaaaaaaaaaattgtaacgatggggtctcaccatgttgtccaggctgtccactttctaatctgtaaaatccaggtactaataccactaatgtcataggaatgttatgaagatttactgagctaatgcatggagaatgcatcagctcagagcttgatacagggaaatggctctgtagcagttatcattattattagtactgaaggggagcagatgacactggggtcaggtggctgggcaaatataagtgggccttgctgtgataataatttggtctctccttatcttcttctcttgctttattttcttcatacactttgtgtcactttatctacttaattgtttactgtgtctgtctctctttcactagaatgtgagtgctttgagaggagagaggaagagctttgtcagttttgttcattgctgtattcctaggccctcaaacagagcctagcatgtagtaagtatgcaataatgtaatcattgtttctggaacattgtgccaactgttgttccaggtgccatttatgtattagctaatatactcgtaacaacttttgagatcagtatgttatctctatcttacagatgaggtaactaagtcacagag

SEQ ID NO: 47576 - DNA, 1032 bp, Homo sapiens
agaatcactattttaggtgtttctttttttttttggaattgggttttgttcgatgaaccattctgaaactccttttttcttatttttatttttaattgtaaaatatacataaaatttactctcttaaccatgttttttttttagacagggtcttgctctgtcactcaggctggatttcagtggcatgatctcagctcactgtagccttgacaacctgggctgaagcaatcctcccacctcagcctcctgagtagctgggattacagccacgtgcaccgccacacctggctaacttttaaaattatttgtagagacaaggtcttggctatgttgcccaggctgatctcaaactcctgagctcaggtgattctcctaccttggcctcccaaagtgctgggattacaggcttgagcttctgtgcccagccttaaccattttaagtgtacagttcagtagcatttagtacatttacattgttgtacaaccatcctccagaactctttaccatgcagaactgacgctctatacccattacacaaccccagttcccccttctcagcccccagcaaccaccatttatgaatttataaatttgattaggaacatcatgttaagtggaatcatacaggatttgtctttttgtgactagtttatttcactgaagcatgatgtccttaaagtatatccatattgtagcatgtatcagaatttcctttctaaggctgagtaatctgttgtatatatgaataagtatatataaagctccttttaacagacacttaaattcatttacatttatttataatagtgatatgtttagtagaacccatttactttttctttattttcagtattaacataagtgatttggtgttttagccctaagcagataaaggattagagattagaatgaggaagagggttgcttcacatagacgaagttcagtttttgtggaataaacaaataagtgattatctctgtctgcctctttgtctctctctctctctcttttttttttaataagagatgag

SEQ ID NO: 47577 - DNA, 1021 bp, Homo sapiens
aatatttggggtgtccatgaatcaagaaatacatgaaagtatgggcaccaaaacgttaaaagtggttttgttgggagttcaggggattttactttctccctaatactttattctttgaatatcttgaaatggatattttgtaactgtataaggagaaaggaagcgaaactatttttctgcaggggtacacccacatctattgtattagacaaatcacagagggattgcaacagaacacagatttttctcactgttttttctctggttgatcgggatgcattatccaccagaaaacactgtagacgactcactcaccaggaaaagagcatatgccagttggaataaataaaggggaagagtaaggaagaggctgtagaattattttataaattatcaagtcttatgagccaggtgcagtggtgcatgcctatgtacagtcccagctactcaggaggctgaggtggtaggatagcttgagcccaggagttcgagggtggagtgtgatatgatcgtctgtgaatagccacagcactgcatcctggacaagatagggtctctttaaaaataagacttaactagcactttaataatcattgtttttgttcccaactgcattgtacattcattgaggacagggactttaaacttcattatattgctgttgctgtgtttcacctttgaatgatttttaaataaaaatctcatctttgagtcacaatctgatgtaaccttgtccatttctgtcctcttgtgtgccttaaatgcctttaggcagctgtgttgtaccagtggttttaggacttggcagtcggaagttttgacttctagactggattctgtaactaaagctaaattactttataaaaggagaaaaatggtaccattctgacgggtttgtggtgaagctgaaatgagatagccacataaagaaccatcacaatccctgacacaccgtgcgccctcagtaaatgccaggtgaattttattacactgtgaagtactgattttcaaacaggacttg

SEQ ID NO: 47578 - DNA, 1050 bp, Homo sapiens
gggcatggtggcacacacttgtggtcctagctactcaggaggtggaggtaggaggatcacctgagcccgggagtttgaggctgcagtgagctaggatcacactaccacattccagcctgggcgacagagcaagaccctgtctcaaaagtaaaagcatccttgaacttgcatccaccaacctgccctgttggtaattggacttgttataaggatctaggctcatcacttctataaaaggaggagacaaactgtgagtgcttacctaccaaataccaggctattcatatgtatcttatttcaaatggataataatccttattctatctgttttacagaattgttaggatgataaaatgagatacaaatgtgtacattttattcctttctgtgatacataaaggatatttattcaaagtactattttgcttttatttagatattaacaacttagaatgtgaaattaggaaattaatttatttattttttcctcagtaatgtgtttcccgactaacaatcaaattaactcatacaggcactgtagacataagccaagaagtagagatagtataagtattttaatttggattacttaaatcagttaataactgttaaatttttttgaatttgaagttagtttttgaaaagctgtaactattgggcgcttataatgttctttgtgtattgttaaatgttttatgtatagtccttagtaatttatacagtagctctatgagatcgatagtataacattacctctatggaaactgaggctcagtgtgacaagctcatactattagtagtagaaccagtatctttttttttttttttgagacagagtcttgctctgttgccaggctggagtgcaatggcacaatctcagctcactgcaagctctgcctcccgggttcaagcaattctcttgcctcagcctcccgagtagctgggactacaggcgtgcgccaccatgcccagctaatttttatattttagtagagatgaggtttcactgtgttggccaggatggtctcgatctcttgacctcgtgatcca

SEQ ID NO: 47579 - DNA, 1102 bp, Homo sapiens
cccaggagttcaagaccagcctgggcaacaacagtgcgaccctgtctctttaaaaaataaaaataaaaatggtaagaaaaaaactccaaattacctcgatactcagtggattaaaactatttctcttgattttgtggattgactggttggtttttgccaatcttgcgctcatacagcttcatctggtgggtcgggtggggactggacttgagtaggatggctgggtctccttccatgtagtcgctcgtcttaggcttcttcacagcatggtagtcttaggacaggagtagcagctgtaaggcccttggggctgtgggttagaaattataccacgtggattctcgtgttcaaagcaagtcacaagtccagttcttattcaaagttttgggtaaataggctatatctcttgattggaggtgctgtagagattctctggccgtatttaattttcaacatcagtatagttagatgaatgctgtggtgtagatgagcaaagggtgctatagaacagaggatggaaacctaattcagcttgagggaagggtcaaggaaggcttcttggagttggtaatgctttacgtaagccctttaaataaaagtattatgtgatggtgtggttatagaaaacataaaggtatggccgggcgtgatggctcacacctgtaatcccagcacttggggaggccaaagtgggaggattggttgagctcaggagttgagaccagcctaggcaatatagtgagagcctatctctttatatattaaaaaaaaaaaatacatagaggtatatttcttttttttttaacctagtcatccataagcaggtatttttcgtaataaaatgttttgacaactcatatcaaaatgtgagaactttccataaaagcagaacatgtattttctccatctgactgactatatgttcctctcagttgggaatcttagctcttacccaaagatactctataaatactggttggggatgcattgatgaactagtgtttcttatgcagaaagatcagttacttttttttgcttttgagacggagtctcgctctgctgcccaggctggagtgcagtggcatgatccctgctcactgca

SEQ ID NO: 47580 - DNA, 1046 bp, Homo sapiens
tcaaggatgattgtaattcttaatttggccatggagtgaatggtagtgcaactcattgattaaaaaaggatgcaggagggctgggttcggtggctcatgcctgctaatcccaacagggaggccaaggcgggcagatacttgaggccaggagtttgagaccagcctggccaacatggtgaaacccaccccatctctaccaaaaatacaaaaatcagctgggcgtgatggcgcatgcctgtaatctcagctactcgggaggctgagacatgagaatcgcttgaacccaggaggcagaggttgcagtgagcagagattgcgccactgtactgctcaacctgggcggcagaatgagactgtgtctcaaaaagaaaaaaaaaagcaggaagaggatcagtggcttaagttttggacagaataagtttgatgtatccaactgaaggtctctatccagtagacagttgaggaagggattgtagatagagatttgagattgtttgttgttgggagtagataccatacagtggcacaggagagtctaataacgtgaagttaatgccaaagacagaatcctggatgagcacctttagtagggtacatagaaaaaaaggaacagttgtgttctcaaattgcatcttttgtggaaatcatactttttctgttttattttaggtcagattttttgaggtaaaatttacaccaataaaatgcaaccctcttagttgtacagtcctgagttttaacaaatgtaaagtctcatgtaacgaccagcacagtcaagatggggaatacttttattactcccaaaagtcccctcgtgcatctatttagtcatacctttattccccttccctgataaccagtgatctgatttctgtccctatagttttgtcttttccagaatgccaggtaaatggagtcatacagtatgtagtctttttgtgtatggcttcttttacatagaataatgcttttgagatttgtccatgttattgtgtgtattagtagtttattcctttttattgcttagtagtattccattttataga

SEQ ID NO: 47581 - DNA, 1049 bp, Homo sapiens
tactttttaaagataccttgctttgaaactcaaaagatctatgattaagtatctttttcttcattatatgtttaagcaaagaaggtgataataatctatctgtaaagcccagtgataaatataaaggaaagaatacttactttttttgagttctgtatgtcagatgccatgaaacatgctttacagcaacaaaagagaaaattaaggttatgttttagggggcataggagtgatttttttagctttataaatgctttagtggtttacctgcaaatatcaaatgattttttttttttttttttttgagatgtagtctcgctctgtcacccatgctggagtgtagtggcgcaaacttggctcagtgcaacctctgcctccctggttcaagcgattctcctgcctcagcctcccgaatagctgggactgtaggcatgtgccatcacacccagctaatttttgtatttttaacagagatggggttttaccatattgctcaggctggtctcgaactcctgacctcaagtgatctactcacctcagtctcccaaagttctgggattacaggtgtaagccatagtgcctagactcaaatgatgttttcacatcaagaggcatagaatgatttttttcttttttgttattatttgcaaactaggcacagaaaagaatcagagatttgaggtctttgtttaaaaaaatggttctagtatgtgacaagaaaatgctttgcaaaattaatgaaacatgttggtctacagtgcagttcccaaagataaggacagacagtgctttaaactacgccaaggaattgataagaagattgtcatctatgtgcagcaaacaactaataaagaacttgccattgaaaggtaagcatttttagtaagtttagcttaaatataaattttggcttttatcaatctaatggcatagttttacactgtattaaaaaatgtatttccaaagaattttgttccctaggaaattattttgtttactgaagtcagtgcttcattactttgaaatagctactataaataatcagctaa

SEQ ID NO: 47582 - DNA, 1017 bp, Homo sapiens
gcaacacaaatttattgataactctaatgtgttctcttttctatcagcaagaatttgtttttaaagtggcctaatttaaacgttcttttgtgttatcttttttcttaaatttatgtcagttctttttttgtaggtgttttggtcttctccttagtccaggaaaagatgtacgaaatagtgacatgcacttattagatttggtaagaatttatttttattagaaagttacatactatttcctcagtaaaggttgtttcactttttctcatctgaatctagtgttaaaacatgtttaagaaggtgatcttgtaagctataaagacaacatgcaaaggtaagataatttcctttttcctgactagctatttacaagtctgactttggataagccttggtctgttaactgtgtggtggtgataaaattcttgtttaaatatttgagtacagttgatgtgataatcaaaagagaaaatttattaaagaatgatttatagactgtcgtgtatcttaccaatagtaggagttattagtattattcccattatctgaaaatctttattttcaaaactaaaaattataattcacatgaaagaagaattcaacattggatttaggttgtggattttcttaatgtgtatacaatttgatattcgtaagcatatacatataacttcaggacagttgcataaataattgtcacattttttaccataaatgtaatcattcacatacacttatcctcttccatattcttatatttttgcagcttctggtttttaaaggcagcaagatgggggttaactgttgttcactcactgtggcattcgggtttatttttactctttttttctaggaatctatgggcaaaagttcagatggaaagtcgtatgttattacggggagctggaatccaaaatccccacattttcaagttgtaaatgaagaaactcctaaaggtgatacagattgttgacatcatgaacagaaattttagtctcaagaagagatgcaaaacta

SEQ ID NO: 47583 - DNA, 1102 bp, Homo sapiens
tttagtttgcaattctctggctaccagtaaatttgaatgatttgctcttctatttatgttctttgtacatttatctatgaagtctttttaagataacagtttctaaacactctccatatattatgtttactgatccttttcatatgcattataaatatattttttaatgattttatttatggttttatgccatacaagacatttgcagtttttatgtagaaaattgtgtcttggttaagacctcttctgtctctatattttgtaaatgtggtttccaacattttcttgcaagatttttattctgtgtgttaatttttatgtctttaatccatctggaatttatttttgtatgtggcatgagaaagcagttcgattttactttcttccagatggataaccagttgtgctactcctattttcctactcagtagaactaccatctttgtcatattttaaattctcatatatgctgggattgatttctagattgttctttgtattatttgtttgcatattcctgtccccacactgttttgattaaaaaggctttgtattatttctgatagctgtgaaagcaaatctttgttttctatctcataccttacttgactattctgcaaatttaatctgccataaaaaccttaaaatcttttatccaatctcactaccaccatcaccctataaggttatgtggagattgttatttgaattgcatttaatttacataccagttgaaggtataagtttaacatgtgagaatgcagtatgtctttttatttgttcagatctttcttttctttttttttttttttttgccttcaagaattctgaattgccttcatagggatcttgtagctttattgttaaattggttcctaagaattaacttagcatgttcacactacagcaaatggaatagttttgtcagtttccatttgtaggtgctaactgctacaatagggaaaaagagagtgatttttacattttttctatttgcctcttaatattttgattaattgtcctaactttatatcgtcatcttttgagattttcaggtgtgtaataatatcagcagtaaaaacggttttacctcttttacaat

SEQ ID NO: 47584 - DNA, 1034 bp, Homo sapiens
tatgtagctttgtcaaacaagacaaggtattgagcttgtccctaactttgcctttggaccatttcttctttttggccttgcccccgggtttgttcactgggtctttgtctttcttggctgactttccagtgtctgtcttcttcttgtagtccttgggtggcatcgtgaagctcggagagcagtggcgaacactgcagccttgctaagatgtcagacaaaaagtgaagctcatttttaccaaataataagtggtagttgacactaatgcccagaggtgaagcttaggaatttgaagaactgagataatttatcatctacaagtagttaagtctctgaataggttgggagaaaaagaaatataatttgaacaggtcttttcctttttttgttacatttcatttctcgttctgcttttctttttaagcctgtcattttgttattttaattattttggcttttaaagttgttttaatttcattaggttgaaccatatagaaattggcgtgtttgcaggtcagaaagtatttagctagcaatgaaatggttaagtatcggtaagttcgtaattatattcttgttctgtaagaggttttaactgacattttgggagtccattttgagttagattgagtaccaaagactgtctgaaggaatgttgctctgatggcataagaacaagtggaacagagccccatgaagtagacaacttcaacccagcatcattctatcttgctaaatcaatatggttctgagagtatatagaaattggaaaattcagaaaatatagaaagctataaagaagaaagattttttaatgaatgttatcccaccatccaataatagtgttgatttttaatgtatttccttttagtcatatatatatagaaagttactcagccttcaaagtaaatatagagagaatatatcatgagactgcattattttattttttattgtattttttaatcagcatataacatacatacttatgaggtatataaggatgttttgatacatatagtatatactgatca

SEQ ID NO: 47585 - DNA, 1035 bp, Homo sapiens
acatttatgtttaactccttagaaataaaaggaatatggccgggtgtggtagcttacagctgtaatcccaacactttgggaggtcaaggcgtgcgcatcacctgaggtcagttgaaaaccagcctgaccaacgtggagaaaacccgtctctactaaaaatacaaaaattagccaggcgtggtggcacatgcctgtaatcccagctacttgggaggctgaggcaggagaatcgcttgaatcagggaggcggaggttgcggtgagccaagattgctccattgtactccagcctgggcgacaagagcgaaacaagaaagaaaaggaatatatattgttgtataaagcttaattttgtaagcacttgctttgactattttgaaaagctctttgctttttttctcttaggggatcatccataatgttgctgtgttttattttcagaaccttttcaaatttaatgtcattctgataggaacttactaaactcatcattattagaatttctgcatcacttttgcatgatgtggcctccagcaagtcaaatgaatttattccaagttcttcagcatatttccttaaggccaaatattttaagcaaatgattcacatggaactcctcaatttattatcattcttgaaggcatcaaaaattgagtgtgaattttcaaaatgaccttcttttaagggcattttgccccttcattctctgataattccatgattaatggatatgggatggcaaattgacaagaactggcccagttatagagagtactttcagttttttgttattttttacgtcctgtgtacagttgaatttctaaatctcgtctcctctctctctcttttttttaattgagacaggtctcgctgtgtcgcccaggctggagtgcagtgccacgatgttggctcactatagcctctgcttcactggctcaagcgattctcatgcctcagccttccaagtagctgggattacaggcacctgccaccatgcctggctaatttttgtatttgtagtcagagacagggtttc

SEQ ID NO: 47586 - DNA, 1028 bp, Homo sapiens
aacaaagtagctcaactagtgtgtgtaaactgatataacacatctcaggggagtatggaactatgtgtagctattaggggtttaatgctcacacagacatagtggatatgattttgggcctttaggaggcagctgaaaaagtgaggcctttgcataaagttaagacctctgaatggctcccctatctgttaaaggaggaatacaaaaactacctattagcctgagaaacagtagaaatcataatataaaatgaatagtggattagaaaaaaaaaaggaaatagaacttctggtaattaaaataatcatcagagtttacattctatttaaaatgttacatacttcataggtattacggctaacagttaatgatagtttaccatgtgcttggtactatggttaagtgcttttatatgtggggattagcgacgatatcgtatgtacagtgtttaacatagtgcctggtagttagtaagggtccaagaaatgatggctacgactataattatttcctccctgatcgttaagtagataacaaacattttacagtaatattttcaaagaaaataggtttgcacaaagcatagatagaaccaagtgagttctgagattctttgagtcactcttcccacctcagcctggttcagcacacaagaggatgctgcctcttttttgttcatgatttctttgcctccaaaatcccctttctcagtgtccccatctcaattaggggtacctggttgctcaggccaaaaaccttgctgtcctcttgactcctctctttctcacactccacatctatgctcgtcgtcagaatatatcctgactctgatcaccgccaccttcattattaacatcctaatctaaccatcatcatcctttcctgtttccacagtggctccctccctggctcttctctatcgcatgtctcctttgctgaaaactcacgtttccaccatccagaggcatcctgcattcaattttgctccttttctttccaaatgttttttatgcattcttaaataattg

SEQ ID NO: 47587 - DNA, 1043 bp, Homo sapiens
ggccttggggtacacaccctccttccctggggccgccagcacctcctctgccctatcccggatggggcctgggggtctgcccagggtgcgaaactggaatctatgctgaaacacctaagtgcccaggaggtgcccccatggcccaggagtgacacggctcccccagcagccagagcccattcctgagccagacaggtcacggttgacccaggaagagccatgtgccaggatggccgccaagcctcactgagcatgtgcagcagtggcagcctctcagacatagagggggctccctgggtgacatctccagagacccccttgtcccccagacacccctgggtagactgtgtctgacccttcacaaataggaaatgagagctcgggtcgaaatgctcacaatttcctgcgtgtctcagatggttgttttcttaaatggtcgggccatactttaacttggtttatggaaatgaatccatttcaagattcatcaaatcaataaggtaaaaaggaaaaagaaagataataaacattcaatctaactttggtgacgttggcctcaggaatttctgtgctggcctggagctctgggcaggtggggagggactggcttctagccctcctcctgcttccccgaggcagagaccaagtttgtcctttctacctggccctggagaaggggctcagggccactgcctcgttccaacccaggaaggccagctgccttccacatcagtctgaggcattcagcttgacctttttgggttgaaatctgggttgcagcttctcagctttgcccacaaagctccagatgacaagaggctgagccccagctttgacagtgaggggagtacctggaggtatcagcgtgccagagctggatgagggctgggggctcctcccaaaatactcagatgggggtttccattttccttctataaatcaaagttgctggtgctcgcagcccccgtgcagggtggctggggctgtgtatcacaaggcagcccaagaccccctggtccccagatcctcccaggtcagaatca

SEQ ID NO: 47588 - DNA, 1052 bp, Homo sapiens
aagacaatgaacaagactggctgggcgtggtggctcacgcctgtaattccagcactttgggaggcggaggcgggtggatcacctgaggtcaggagttcaagaccagcctcaccaacatggtgaaacccgtctctactaaaaacacaaaaattagctgggcatggtggcatgtgcctgtaatcccagctacttgggaggctgaggcaggaggaggatcgcttgagcccaggaggtggaggttgcagtgagccaaggttgcaccactgtactccagccagggtgacagagcaagactctgtctcaaaaaaaaaaaaaaaagacattgaacaagaccccactggaacatccacccagagggcatgtggagcaaggtgtgggataaacaattgacaaggtgccaagattaatctctgtgtttttcttttaaatgattctaagctcaaataggtttgggaaaggctcaaggttgactgtgtctttctcttggagatcagagcatgttagcattaatacaggcactgagaaatctggaagagactcaactttgtctaatctaacatttcccaaattttatttggccatataattcttatttaactcttgtaaagaaataaaatggtagacgtgctaggtaggaaaaatgcaagggtacaattagagcacagagacctgacctgctgaaggaggtagtcagggaaggcttccctgaggaggaggtgtggtttatatcagggcaagtcacttcattactttgaacctccatttccctacctgtaaagtggtctttttcctgcctgtctaccacccaggtgggtgataagtgtccaatctagtcctagatggcctaagctgtatggagtttcacagacaatttggcctaaacctctcagttcaaaggaaaggaaatcaagactcagagaggtggagtgactttcccaagaaccacagcaaagtggttctaggcctggggctagaaccaagggtttctgatttccagttcagtgcttattacttttggttctttaaagaaaacttctttaaaagtttacaaa

SEQ ID NO: 47589 - DNA, 1048 bp, Homo sapiens
cctggggggctgaccctagacttgcctgtgtatgtgggggcctctctgcctgccctgctaagtagacggatcttttgatttatttatacctctcctaggctccaagtgtgaatcccaggacagtaacaaattgatcacagcgggcttgggacaccagcttccgaggtctgtccttgcagttttgactgacaggcttttgtgtgtgtgcgtgctctctaactgttgaaaatctttgcagctgaaagtcttaattgctttaaggcaaactttagaaattccagagctccctagttggtctgacttttccaaattcagcttgccttttttgggggaaaatgtcgccttagtttggtgtacagtacgtgcaggcaggtcttggaggcacgtttaaaaaccctgtcgttaatggaagaagaatttcattgaaagggacgcagagccgtctggaagcgcctgccccggactcagcgagtttggactcagcgagtttgagcttaccgaatgaactttggacgtcttcttttagcaaacaaaacctggaaggaagcaaaaaagacccacattctttttcttttttctcctgaaaatgaaaaaaagaaaacaccttctgggtttgctggaaatgccccctctccttcccccatcaaggccaagccctcgctgcgtcccccacccccaaataaaatatgcctgtggggagccgtggaatgagtcactccctggcagagagcctgacgggcaaacatttgggaaggttcttgcctaacttcccagaagaaaaggcccaggatttaaaatggtccctgtggtttgtcagcctctgctgtcccgtctgcttcggaaatgactaaaaagtagtttgtatctccacaaaataaagtctcagactgaaggccttagacccaggttggtctggatttagagctgtttgggtttccagaaatggagcgcctggctttaactggtggcatttctggtgggtttgaacaagggcagaggagggaaatggggaggaagttcccttttgcggagcagaaggggctgtgtg

SEQ ID NO: 47590 - DNA, 1058 bp, Homo sapiens
gtaaggggccttgggcaagtcgtggccactcctgagcccccatctcctcatctcaaaaatgaacatcattcccactcttcccacctttcaaggttgtcatgcggctccctatgatagtgtggacaaaagtcactctgtagaccatcaagaactgaccaggccagatgcggtggctcatgcctgtaatcccaacactttgggaggctgaggtgggtggatcacctgaggtcaggagtttgaaactagcctggccaacatggtgaaaccccatctttactaaaaatagaaagatttgctgggtgtagtggcatgcaggtataaccctggatacttgggagggtgaggcaggagaatctcttgaacctgggaggtggaggttacagtgagccaagattgcaccattgcactccagcctaggtgacagagtgacactgtctcaaaaaagaaaaaaaaaccgcccagaagaaatgtgtcatttcaccctctggaaccatgagccctgtgatcatgaggcacaatcgtcatgtaaatatatagggtctctcaccagccacgggccaagatttattttatggagacagtgggggagggggccagctcagtttcattgtcctggtaactttgtaaaatgctttgccatcacttcccagctcctgggaggatgcagcaggagctgtgcagcctctctcgccctcccaaaaggcggatccccagaggccctggacacctccttccaggtccacaggcccaaaggcctggtgtccataaggctggggttccctggaaagtgggtttctggaaatacttgttgcagggatatcgctgttgcgtgagggctggttgtttatgataacaggaatcataacagtggcagtacccacattgattgattgattgattgagacagagtctcactccatcacccaggctggagtgcagtggcgcgacctcaattcactgcaacctctgcctcctgggttcaagtgattctcctgaatcaagtgattcagtgctcagcctcctgagcagctgggattacaggtacccgcccccacacc

SEQ ID NO: 47591 - DNA, 1069 bp, Homo sapiens
ctgaggcctgcacggagctgagcaagtccctgccagcaggacaagctcccagaaccaagggcctgcacccaccaggttctagaatggtgacagtgccaagctaaagcccaggacctgtatctccaagacccaggggaaagaccccttccaccaagaggttctgcaaacagctaagtcttgcacacacgtttggttgggcaagagattgaactaattaccattgcatcgtgactcaggaggggcacaggggccagggacacttcacgccctgtgcgtggggatgaattatgcatctgccgcatctcatgtgcacctactatgtggggatgctgtggtggcagccacgttgccccagcaaccacctcatctcctaaggctgctgacccaagagctgggcttatgcaaatctggtctcctcccacttcccccctccctgggccccctccccgcctctgtatttgctaacacgaggctggcatgaaagggcattagtcagtgccatggtcgggctgacaggtgcggtacccagcggtggcagagtggctgcctcggtgtcagaaataggagccgtaattagagcgcggaacagaatgagcgtcagacgaattaccaggcagcagatcatatttgtcaggaaggattgcatacataaaaattaagtgacagtacacgccggcgtaatgcaggaaaaatgaaagatttgcctatacacagctcacaagctacaagcaagtgtctcgctccgagcaacggcagcagctgcaagacaaatcacggggctgggagagcgggcgggcaggcctggctcctcggctgtagtgacaggacagtctcggtgacaggcagccacgggtgacagggcaggaagggcggctggtcacacccaggcccatgcagggcccgtgctgcctcttgggggctgggagagcaagtctagttgggggtgaccccatcaggtactcgaggtcacggccctgctgggtctcccagggcttagcctggcgctgaggcgcaaaccccttccttcttcttccttgagcaaactgcctggccctgggctgtgtgctgg

SEQ ID NO: 47592 - DNA, 1029 bp, Homo sapiens
aacagccccggggagggtgcgtgcctgttattttgcggagaagacgttaaatccaggtggggaaagccccgggtgtggagagttgttgagtggcgcagagccactgtgctgctggtgtgtgtcccccaggaggagtcgtgagttccagtctctccaggactcctctaaatccaggcaggtggccactctggccaccaaggtcgctgaggctagcagtagagtcacgcccatgtcacctgctaacccggctgtccctgggctcagggctccagcgtcaccgccctgcccccacttgccctaaggtctgaggaggggatgcaaacccacctgtaagtgggcatcgttcacccggtgtcagatcctgaggggaagagacaggcgttctaggtctcccaaggcccaggctaatgcccgcagcatagtggatggtcggggagcacaattttgaattagagcacgtgtctgtgtgtaggcagctcacttaccaactcactttcatccaaatcccagctccagggcccacccacggaaggatccaggcaagtcagcccctcccgggtgggcctcaggtgtcccatatgtagaatgagtggccagcccaccttgtcatagtgaggaaggaatgaggccctaggggtgaggtgcccgagtcagagaaggccctcgggcctgtccaccagctgcaggccaagcacgggcacttctgcccgcctccggcacgaggctcctgcagcttgccacatttccctttttgctttggccagcgggaagccaaagtgcagcccagcctcagtctccgaggaggctccactttgtcctcctttcctcatgtgtcttgtccctgggtcagatggcttttcgtttctttttccattctgctttgtgtttttgtaagctgcttcctgtctcccatgaaccatgggctctccacacataaacacacacacagcatatgaacacacacacaggctggccaggctgacagagctgtgcccacttccctggggctggggccgggaggccagcagc

SEQ ID NO: 47593 - DNA, 1027 bp, Homo sapiens
agagctagggctggctgtggagccaggcgcttccctcccaccctgaaggttccctccaacatgctgctgcgcacctctatccaggggcaggaggctgcctccctccctcctgaaccccctgctccccctgccctgataccggcagctggcttccacaggcagcagctctgcgaggggctggcaagaacagccacagtgaaatgcctcacccttctccggcccaccccaccccaaaatgtcagtccataggtaaggaaagctctctgaacatgtggggcacagagacctgcccctgcaggcatcttggaaaaatcgcgttttatggaaataagaccatgcactcggcaacctgccacatggagcctgggtcccccgggctgaggtgggagcaaggtgggaattagcttgcagcgtccagctgcccttctttattgccttgaaagttttgtcaccgaaaccctcgtgcccacttaatccagtgacagaatcagggtagtgttgcgcctgctcctctgttgaaccccagcatgctcggtgattcgggggagaagtcctgctggactcgccgcggtcgggaccagagagaacccatgccccaacaatctggagcagcctcctcctctctagtccttctgagccttgaggccgaaagcttatcttcgttgttcccgtcccttgcagatggcagccctccagagccccttctatggagataagatgaatctcttctccctgtgccagaagatcgagcagtgtgactaccccccactccccggggagcactactccgagaaggtgagtttgcaggagccggaggcctcgccagccccaggaggccaccgaggcttatgagggccgctccaaaacaccacagctgtggggctgaggttaggctcactttacacggtgcagaaagggagctttctggaaaagtgacttggagaggggaaagtaggtgattgcactgaagaaggggtttcaccacgcagctccagtgtgggacccccaggtaggaaccagtggcacg

SEQ ID NO: 47594 - DNA, 1050 bp, Homo sapiens
acaggatggtcaagcagccggacaatcacgagacactgcaaacgagctgctcctctgacacatgctagccaccaggtttggaaacctcccagttctgctcagcaaatcaactagaaccttctcccactgctctgagtctgcgctgcaccactgagccgaggggcccactcggcatgtaggctcaggctcaatggcacaactccctgtagcacagcacacacacactagctcccaaggccacctctgggaggctgttagcattgctgacttacacccagttaggaatctcggggcactctgagggaaagtgctggggctgccctgaaaaatgcaccttctcccagaaatcaggggattctttaagacacttgagaaaggacagcagatgatccaaacctctccggccccacctcccagcctagggctctttcctgggccaccctccacctctcccatcaaattaaatcactttcctacacctgacagcagcccactgtcataaagcaagtaacaagccgaaggtctgtgtgggaggttgatttgggaacactggatgtacttaatgtggaaagaaccaggaaaactccatccagatgccatggagataccaagggtggccacgacgccaggggacccaggaagaacttcgtctccttcactcacctggtccccttcttgttgggcactgtgtatgggcggagaaaatccagcttgttcttgctgatgacgcagaggtcaatgttgcttccggagcccaggtcgttgaagatgccagctgcgatggcttcgctcaccagattcttggcttcctcctcctgagaaacagaacggcggcaataatgtccccggccaaactagggcctgctctgacatccgcaatgtacgtccactagcagtgcgcaagacctcccgcgagacaggtgttgtttttaatgcccatctcacagatgaggaaaagatctcaaagtaccttgattatttacccaaagttcccgacccaggcctttaaaactttttatgcatgcaccgcctcttgaccacatcagacaa

SEQ ID NO: 47595 - DNA, 1050 bp, Homo sapiens
agtggctgatatcaggctggccttgtttggatggggaaaaggaactccagaactgaaagacagagggactggactgcctcttgagtgtggaaggtggatcagagccaagcagggagctggggaaccagcgctgggagtggcttgcctggtggcgcagacccagctcactcaagatggatctcatactggggaagccaggagattcagctctgctccgaaggcccttcctgtctgcacgtgggtatcactgcatgaagaggagtagagacccgattgggcagaagccattccttgttctatttttgaagctttttggctgaagccagtgtttcatacgaggaaatgaaagttggctgatgtaattcagtttaaaataggtgtcacctttggggacctaacccagattgtaattttcttttgcatgctgggtattcagaactcagcaaagaatgtgttgtcaggattgcaactgaggttggggggtaagggtggagactggctcattgttggcaaaagcttctgttagattgataaactctttccaggtaacagttgggacctcattgatcccgatagatcttagaagttctagcacatcttaatttccttaatagtttaattgatgaagagcattgatgaagagttaggaggtctccctttgtacctacattttccgcttttttagaatgagaagatgagaacgacctccagttcacatgtacgggtgctgtgaggatccagtaggggagatacagtgctcagcaccaagcaggtgcaagtgagcacaatccaattttacatcaagttacccctccaggacagttgctttgacgtggaaggtagagagggagttgaaaggagggtttgcatggttggcagaggtgccctgcagcctccctgtgcaggctgtaaaccgtctctgcccccctggaagccgtggaaggtgggtggtatggatgagatcccatctgactctgttcctgagctgtttctgaagtgagcttgttcatgacggcatggatgtgcttgagcctagctatccttaactgg

SEQ ID NO: 47596 - DNA, 1077 bp, Homo sapiens
ggttcttagaaatagagtcctccagccagctctaagggcttcctgccctggcctcagccttagcaggccagagtgagcagtgggcagaaaccttgacctcacttaatatggccttcgtccaggtgaagcagaaagagctgtgtctgcccttcgcttgggtccgtgtgagagcaaggcctttggcaagcctgtgtcgtgcctgtaccactggggctgcctcccacaccctcccctgcacacccctagtgccgcagtaagcacgcccaccattaaagcagaccaggagttactaacctgcctgccttcctcagaggctcagtgttgagttggaagagaggggttttacagtgggccagtccttaaggtggtgtgggtgctgggctgtggttgtggccttaggtctgctggcgggtgtgctgcacctccttggcctcccctctcctgggctcaaggaagtaaacaagtcctctgtatgatggggaggccaggacctctcgtccctttaaggcagcttggtgcctgccagtcacctcagcgggcggcagtcagtgggcttgtgtgcatctgtaaactcagcactttgggaggctgaggcaggaggattgctggagcccaggagttcaagaacagcccaggcaatgtagtgagaacccatctctacaaaaaaataaactaggctgggtgcggtgggctcacgcctgtaatcccagcattttgggagacggaggcaggcggatgacctgaggtcaggagctcaagaccagcctgggcaacatggtgaaaccccgtctctactaaaaatacaaaaattagccgggggtggtggcgggcgcctgtaatcccagctgctcgggaggctgaggcaggagaagcgcttgaactggggaggcagggttgcagtgagccgagatcgtgccattgcactccagcctgggtgacaagagcgaaactccgtctcaaaaaaaataaattagccgggcctggtggtgcacacctgtggtcccagctactcaggaggatggcttcaacccaggacatcaaggctgtgcagtgagctgtgatctgggcaacagagtg

SEQ ID NO: 47597 - DNA, 1025 bp, Homo sapiens
gagtagatcagctgccgcaggcatctgagttccccaaacggacgcccgaacccggcattgcgcaaatcgtttccaagtagccccggcttatttatcccgtccgggagggagggacccagggaaggcccaccccacttggttcccgagaaatgcagagcctggcgtccactcccggtctgggggacccctccaccgccagcccaggaagtcagcgccgggccctcggggcggagcagggaagagggagcggttggcccggacgctcttccgggtcctgggaggagggcccggacctaagccccgcccctccggggtggagtcacggctcgcgactggcctaagtcgccgcaggtattgcagtccggggctggagggtaggggcgagggtccccggataccgggtctatcacggtctcgggcagggagtctgaatcttttaggggagtgggcccaagccgggtgcaaagaacggggaagggccttccctggctccgtcccggccactttgaccgaatcagcctgttctttcccgaccccgtctcctatcccctagaactgccacgtggggatgagatttgctgggctggtagcggcggctgctgcgggaggtcccgcccacgtgaagccagcctaactgagctctggactttggggacagctgtcagtggcctaggccgcaggtgagatttatccattcatctctcaatctattttctttcttcattcactagccactcccccacttctactccatgccaggtccattggtaggttctcggaatggatctgacaggcccagccctctaggaacttagtctagtggaatttaatctagaatctagtctagaagccttaaatagataaacattccaaatgattcctgcaatggtgatggctaataccttcagagcccagtgggtggaagaaggaagtaacttggatgtgggtggaagagaaaagggcaaatcagggaaggtttcaccagggaagggacttttgaactgggctttgaaggttaactagga

SEQ ID NO: 47598 - DNA, 1031 bp, Homo sapiens
tggtggtgcatgcctgtagtcccagctgctgaggagggcgaggcaggaggatcgcttgaaccctggaggcagaggttgcaatgtgccgagatcatgccacagcctgagcaatgagtgagactctctctcaaaaaagcattttttgacctggacatttttcacatgtcagccaactcttgctcagttccctctatcaacaatatatttggggtgttgcccacctactacatttgttgagtattgcccgataaaaaaattaaaattaaaaaaaaaaactattgtacaatagttggtcagagttcaggaactaggaccaaattttcttatatgtcaagtatttaaattccttcagcacatttagacagtatgttatcttttaatttgatttatttgtttgggtatttatttcctgtcttccctcctcttccatgccctccctctgtggaacataagcgctttgaagggaagagtttgtttattgttgaatactcagggtacagaacactgtccgaaataaagtagacacggccgggcatggtggctcatgcctataatcccaacactttgggaggacgaggagggcggatcaaaaggtcaggagttccagaccagcctggccaacatactgaaagcccgtctctactaaaaatacaaaagaaaaaattagctgggcttggtggcaggtgcctgtggtcccagctacttgggaggctgaggcaggagaatcgcttgaacctgggaggtggaggttgcagtgagccgagatcgcgccactgcactccagcctgggtgacagagtgagacaccgtctcaaaaaaaaaaaaaaaagaagaaagtgatagagtagacacttggcagaccatttggctaattgtgaagccaatttgcttggaggactagcagtataatatggtgcttaagggcacagatgagggtctctgttttgctatgcactaactatgaccttggactagtgatttaacctctctctgcctctgttttctgtcacattggatagtaatagtttctac

SEQ ID NO: 47599 - DNA, 1033 bp, Homo sapiens
ggtgaaacctcatctctacacaaaatacaaacattagctggatgcggtagtacatgcttgtagtcccagctgcttgggaggctgaagtgggaagattgcttgagcttgggacatcaaggctgcagtgagccattatcatgccacagtactccagcctgggtgacagagcaagatgctgtctggaaaaaaaaaaacaacaaaactcacattaaaattatttgattgataaaatgcaagggataacattatagcaggtcattttaaaaatggcagtcatggctgggcacagtgactcatgcctgtaatcctagcactttgggaggcccaggagggcagatcatctgaggtcaggagtttgagaccagcctggccaatatggtgaaaccccgtatctactgaaaatacagaaattagccaggtgtggtggtgggtgcctgtaatcccagctactcaagaggctgaagcagggtaatcactggaacctgggaggcagaggctgcagtgagccgagatcacaccactgcactcgtctgggagacagaacaagactccatcttaaaaaaaaaaaaaaaagacagtcatgtactcttttgccctattacattaatgtgaatattacataaatactatgaggaaggccggccgcaatggctcacgcctgtaatcgcagcaccttgggaagctgaggcaggtggatcacttgaggtcaggagtttgagaacagcctggccaaatggtgaaaccctgtctctacaaaaatacaaaaaaattatctgggtgtggtggcacacgcctgtaatcccagctactatggaggctgagacaggagaatcacttgaacccaggaggcggaggttgcagtgagccgagatcgtgccattgtactccagcctaggcgacagagtgagacttcatctcaaaaaaaaaaaaaaaaattaaaaatcaaaaataaaaaaaaaacactgaggaaaagtatgtgcacaataaaaaaaaatagttctgccaaagtgtaggcatcggtatataaaaatct

SEQ ID NO: 47600 - DNA, 1165 bp, Homo sapiens
ggacccatagtgtgaaggatatgggagagaaaacagccttacctaagaggtctatagaggaagccatgttcccatgggaaagccagattttagttaaggcaggaaggtaaagagaacctctccagaaaaggttcaagttacagattttctgataattgaacttgtgttccaggagccactgtgaaaaggattgaagaggtaaggaggagcaggaggtgagataggaagaggtgatgtacaaagctatccaggtgccaggcacggtgactcacacctgttatcccagcactttaggaggctgaggtgggaggattgcttgagcccaagagtttgagacctgagcaacatggtgagactctgtctccacaaaaagcaaattttaaaaattagctggctgtagtgtcatataactacagctactcgggaggcggaggtgagaggattgcttgagtctgggagatagaggctgcagtgagccatgataccgccactgcactccgcttggatgacagcaagaccctgtctcagcaaacaaaacaaaaccataagacaacaacaacaaaagaaacacaaagctgtttagagatttggttttgcaggataaaggatgacctggaagttctgactttattatgattgacatgaacagaaataaagggcagactaaactaagacttggtggtccagggtagatttttttttttttagacactcttgccctgtcacccaggctggagtgcagtgttgtgatctcagctcactgcaacctctgcctctcgggttcaagtgattttcttgcctcagcctcctgagtagctgggattacaggtgtgcaccaccaagcccggctaatttttgtatttttactagagggatttcaccatgttggccaggcaggtcttgaactcctgacctcaagtgatctgcctgccttggcctcccaaagtgctaggattacaggcgtgaaccaccacgcccggctggtccagggtagattttgatggggttggcagtaagggctgagggaatggagaggagaagatcttcttgccaaatacatgcaggattttctggggcttccatttggcttctgatactggaagtatggagtattaattaaggggagtcttaattgagcacacaggctctcctgacttctgcagat

SEQ ID NO: 47601 - DNA, 1028 bp, Homo sapiens
tgcgcgccaccacacctggctaattttggtatttttcatagagacaaggttttgccctgttgccccaagtggttttgaacttccgagctcaagcagtccacccaccttggcctcccaaagtgctgggattgcaggcatgcactaccacacccagctccaagatcttagactatatcagtacaaaaagagtttaatttttttaggttgggtgcagtggctcatgctggtaatcctagtgctgagcgcactttgggaagctgaggtggacggatcacttgaactcagaagtttgagaccagtctgggcaacatggtgaaaccccatctctacaaaaaatacaaaaattaggtcaggcggggtggctcacatttgtatttttggcactttgggaggccgaggcgggtggatcacctgaggtcaggagttcaagaccagcctgtccaacatggcaaaaccccatctctactaaatatacaaaaattagccgggcatggtcgtggcacctataatcccagctactcgggaggctgaggcaggagaatcacagtgggggaggaggtgtgcagaggttgcagtgagctgagatggtgctatttcattccagcctgggtaaaagagtgaaactttgtctcaaaaaaaaaaaaaaaaattcaacatcttaaaaaaatatgatttttaagatgtttaaattttttcatgcttgtccaccttaatgagaaatttcgttccagtattttaaagggaaatgtttcactgtttttttcctgttttaacagagctgtgttgccgctttccttgatgttgtgattgggggccgtgcagtggagacccctccattgtcttccgtcaatcttctggaaggattgagcagaactgtggtttatataacctacagtcagcttattactctggtaatggcttcattgtttaagagaatttctcgaaagtcttttagctaagcgtgagcaaaaacatacatgagtacattgtgtgggaaatacatattgtatttgaaaaagtgatttcat

SEQ ID NO: 47602 - DNA, 1071 bp, Homo sapiens
caggagaatcgcttgaacctgggaggcggaggttgcagtgagccaagattgcgccattgcactctagcctgggcaatacagcgagactctgtctcaaaaaaaaaaaaagaaaacgtccttgatggccgggcggtggctcacgcctgtaatcccagcactctgggaggctgaggtgggtggatcacctgaagttgggagtttgagaccagcctgagcaacatggagaaaccctgtctctactaaaaatacaaaattagccaggcctggtggcacatgcctgtaatcccagttactcgggaggctgaggtaggagaatcgcttgaacttgggatgtagaggttatggtgagctgagattgtgctgttgtactccagccagggcaacaagagcgaaactctgtctcaaaaaaaaaaaaaaaaagaaaagaaagaaaagaaagaaaatggccttgatgaagcacagacattggacttactcaagactttaaatcaattttttttttaatatacttaaagagctatggaaaccacggacaaagaactaaagaaaaccaagagaacaaggtctcaccaaatagaagatatcaataaaggggtagaaattacagaaggaaccatatagaaattctggagttgaaaagtataataactggaatgaaaaatacactagaggggttcaacagcagatttgtacaggcagaaaaatcagtgaacttgaagatggatcaattgagattatctagtctcaggagcagaaagattacaaaagacaaagacattatatgttgataaatagtcattaagaagatacacccagcactttgggaggccgctctcactgcagcctccgcctcccctgttcaagtgattctcctgcctcagcttccctagtagctgggaccacaggcatatgccactatgcccagctaatttttgtatttttagtagagacagggtttcactttatgttggccaggttgctctcaaactcctgacctcaggtgatctgcccacctcagcctcccaaagtgttgggattagaggcgtgagccactgtggccagctaaagttt

SEQ ID NO: 47603 - DNA, 1532 bp, Homo sapiens
acttggaatttcttagcttttaaacttttcagcctcctttcacttagaaatgttggcacaccagttaacttccgagtagtgcagtatgttatatgtcacactactgactttatttaatttccagctcctataccatttagaaagaaagaaaaacaagaaaaagacaaagatgatctggggcctgacagattctcaacactcacaggtttgtagacccatggacttcctggctccttcattcccagagcacatatttcataacactttttcttgggtgccataagcgttgcctttctagaagagtgtgtctgtgtgtacagtggggagtatgttcttcatagctctgtggtttccagttggtggccacagtaaacctgtgtgctcttcctgcagactgccaccaccatcatcatcctcattatcataactccgtttatgatgaggcccctgatcctgagcctctaggcataccctacaactcaacatctagtgggatgatgacacacagtgccttttaggaaagtgtggtgacagttttggtgctgtgcatgctgtatctttggatcattgattgaatagttttctctaacattgatcgtagaattctacatttattttcatctacagtttgttcttgattattcaggatcacagtgaaattctgttttacctaatcgtttccttttttgtgataaagtgtttgttcaaacagtatcataaatgccaaccattataatgaaagttttaaaaactttactaattttttacagcttgaaccattttaacattgccatctgacccaaggaaaatacagctgggggttgggtttttacctgattaagcgtttgtatttctgcagctgctttttggcacattatgaatgagcaccctaaaaggacagtttgagagtagtgttaatgacccagtcttgggtttgatagctgtgtattgtttccagtggctattatagagcatcttgagcaagtttgttcaacccacggaccgcagaccacaggcagcccaagacagcaggacagcttcgaatgcagcccaacacaagttcataaacttaaaacagtatgagatttatgcaggaaccctttttttttttttttaagctcatcagctatcattagtgttagtgtattttatgtgtggcccaagacaattcttcttcttccagtgtggcccagggaagctaaaagattgaacacccctggtctagaggaaagttcatttctcacctcttttttttgattttgaattgttttcctactaagttaaagtgaaaatttttttcattaaacaattttatttaaaaatgggatagataataggataagaacatcctcatcaaagagttcagcattacaggtagaatcccattttaatgcctattattctaatggttggttccatatatttatatgtatttccatatcctagcatataagtccttgctttatttgaaatggtgatttccccagaataaagggttttgaacagcaggagatgtgcttacaggccacagt

SEQ ID NO: 47604 - DNA, 1033 bp, Homo sapiens
ccagccaagatttgttcttaccttaggattttcgaaagaaaggatgggaggactagattcctagatgaacattttcagctaaaaagcagtgcctaggttgggcgcggtggctcacgcttgtaatcccagcactttgggaggccgaggagggtggatcacgaggtcaggaattcaagactagcttggccaagatggtgaaacctcatctctactaaaaatacaaaaattacaggctcctgtaatcgcagctacttggaaggttgaggcaggagaatcacttgaacctgggcagcagagcttgtagtgagccgagatcacactgctgcactccagcctgggcaacagagtgagactccatcttaaaaaaaaaaaaagcagtgcctgaagttcttagttggggctcagtatataattattggatgaatggatgagggcaggttctttatattatacttttaccatcttctttaatatggaattccttgcagtacttgtcatataggctaccaaacttaccaatctccttcctcttttagcttcttattttgtaattgtagtataaaagtactgacatctctagttcttgttgactttaaaattaaagtttcatcatttaaatggtttattttgaacattttgagggtgaccatgtagtttgggtgcacacagccactaagtgatcgtatcacttgtgtgttgcagtcagctcagcccagctgttgctgtctaaagtgtgtgtgacatatgtcttactatttcttagtgttgtgatatttctacaacctgaacacttagcttggagggagaaacccatggggttggtcgtcacagctcctcctgttggccatcgctcttctggcttccacatgtgataaatctagttcctgtgtagagccagtttaagctagttttaaggaaaaggccctagctcttcctcttaaccatttaacagcctgtgccctttctcaccacatgaaaaaggtaaaaaaaattcaggagatgtcctctgttacctctggcaacagagggcatg

SEQ ID NO: 47605 - DNA, 1049 bp, Homo sapiens
tcagggagaagcctccagcgagtcattcctttgcttattgcctttatgaagctctcacccccaggcatgctctgtgctcacaatggcagccattgctgcgaatcctttttttttttttttttttttgagagagtcttactctgtcccccaggctggagtgcagtggtgcaatctcagctcaccgcaacctccgcctcccaggttcaagtgattctcctgcctcagcctcccaagtagctgggattacaggcgcccacaaccatgcttggctaatttttgtattcttagtagagatggggtttcgccatgttggccaggctggtctcgaacccctgacctcaggtgattcacttgcctcggcctcccaaagtgctgggattacaggcgtgagtcaccgtgcctggccctcgaatactcttacttttcctgaaagggaagagggcagctgtcccaggccccaggcctcactctcataagcagtaggatatggtggtcatgaaggcagactctggcgccatggtgcctgggctcaaatcccagctctaccacttactagtggtggatcttggacaagtgacttaacctctcttggcctcagtttccccatttgtaaaatggggataataacaataatacctacctcatagggttgttgtgaaggttaaataaatatttgtaaagaacatagagccgtgcccagaacatagtatgccctgtatcagtatttgttttttaaaaaaaatacacacacacagtgcacatgcatatataatcattatgaaaatatttgagaggcaggcagagtggctcatgcctgtaatcccaccactttgggaggctgaggtgggtggatcgcctgaggtcaggagtccgagaccagcctgatcaacatggagaaaccccgtctctactaaaaatacaaaattagccgggcgtggtggcacatgcctgtaatcccagctactcaggaggctgaggcaggagaatcgcttgaacccaggaggcggaggttgcggtgagccgagatcgtgccgttgcactccagcctg

SEQ ID NO: 47606 - DNA, 1010 bp, Homo sapiens
ggagcaagttgcgcggggccgcccggcggggcgcgcggcggcgaggaggcggcgcggcggccgcgtgagggcagcgggcgccgccgcctccgcctccgccaccgccgcggagcccggcgcttccgcccgccgcttctcctcagcctcggcggcggcggaagccggagccgggcgcccgtcctcatcgcctcagccgcgggccctgccggccgggccgccccctccccgcgcgggcggggagcgcgcggccgcctccccctccccctccccctctttcttctcctccctcgtcgccgccgccgccgccgccgcctcagccttcgcctcagccgccgcccgctcccgcccgcgcgcggcgggatggacgatcaatccaggatgctgcagactctggccggggtgaacctggctggccactcggtgcaggggggcatggccctgccgcctcccccgcacggccacgaaggggcggacggcgacggcaggaagcaggacatcggcgacatcctccaccagatcatgaccatcaccgaccagagcttggacgaggcgcaagcaaagttggtgtcgtctcattaagcatcttttgtgtgtgtgcgggagccgggcccgcggccgagtcgaggcccggggtggcgcccggggctagggccgcagcccccggcggggaactttctccgaaagccggccgcccgccccggcctcggggggacttgcccgcgccccccgaagcgggcgggagtcggcaaagttgctctggggggctcgggacggactcggtgcggcgcggattccgtggcgtcctttcccccgtcctgcccctcgcagcccggccccctcccagggatttaaacctcccgccccgaccccgtgcgggccgcgccgccgggaagtgtaactttctcctccggcggggagtcccggcgccggctcccgcggccgcgggacgacctcgcgatgcgggcggccacccgggcccggcgcggggcgatgggcggttccctggcggg

SEQ ID NO: 47607 - DNA, 1002 bp, Homo sapiens
aggacttagttacaccattctgaaaggaaagtatagtcaaccacatgtcaaaggtgagttacgaaaaagaaacaaatcttttcaaagtctgggattactggcagagagagctttggtagggctattgctatttaaaaaccaagaggcagctgacaaaagaaatttttgtgttttaaaattgtttctggggctttcagtgataacttgtaaattagattctctttttgtgctttggccagtggatccacatttgcacgttatctcttttgtaaaaagccaacagccgacaaagagtaaaggcggctgtctgggtagaggcatcttcctgctagcctctctaagctcgagagggatgggatttaagtactgagtgattgatgggggtgaagctctttctcttctttccattctcccctactacccatagcttcacctcactctccaaaactagtcttagaatgagacagggactcagaatcctcaattcgaaataaaacagctgtgtagacattagtgttaccaaagcaaagaaagcggggctgcaaattccaagcccccccactcctgcttccatagtcggtcatgctttagaaacatgaacttataaaagaaacattgtagaatatatgtatattgcataaatattttttaaaaatcattttatttaatctaataatacctaaaaattaattctttgtaatttagagaaagtttacctagtcatttatgaatagaaaccagaaacattatgttgatgactctattctgcttaatgaagggggttgagggtgaactgtcatttcagtggataatgtcatttcagttgtgcttttcttctaaaacaaaacaaaatcattttaaaaaaaatctgtttatttgtagctctgccagtggattttgaggtttctgatcaggcagtgaacactgccagttcttatgcacatgggggatttagtttagaaaacatctgtttccccctctaccatatatgaaaaggtattt

SEQ ID NO: 47608 - DNA, 1057 bp, Homo sapiens
tggcttttgtcttgtcatgatgcatgtctccgtaacattagagaaaaagctacagggccccactcatctcagttaataataataataattttaaaaagtcaaaacaataacacaaaacccctacctttctaataaagtgtgaatagaaagatactaagaacaggcagcactatgtgtttttaggaaacttgctaagtaaataccatttctgtaggttaaatttccatcacatttttaactgtcccagtattgatcaccctatagaggaatgagactgaagtctggtagttattagtataaagagggtcagctgcagagactggtaccgagtagaggctctcatggtaatgatgctgctatttatagatccccatttcattagttgcagagtttcaaggaagagattttctctaggggaaatggatacttgaagttcattttcttcctcatattaaggcaaaaatgtgaacaaccttcagtataggacatatgattacagtatttttgcaggggcagtttatattctaaatatatttgcaatagtgaatgttgtaaatttaaaacaatgtagagattcagaaatgttagttgctattctggctgagtgctactttacgtacattgttttattacccttcttgtcattttttttcttgtaaaaattactaaattttcaggaactgcaaagctgagtacaatcatgactgtattccctttctttagagtgctgtaaggcctttaagagagttaactgattgcaagaagtgtagttccccaaaaaatatagtccacccactatgtgtatctgtatatatttgtaatataggtaattgtgctttccttctcaaattctttacctttgagttatttttttccctttaagagaatatttacttagttagtattcacttaattagaactgactgtttaatgttttctgggagggtatttatggtattttctttgctatatttgcattccagaaattaagtccccctgccattattcggtgagcctttcatacattagaatgatgaattgaaagcagaaatgggaa

SEQ ID NO: 47609 - DNA, 1613 bp, Homo sapiens
accttgggttaacaatagctttgtagaggtagactttttaaaaaactacattttatccaaatttgtaactgcaatccactttcttctgagaagcctagtggatctgctttctacccagtggttctacaaacactcagaccaccagtcgtttctgagtgtagtgaatctttgagtgtattgaggggaaagaatcagaaaaatggaatagaacaattacatgaaaggcaggagcaggctagcaatgagactcaggtgctagtaggactagagaaaaaggctggcggccggtgggacggggagaggggagtttagaagagggaaatctgaaattagagacatgggttgttgaaggaacttatttggtaattagcatatattaccttgcaagaatgatacaaaaaaaaaattactggtttatgacctagatgatataaggtccttgggggtggtggggggcaagtttgtctttttggtaactgttttgttatttcatgttgctttatagggatttaatttctgctatgtgatagaattcttttaagatacatgccatccttgtgtatataaaataagtagatgatttattgggttagaatctgtatttaatttgttaaactttcctatgtaaagacttttgaagagaatatctgtgtcatttattctcaaactttttgatcttaggactcctttatactcctaaaataagttttgtttatgcgggtttaatctctatttattgtatgaacaatcgaaacaaattcttaaaacgttaagttaatttaaaaattaaaatcataaatcgattatgttagcataaataacattattacaattatcagcttgttatatgttatcctaaacagcattttctgaaacaaaactaagcaaaactaaatgataagaagaatagtattgttttacacttttgcaaatcttttaaatgtcagacttaatggaagacaactggattctcatatctgcctttgcattcagtctgtcatcatatggttgatgtatatgaagaaatatctggcctcatacagatacctaattggaaaaggaaagagtattaccaccaaacttatcaggacagtttttttaagtgctgggaagatttcatactcacagtggaggacacagtgtttcaaaattctaatttttgcttgaaagcatgaattttattattagcgccaaaactgtttattgttttacttgaagtataggtttacttggtttctttttgaaaaaaggtctgccaaaataagctgaaataaccataatttgttaatttttttttaagcagctagttcagcttgcaactcacagttatgcaagtgctttcctcacacttggcatgcagcctaagtgctttgtggagaatttgtattttgtcacagaatattaaaaagacacagtgaaggtgtgattgagttaataatttttactgtttcatcaaggacattgtgaagtgaaactggcctttaaaaaaaaatttaagtgcctagtggtaaagaatacattgttagtatagtgtggtgccgctgtcttgctttgtgcaatggcgccagcagttttatccacctttgctttgtgcaccatcagtataaatgtca

SEQ ID NO: 47610 - DNA, 1046 bp, Homo sapiens
tgctgatcctaaaggcaacagaatatatcgtgaagccattagcgtgatcctcttagcgtatttgttaagtgcctacacaagtatggtattctgctgaatattcttcagtgtggaaacagcttttgcccttagaaggcagaccctgtagtcagtcttgactgcacacataaagggaaaaaaaggatagatcaacagatcacattttgttggatcatagttttccatacagaactagtgtaagcttcctggggttcctgggtaagtcctagagtgattatttacaaaataaggaagtaggacgaggagatttctaaggctttattcagtttaatattctgattctttgacttttttttaaactgagtgaattgtttattaattagctcttaaccacttattaatttatttaagctcaactggttatgtataatttgtatttgttgctatcacattggttaagcattaatgttattttgcagtattgaaaaacggaatgtatagaagaggaaatggaagggaattgtaaatgaagaaggcttctacaagcaagtgaattttaagtggcaaggaagaagaaatttggatggtgggggggatgtacattgcagtgtatttaacatatttctgaattcagagtctttatagcctatgctataatagcagagaaggaaaatttgagttcagaaataacagtaaagcctgtaagttaaagaatctaccagtaatattctctgatagtgacatgtgtaatatgaactgttgaaaaaaatctccagagtaaaaagtggttcagcacataaatacataatgttgattctgaggttcctttagctccattaattttgaccagaaagctataatagtttttgaaggggaatatagtacttaggcattaaaatatatttatttttgctcctcaatgaaaaaaatcttgtattaccttgagatcttttgatcttccttctcatactttagaaggaaggaatactattcagtaaggaaaaaatgacccccaaactcaggttcttactcagcccagcacagtg

SEQ ID NO: 47611 - DNA, 1027 bp, Homo sapiens
ttctatttcattgatccatatgtctatccttattccattagtacactgttttgattactgtagctttgcagtcagttttgaaatcagaaagtgatgatgtattaactttgttctttttcaagattgttttggatagttgaggccccttgcaattccatatgattttgaggactggcttttctatttctgcaaaaaattgtgataggagttgcattgaatttgtacattgttttgggtggtattgccatcttaacaatattaagtcttccaatccatgaacattggatgtctttacatgtatttaagtctttaatttctttcagcaatgtctaatagttttcattgtaccaatctttcacctccctggttaaatttatttgtttattgactctagcaggttttttggtgtggattctttgaaattttctatacatagggttgtgacaactacagataaagacagttttacttattcctttccaatttggatgccttttatttcttcttctttcctcaatgatctgactagaacttccaatacaatgttgagtggctgtggtagaaacaggcattcttgtcttattcttaatattagtgggaaagctttaagtctttcaccattgagtatattgttacctgtgggttttccataaaagctatttaccatgttgaggaagttcacttttatttctagttttctgagtgtttttatcatgaaaaggtgttggattttgtcaaatagttttttttttcatccttgattggttttgtgtgttgaaccactcttgcatttttggactaaattccatttggtcataatgtgaaatcctttaaaaatgttgttggatttggttagataggagtttgttgaggatttttgtgtctatacttgtaaaatatattggtctatagttttcttgtggtaattttatctggcttcagtctcacaatagtacttcttttctttttttaaatgggcttttgctctgttgcctaggctggaaggcagtgatgcagtcttggctca

SEQ ID NO: 47612 - DNA, 1060 bp, Homo sapiens
acaggtgcaagctgccgtgcctggctaattttttttttttttgtattttagtagagacggggttttaccatgttgcccaggctggtcgcaaactcctgagctcaggcaatctgcccgcctcggcctcccaaagtgctgggattacaggcgtgagccaccacgcccagcctaattattctttaaatacttagtagaattcatcagaaaagccatttggtcctgggcttttttggaagattttttgattactttactctctttctttgttatagatctgttcagatttctgtttcttctggaatctcttaaggtaatttgtgtgtttcaaggaatttgctcatttcttccaagttatctaatttgttggtatataattatttgtataattctctcataatccattttatttctgtaaggttggtgggaacgtctccactttcatttctgatttttgttttcaaatcttctctttttttttttttttgagatggagtgtcacttcgttgcccaggctggagtgcagtggtgtgatcttggttcactgcaacctcctcctcccaggttaaagcgattctcctgcctcagcctcccaagtagctgggactacaggtttgtaccaccacacctggctaatttttgtattttttagtagagatggggtatcaccatgttggccatgctggtctcaaactccagacctcaggtaatccacttaccttggcctccccaagtgcttggattacaggtgtgagccaccgtgcctggccctcttttttttttttgagacggagtctcactctgtcgttcaggctggagtgcagtggcatgatcttggctcactgcaacctccgtctcctgggttcaagcaattctctgcctcagcctcccgaatagctgggattacaggcgcctgccaccatacctgattaattttttgtatttttagtagagacagagtttcaccatcttgaccagactggtcttgaactcctgacctcgtgatccacccacctcagcctcccaaaatgctgggattacaggcgtgagccactgcgcccgg

SEQ ID NO: 47613 - DNA, 1091 bp, Homo sapiens
aatgaacatatccatcaggcctaaagtttctttgtaccctttgggtaaattttaaaaatgtaatacgttatattaaatatatataaaataaagctattattgtagggaatttagtgagcgattgtattttaaaaacctttccattatgaagatttaaaaacatacagagagagtaatgttataaacttctgtgtacccaatcacgcaacttaaatttgtgtgataacatttttaatcttataatgtttacaatttttgttttcttacaaatatgatgttttcttacaaaagcctgataaactgaattcttaattttacaaatgaggaaattaaaatgtggataaattgaatcgcttgaaaaaatgtttaagttatggaaatgcgggagttgatgaggaggaaaaaacatattttctgcttctgtgtttactggacccttgctactcaaaagtgttctctgtggactggcagcatggccatcacctgggagcttattaaaactgaagatactcacaccccacctcagaactactgaatcagaaattgtattttaacaagattcccaggtaatcatatacacattacagtttgagaagctcagtgttaaggcaaattgcctctttgggcaacaatgaaattttataattaaaaatctttcttgaagtgaggttggtgaatgggaaaaaaattggaaacctgactttagttactgctcagtttctattattgaatgatgccctatatggtaccatgagaagttaattggttagctttcctatgtcaccattttcaatttattaaaaaaaaaagattctgagaacaaaataacaaaacaataccctaaacaattataattactcatgtatgccttttgtcaggattatgtttggtctatgaagggaaagtaggagactcatggctgtttttttttttttttaacagtcccataagttaataaaacaaataaaaactcagagtcctcctcccacccacccacctcaattccaaagataacaaggttgggcaaccagaggcagaattaagcactgttcagtgtgtacaccaagagaagacttcatgttgtgttcaat

SEQ ID NO: 47614 - DNA, 1044 bp, Homo sapiens
cttaggtgtaaagtctagcttatccttttgcagtattctgcatgtctattttctttatttgcggttatacaattagtaatgtgcagtgaaaatatggttagtgtgggaatagctcagattaaaattagaaactggacttggcatgtattcagttcactgcccagggttaaagtccagcgccacagaaagtggatcttcacctttctctcctggtgttttagctttactgatgatttgaaaccatagcagttaatatgctttagcctttgcttttacagatgagaaatggatcttatacttatatcaccaggtttcaaaactatttacactaagtgggatggtttactacctcaggggtagtgcattaagcctattgctcttgagaatccattttctccaccaattgatgggacagatatgacaagcctttaaagttgagtggaaattttctgtggggcgggctgttgtattaaattgttccttaccactatcatggatgttgtaaagacttgtgagtgggtagcctatggcgaggaaaagagatatattgtctgcagtagggaggctgtaaggtctaatatatagggaataattctcttcctatctgctatttccctctccttctttaaatcataggttgagcccatccactccaaggagattttcttgattaaacatcactgaaaagcattagtcaagtttcttaattgtatgtaatgctgtgggaggtctttttaaaagcagttgtatagagtcactttatataatatataaaaatatataatacaccgtaaggactatagttaatgagagtgtcatattaactgtagtccttatggacgtacacacacacacatatttcctaatttgcaccaatgccctcttatatttagatttatcatatttaaaaatttagatttagaatgttaatgttggttgttgtttgcaaggcctgagattacctaattcgtatggtaaccaccccccaataattcttggttgaaacacccagttgccattatgctaatgaacgtttatttgtct

SEQ ID NO: 47615 - DNA, 1028 bp, Homo sapiens
tgtcgtaaaaggtgaataactggtgtaaaagaagagcaggctttctgactttggggtctttatctagtctgagtgttgagcatctttgttgtgattttatagcttcttcatctcttgctacatttgctgtcatgagttttcatgtcagtagcctactctcagatcagtcttggggataacaaaagttactagaaatggtgaagactaaataggttatagactatatgtaggtaatcagtggtagggtttataaatatagagtttattcagtgttagatagctaagagttataaagattcttaggtctatgcatttcttgggaaaattcataaaggaatttcaaagttggaagaaatcttaagtgtcacaatccagagcttttcaaggtatatgagctattgagcctcttagctctctgggcggctgggctcatcctgggatggctaagcccttgtgctggtcacctgtggctgcaagcattcttgtctgtttatcgtagtgtgctgtacaaaaccattttctagggacaccgtgacatgaagggattataaggagactgtctttgtccagcaacccatttcatgttaaaatctccttctgtcccatctctgctaaatgatgatttagtgtagccatttattcaacaaatatttgatacaaattatgtgccaggcactgtgctagacttaaggaaaagcgcaataaagaagacaggtgggcgtggtggctcatgcctgtaataccagcactttgagaggccgaggcaggtggatcacctgagatcaggagttcaagaccagcctggagcctagccaacatggtgaaaccccatctttactaaaaatgcaaaaaattagctgggcggggtggcgggtacctgtaatcccagctactcgggcggctgaggcaggagaattgcttgaacctgggagacggaggttgctgtgagctgagatcatgccactgcactccagcctgggtgacaagagcaaggctctgtcttaaaaaaaaaaaaaaaaaaagaagaa

SEQ ID NO: 47616 - DNA, 1032 bp, Homo sapiens
tttttatttttaaattttcaaggccaggcggggtggctcacacctgtaatcccagcactttgggaggcctaggtgggcggatcacctgaggtgggtagtgagaccagcctgaccaacatggagaaaccctgactctactaaaaatacaaaattagctgggtgtggtggttcatgcctgtaatcccagctactcggaaggttgaggcaggagatcacttgaacccgggaggcggaggttgtggtgagtcaagatcatgccattgcactccagcctgggcaacaagagtgaaactccatctcaaaaaaaagaaaaaaaaattcaattctagctataatagatcagctgaactatatggaaatgggaaacgtgcaaatactactgatatcttccctgcttgtaagaagagggtttagatatagatatgggcaaagcttcatttatgaatagatttatatatcttcagtgtacatatatatccagtgttttatatatatataaaactggtgttttatgtatatatacacaatgtaaccctgtactcttcacttttaagtttattttagttagaatcttttaatacgaaaacttagaatatgaaatagcaaaatactacaaaagttgaaaacaactctgagcttttttgtgaatattatctttttttctgccacatttaattagttatcttttttgtatttcccatgtaaattttatttcacattcttggaggattaatatggaatttgtatagattttggaaaagaaattttaaaaaaccccaaagaaatctattcctattcattgtttctttcacctggatctcctagtacctataaatgggtgcatgaaaacgtttgcactgcactgaattgaagtttttactgtgggattgaaagaagcactgtgaaaaagatgaagaaacaattgaccacactggatctgtagcccaagctattagtttagtcttagtgtagtctactctgaattttgacttactggatatttaaggtctctggttattcctaacagactgg

SEQ ID NO: 47617 - DNA, 1364 bp, Homo sapiens
aaatcagataatataagtcttgtcgactctagcttgtctggaatattcacaaattaatgaagggtcattggtgattatgggattttttcctttgaaaatatatctaatgaatacataagatatatttcataaacataatatggtaatgtcactactaagtatttagacagttcagcttattgggtgatgacacacactttttttctttgaaaatatatgcataagatatattaaatatttgaaaaatataataaaggtaatgtcagtactaagtatttagatggttcaacttattgtgtgatgactttattcagaagagtggattgctctgacccttaattatggacatattttttaattgacacataatattttctatatttatggtgtacatgtgatattttgttgcatgcatagaatgtgtaatgatcaagtcagagtatttaaggtatccatcaccttaagtatttattatttctctgtgtttggtaacatttcaagttctttcttctagctactttgaaatataccacacattcttgctaactgtagtcactctaccctgctatcaaacattagaaattatacttttaatctaactgtatgtttgtacccattaaccaatccctctttatccacacctcccacccacacccctcccagtctgtggtgtctgtcactctattctctacctctgtgtgatcaacttttttggctcccacatataaatgagaacgtgaaattgggacataacttttaacccaataaaattatgcagtatatcaatgaatgtatttgaatgaattattagtggtaattctgaagtaaagacccatgtagggtatatggactttttgcattttgatttttgcttatgaaatatttcaaacacatagccttttatttcttcctgttaagtttaataaatgttaacattttgccatctctgctttagacatttatttttaaaaaatatccatttacatatgtttgaagtttccccatccgttcagctcactaacttccccaccccaaattagtacctatttatcttatggttggtacatattcttctcatgtgaaaaatgcttttactacacatacgtgtatttacaaataatgttagtatttttagtattgacaaatataatgtgtatatatacacatatgtaatacctatgtgtcgtatatacacactgtacatctttttgtagcttgattttttgctcaccagttttcaacatgtactgcattgattttgatatccgtgaattgattttattagttttacctgctttgtagtattctaccgtgcagatgaacttcacattcatttcactactgatggatgcttacatttcatc

SEQ ID NO: 47618 - DNA, 1029 bp, Homo sapiens
ctaaaaagttttaggtggtctaaaacttttggctattttgaataatgctgctatgaatatttgtgtataagtttttgtgtagacatatattttcatttttctttggtatataccttggaatgggattgctaggtcatagataactatgtttaacttttgaggaactgccagcctgttttccaaagtggctgtaccattttgtatttctacctgcactccaagagggttccaatttcagtttaactttaaacagtatcattaattggataaacactgcttgctttctctgagccagagatttttctagatgttgggaatacagcaatgactatggctgacaaatatgctgccctgaaagaccatacaattaagtgcagggagacagataataaataagtcaataaatagaataatttcgaagcatgataaacattatgaagtattgactgaagtagggggagactttagaaaaagtagtttgggaaggtttctgtaagagaaggaaaaatatgagctgagacagagaagtatagctgaggagggaacagggaagaaaaactctaaagatgtcacctttcaacaagtttttaaggtgatacattgatgtgatagtggctaaaactaagaatggatcaattatttttacttgttttttttatttttatttttttgagaccgagtctcactctgtccaggctggagtgcaatggcttgatctcggctcactgcaacctccacctcccaggctcaagggattctcctgcctcagcctcccgagcagctgggattacaggcaccaccactgcgaccggctaatttttgtatttttagtagagacgggggttgcgccaagttgactaagccggtcttgaactcctgacctcaggtgatccgcccacctctgcctcccaaagtgctgggattacaggcatgagccacctcacccgaccaattatttttacttgtttgtgaaatatttaaatctcagctgggcatggtggctcatgcctgtaatcgcagcactttggg

SEQ ID NO: 47619 - DNA, 1045 bp, Homo sapiens
tgtagatttgaggaatcaagaggcaacatggtgatgaataaagaggactatactcagattcagaagatctctcacttgttcagatctatagattgagtaaatgaatgtctttttcacagcaattcaattagaatgaggttccaaagaaagaggaaggaaacagaaataaccctataacagaaatatttccaatctttgtaagctcctgttgtgccggatgaactgatgtaacttcttcacaataaaagttagcaagatttaatgtaggtagaaggagagggaaaagccaaagatttatggggagtttaaaagcctggaaacgagagtcttttggttctcttgtctctgttaggaaagttagggaagatgttttggatatgtatagttttggattactggatcacatccaagtatatatattgtatggacaagaagacatgaaaggccgaggaaagcaaaagagaaaagggatactgttgggatatgattcttaaacattccaagactgtcttttcagtgacctccctgtttatggaattgagataatttactcctgacatctgatatatgtatactctattttgaagtattttgctctcttaaattcttagtataaagcaaaagctttcagaaacctgtacagtgttctattatctgtcagtcttgtggtactcatttctgggctttgaggagcactatggacagtgggccattcagatgcctctttgtaaatatgggtatcagcagagagatttttaaaaatgtttttcatgttcacagacctgtcttcttttttttaaatatcttaaatagtaaatagtgaagattaataattgtgacttgtctagcattatggtgatatttaaactgttttccagaagatttttctgtagatggaaacaactttggaataaaggaggaatttttttcaggatggagttttttatttttcattttttagcacactggaaatgtgtccattgtgttttagatgccacttacaatgaatttatttaatagtgttcttctggtcagatgtaaataa

SEQ ID NO: 47620 - DNA, 1213 bp, Homo sapiens
aataattgggtaaatacagataattaaatttattcttactgttgaaaattcaaataatttgtggcagtgtttttaaaatcagacttagctaatgcttggttctgtgggtgtaggagaaatgttgtagatgattcttttgtttgtgttaatctagcacaccctaggtactatgttttttgtcttgaacttgtgatgtggtaggcaccagagaaatgcatggctagatttttatgtacgtaactgttgcaacaggacatttataaccattctacttttcttcctttttgctatttcatccctggagtgttgtcttaccccagtttattcagtgacagagaagacaggaaaagagtgaagtctctggagtatagctctgctggtgtatgacttgttttggtcttgagcttgcttgcaatgcctctagtacatagacccagcttttgttcagaatgctgttgaatgggcagtgcttactttactgtagccagaattgattatcttggttaaagaatcaagggagattaagttgatctcttaactgttctggatgttggagttaatttcagaaacatgtagtaaactgcagtattggtttagagtggaacactttagttaggatgtgtagagatagtttgacctcagtgcttgtgcttttcagtgaagcttttattgtactgttaacaaaaatctagatgaaaaatttgagtaaaagactatattttatctgaaatatgagatgattttatgagacatttataattcagaaagcatggattatattgtctctcaacctctaattttgaaaactttcatttatatctgtgtattttgatcaagtgtcaatttgtcttctgccttccgatgatgaagtaactgacctccttaagatggggttagaaatataagtcatttcttaaagcaaaaagttgctgtagcgagttttccttgtgctagctcttctctttcaggccatcttactgaaactaaacatcagttcacttgacaactttactcaattctaggcaacagtggctatgctctggcctgcagagacagtgaatccattctggctctgacactcaattttattgtaaaacacattcatgttgacatcatatcagttttctgaactattacatgcataaaagaattcacccctttccattcagtctttttcagccttccggttaggagaaatctgcacacccagtgt

SEQ ID NO: 47621 - DNA, 1065 bp, Homo sapiens
attgaaaagtgtttgaaaaaagcaacggtcacataaatcccattgctcagagattaccactcttctaaatagtgctaaacacatatatattaattttcaaaagtgagttaactatgctgttgtgtagctggcatctttcactgaatagtatattgtggatatctttccatgttagcaagtcattctatgtcatcatctttacttggctgcataatattccatgttgccttttttgtcagttttgtcacatactgtgtatttgcttgaatcacaattaaatatctgtatagttattttatacttttatggggggttagtttaaaatatggcattattctaactagaagtgaaatcattaattatttactggtgcttattgtgtgttaatctcattctttgcacttaactatctgctgcccttgtggggtttacattctagtggaaagagaggtaacattatagaacaggttaaaaaagatgaacaaagacatctctctgcctagattgtaagagggaaacaaagaaacaatcatcatggctattttattagaggaatgagaaaggaccagaggcctctgtatgtgtccggggaggtttacagattcatggtttttcagcttctatatctcgtttctagctaacagggctatcctttgttctaaaatggcagatgttatttgtaactttgttttaaaatagcataatatttctgcttaaaaaatttcaaaaatgtcaacaatgatttttcttgaaagtgttaatattccttcttgacagtatccaaagctatactttggtgatttccatggtacctcaatactgaatttgattactctttgattaggcaactaaattttttgtcttacttgcttttttcacccctaagtcatccataaagacgtgattttcatggttgtgttaggtaaacataagttgtactacatatgtgtaattacaaagcaattgtaatggcaaatctagggtcttgtgacatctgttagtagggatcttcttatcatatccctcagtgatcatttgacaaaaataataccatgaagggatttc

SEQ ID NO: 47622 - DNA, 1122 bp, Homo sapiens
ggctgctgactctaggataggagtataggaattagttggtaaattgacagctaagttaaagtactgaacttctggcagaatttaaaaacaataataactcatcaccaatttaattcaattttacatcattatcactggcaatataattatacatttctaccagaatcaatttttgtgaatctccctgttgatttagtttccaaatttttatttttttactattttattattattatttttaattattaaaaatagagacagggtcttgctctgtgtccaaggctagggtgtagcagtaggacaatagtagctcctgcatcttggaactccaggcctcaagtgatgctcctgtcttggcctcccaaagccaaattttaaaattattacttagatgtatagaaatccttgagtctagacttacaaatccttaagagccttaataatttcctgctctaatgtttttttggggaggagtagtccaattgggtggatttgggaggatccattatcattaagtatttactaagggctgggtgcagtggtttatgcctatagtctctgcaatcccagcacttagggaggctgagacaggaggatcatttgaggccaggagttcgagaccaggctgggcaacataatgagacttcatctctgcaaaataaataaataaataataaaataaaaataaaaataaaaaaatagccaggtgtggtggcacatgcttgtaatcctagctactatggaggatgaggtgggagggttgcttgaacccaggagcttgaggctgcagtgagctgtgatcactgcattgcagcatgggggacagggagaccctgtctcacaattttttttttttactaaattccagactacagtttttggattacagatgtaattcagcaatgaaaaagtttagaactttgtaaacattatttcagttttagaaatctaatgttacagagaaagacttgtgtctcaaatgaagagttttatcaggctttgtgtatctctcattacttgagacggcagtagacgttaaatatataaaagctgagctgcttctctggttttgtagtttcagctgcctggtatttaacattggttctattttttaagtgggtg

SEQ ID NO: 47623 - DNA, 1027 bp, Homo sapiens
caagtgagaatcctcaaatcatttctaaaaaatggcttcaaataccttttagaagcttatttagtttttaaaggttatttgacactatcccagaattatagaatttgaaaactgaaagaaaatttaatttagcaccctttttgtaagttactatttcaattagttttcttatctcaagttgatgtgatatctacccgcttccgtcagtaatgccagggagctcaaaggtggctggtaacaaaagtggtttaagtaaagataatgataaatttcatgttttaaaataaatgcttttcacttataggccatttatagattattatctagcattcaactgtgtatctgagtttcttggctatatgaaaaactgaatgagtataggtatttttatacaataatcttagtagataatatattagttgattgaaaatatatagcagttctacttcaaaattgtatttctgaaataactttcttaatgaagcctgaagttactaagactttgttatgatcaatagtttctgctgaacggctatatatgtataggttttagtatagtactgtgcatatagtgggtactcagtaaaggtttgttgactgagagcataaataaaaggagattgagctgaaaagaatgtaaaggaagataatttggcttgaaacatagtgtgtgtcctgtagttaattgaaccaactaaccagttacatgttttctagagggtcttacttccagtaacagtttcaaagaatgttaccaaacaacaacaacaaacaacaacagcaacaacaaaaaccaggtagtaatcaatttgaatccacctggtggactgtttataatgtgtttattttagttgtctcatccttctacattcttttcttgtcagtttactactcagagttctccagatcaagtgtgaaaagtagctacctgatctgacaggaccttgcctagaccgtgacgcacaatgttgtcttttctttgcctttctttaattgtgtcaccttctttgttagagaaacccaaatc

SEQ ID NO: 47624 - DNA, 1045 bp, Homo sapiens
cacagaagcaacaccaaggatgaactacaaagttctgcacttctgcctcttggaggcggcctttaagtaataatttttctcttttatttaatgttgttattaacacggtcaataaatgtagtgacaaagtttgaaacataagatacaattaaagctaattaataaattggctttcagtgactgtagagacattatagatggtttagctttttattttgaacatggagtttttcttaaatgcaaagctgcttgggaaatttcagtggcttgagatttataaagtgtttgattttaattattttaagaattctcaaacctatcaaccatgcccttcagataagagtacaggaatgggattggtcactcgtatagctctgggtcccagcacaaggcctggcacttaaactcataaagattgttaagtgactctccagtgctttttctgttgtttttaatttattcattaaaatgtatatttttctaatttaaaaaatcctaatgcttgctgatctgaaaacaatttggatgatacctgaaaacacaagaaacacaaaaacagaaattacttctaaaccccactgtacatgatagtcacatgttagtacatttttcctgtgcttgtgtatatacctacatctatgtatgtcagtgtttgagtatttttaccaaaataaaaaaaaaaagactcatggtgtatgaaaagaaaaaaatgccctttcttccttttttatagtctataatgaatattttccccttgatttgtcagtgaatatttcccctcaacatgatctttaataaatgatcatattccattatacaaagatgtgctataaatttaatctctctctctctctttctattaataagtaggactaaggggccaggcatggtggggcagtaggactgaggggccagcactttgggagataggtggatcacttcagctcaggagttcaagaataccctgggcaatatagcaaaaccctgtttctacaaaatacataaaaattagccggccgtagtgatgggcacctgtagtcgcagc

SEQ ID NO: 47625 - DNA, 1050 bp, Homo sapiens
gttctgtagcttagagtgctcacttactacctctgaacaatactcacgctgtagtttgtctctttcttatctttttgcatcttgtaattaactctttgtttcccttcataaaatgtaatgtacattgtaatcttttaaaagaaaaatcagggttgcacttgcaacttttaaaaaaccgagtgtggaaacattgggtcttaattcaacacaggatcggtaaaactgttgtaaatactgagaaacattttgaatgttcttcatcttattactaatccatgcaaaaaaaaaaaaaaaagcagcgactaattgtgatgcattcagatttcagtattcagtactgtatatttcaccctgtgtaatggggccccctctcctttctctctttttgtattgtatgcgattctgaaactgattgagtcatgaaaataatttgtggcggtgattctaatgtattaaaaacgtttcgtgttcctttctaactggattacaccctggattgaaaaagtcttcctcgtggtagttatatgtagtttcaaacatgaataaactttttgctttcatgattaaattttgatgcagtttcttacttcactatttgagccagccaagtgcaggcagaggagaaagtgcacccagcaccaggcctgggagtgtaactgcctcctgtcagagaccactctgagatgacggtgaggctgggagggaaggaacagctgctgttgagtgtgcaggcaccgtgccacctactgaaccattgttaggagtcctcacttgatcctgatgtgctcagtaacaccgcaaggaaaactccccattttcatagattaggaaactgaagctcagaaaacttaagtgaatgccaaaaggtcacagacctaggacagcaagaggtcacaccttgaacccaggtctttctgccctcagctcacactctcctgacctagtgatgcctttggcacttgttagatggattttttttttttttttttcttgagatgcagtctcactcactgcagcgtaaaactcctgggctcaagcggtcttcctgcc

SEQ ID NO: 47626 - DNA, 1091 bp, Homo sapiens
tcacctcccctctggtggggagcagtggctggggcttgtgctccgagtgctgggggtctaccaggagcctatagggtaaggcaggcccctcagtggggcctgcagggctgcacaccagctccgggatttcctgtcttccctttcccagccagagccccagacattaacgtgcgctggcagcctcctcctcccctggcttctgcgcctttgctcccggtgctccctgcacatgaggtgtgtttgacaggtctcagcgcagaggacttctctcccgggaagccctcccagaggctcctgggctgggcctgtgctgggtcttcttctgtgagcgcttccggggcatctcgagcccgtgtggtggtgagggcatgtggtgagcctccgaggagctccccagcgcctacctgaatccaggcacgaattcagtttcaccataaatgcgtccctggcaacccctccagactactccctggtccctgagcactgcgcgggtcttttcctatggcgagagtaatccaggcttgtagaaaattggcagaatgtagaaagtatgaaaaaacaggaattccatttcccacgagcagatgcttataaccttttgttatatttccctcaagtctttttcttgtgtactttttacataggtgatatcatatcgtgtaatagcaagtctgcatcttgctactcttttctcaggtagccttaaccataaacctgagaaccacgtccagtgcggtctttgtgtggcgtggatcgggcctctgggagcgcggtgacgcagcgccctctactgcccagccgtggcggtggcggggaatgcggttctgagccggagctagtggcaggctctttcgccgcagagccctggcccaggccagccaggaggacctaggaagcggtgggtcacagatcttgctgccttcttgagtctgtattcctctccaaagccaaaaccatgtgctccgcctccatttcttgtgtcatcgctcagatttcaaagaatttcctgccattttttggaatgccgttcattcccagctttacttcagacaaaggtggatctttgcaccgtctgtaggccatcacctgag

SEQ ID NO: 47627 - DNA, 1092 bp, Homo sapiens
tctgtggtccaggcagccgagggcagctggatgaagcagggtgggagcccaaacagctgggtgcaggccctgtctctcccaccgactagccgagtgaggccagcagagatcctagcctttctggatctaaattccacatctctccatatcagcaattgcagtaacaatatcgatcatttgaacatagcaataggtcggctcattcttatgggacgcttcctgtgcaccaggcattgtctggtgtttaaggtggaggtggtaatgcccacctcccaggacttaaagctatgtgggaaggaggcttgtatattctgcagcttgagatgccccaggcctcgcagtggccagcaaatgtgcatttactgcccctggacttcacagacattctgtccaaacactgccttgactgtaacgttcctaaacacatgaacacagaaaaaccaactttctgatacctttctccctgtatgtttatcttctttgtctagtttttcagcagaaatatgcccatttccccctgataattcccttccttagagacagcataattgtagacctggccagagaaatgctgaaaacaaagggaacccccttgagcccagcccttcacctgctcttagcacttcttcagaggtttactctggagtgaatgaagtagtgtgaccagacactcctgcctagaggcagcttataccaaattagccttttgtttctttctctacctctgtctctctcaaaataataaactctcagctgagaggggaaaatgatgaaggcaacttctttcattgaaacacatttagttgtttttgcattattaaaatggattaaattaattaaatgaatttactgaataatacccagccttcctcttacttaccctgtgtaaggtatggcatatgcacttgccatgcattatgttatttaatcccaacaaatccttaaccaagaaaatcttttacagatggggaaactgaggtcttgagagcttgtgatcagctcacagttacacctgtggtacgtggcagggctgagattcagacccaggtctctttgactgcagacattgagctcgaaaccacggtactgagg

SEQ ID NO: 47628 - DNA, 1032 bp, Homo sapiens
cagccatggacatagtgctgggctttggctgtggacatggcgctagtctgtggccatggacgtggtgctgggctgtgacttgctggctgccacagcctccccaccagttttccactttaagggaaaaaggcctcccatgctccttcatggttggatggcttttgggccccactgtgcccctgaaggctcagccctgcggccctcctcgctcatcagggcccttgggagggctccttgctgcaggcggctcgctctgggcagcagggagggctgggcaggcctggaaagccgcctgctggtgggcagggcgtgggcaccccagggccctccctggggctgggtgcagtgctccgcctcctgctggggcgatgtgacccctgccgtgttcctgagggcctcccttcctggcctgcccgtgtacaggtgtcccccaaggagctgcagctcatggtcagctcacccatagggcagctccacttccacctgctgtctgcaggggagcccttcttatgacaattctactgctaaaacttttcaaataaatacttcaaatgcttgaaaaccactgatctaatctaagctcctgcttcctaaaatccatgtgaccatgaggctgccttgacgcagggttccaggccattccccataccccacccagccccaacgccttgcacctgtgtccggccaggcagctgccagcccatttctgtggctggggtgccccgtgcctgctctgcccacatgccctgccttatgtttgggcaccgagacctcacctggcctcttaagtgaactacaggtgctcctagccccctcagaggtacttaaccccttctctaaatttccatcagacttggaacgcgatttagtgagccagggtcggttaggtgagctggggtctctggcgtgaggcttaactcctgcccccagacaggggagcagcagggctgagccgtggaggaaggtccccccaccgggcagctgccctggccccgctgtggcctgtcaggagtcctcagcaggggtgcctct

SEQ ID NO: 47629 - DNA, 1078 bp, Homo sapiens
cccggccgccactgggccctgccggtcaccaggccactgtgcagtgggcgcagagcatggtcaggagtggcctgcccgtactcctccacccagatgagggccctccagagcctgcaggcatctgtggggaatcccagcctgcaggttcttggagaagcaggtgaacctaaggatgaaagcaaaggagggccttgaggaagcagcccccaggcctggcagccacgcagcggctgagctcatgaacttggttcgcagcctgccttgcccctggaggccacgccaggcgctcacccctgagcccacagcccctgcttgggctgcctggcaccctcagggtggcccggcctcctcctgccactctgagcacatgtccgggggttgccaccagagacggctttgttctcccagctaaggccgtggagctgctgtgtgactgtgtcaggcctggacaaggaagacccttagggatgacgtccccgctgcatatttattcaaggtgactcttgtacttggcaagggaagtccactgtgtgattgtctgtattcttaatataatttgttaaataaacgtttgttttaacctctttccccagtttgctgtcgtggtgtctgaaggcagcagaggtcagtatccctcagggcaagccccaagctctctctcccccagcagggctcttgtcaccacctggcctgtcagccttctagaaaggactggtgggcttctttgccccttgcttagttgagacgacctggttacaagtcagtgggattccgggggatgcagaaagccccgctgttatctggtggcagccctcggggtgctcctggaaggagaaaagccccagttggcgtgaaggcaggagcagctcctgccaggtggccccggtggggagggccggggtgctcggtgcctttcacctccgactccccccagagcccttgtctgggggcgcagaccacgtcggagtctgggtggtttcaatcctgtcccgactgctcacctgcttgtgagaggccactccagacaccagctaaggaggctgcagggcccaggaacaggcgcagcgctccttgtgag

SEQ ID NO: 47630 - DNA, 1046 bp, Homo sapiens
cacaataaaaatttttttattcacatttctttttttctttgagaattgcagatgcatatttatttcatctgtgcgtaaatgcttttcagacaggaatccaagcaagcgggcgcagaaacgtgccttcttgatattgtcgagtctgtgcgtcagcggtattgagaaattaacaatccccccaccaaacacaacttctgaaaaatgtgtcctcacccctggctgagttgcagggctccgtccttaaaaagaggttgccatttttagtaaatgtctcttcttcctttcgatttgttctcaaagatcccagacacccagaagtgccaagttgtcttacgcaccacgggggtgattaattgacactggggcacattgagccgaatttgataaaaatcctcttgtacatccttggcgggcagagcagagcgccggccgtggagtttgggcattttcactcttaactccaaaagtctcctttttccccatgtgtgagttttgggggctccttcaaaaaaaagaaaaagcagccttttcggacagaaaaccagttaggaaacggagaggaaacgcagcctcccccaaatcagaacacctctcaccgtcctccaccggagaacaaatgaaaaataaggcactttcccccctcccatgtttttatcttggcggcttggccgaatagaattatgtaactctcttttcttgccgtctgtcgctcgtctggaaagggtttttatcctgaagaggtggagaattcctggaggaggctccggaaggggggagggtcggtgggagagtccaaaaatctgtcacaaaatggagtctaatcgcttgtaagacagctcccaggtttggcgacccgagacccgctggggtgcaagcgggcgcctttgtgcacggcgagacgcggggttccggcccgggccgcgctcctacctcggcggcggggccgcggcgtccttccgcccgcagggcctgcccgggcggccgagcctctcggcgacacagacttcagggctccgccgggcccgctgggggccctttgggctcgc

SEQ ID NO: 47631 - DNA, 1049 bp, Homo sapiens
ggactggaggctgcagagcagggcaggagcctgtggctgtgctcgggcgtttggattttatcctgtgggcaggagggagctattgaaggttattggacaggggagtgacaggaactggagaggcactttatggagctgatgctggcaacatgtgcctgggattagaccggcgggaggaggctattgccaccttggaggtgagggtagttgcgggaaccagagagggaacagggcacagggagggtcacagaggcctggggcttggagctggggtggctggaaccccaggtactcagctgcctggctaaggccttgaggtcctgagcactctgggctggtcccagcaggggtgacccacttagctgggtccctggaagagccggcttgacctgtgcagccccactgggccccacacccagaagggcccttagcttggtttaatgctcctgctgtcacactcttgagattcttaacttttgaacaagtggctctgcccctgccttttcattctgtgctgagccccgcaggcgagcccccagctcacctgccattcccacatgtcccagacacttgcccacatcaaggtcttactcaggctgtggtggttgcccaggaggcgtcccctggcctccatcatcctttcttcttctggaaaactctccctactcccaaggcctggcacaagagtcaccggtttcatggagtctctctggctctgagccccacccccgtcctccaggcttggatctgtcctgtagcacttgctagaggtgcagaatcctagatctgtgagggaactcgaactctcgaggtgaagcccatgagtctacatttccagatggcccctgggggaagccttgcctgctgaggtatgacaacctctgcccagggtacctccaagcctggcacagggcctggtacttggtaggtgcatccgtgtgtcatgtcattgtgaaggaatgaatgaacggtgcttacctgtccatctggatggatgaagctccctgggcctagctcattgcctggcatgggtgggtgggttgcagcaa

SEQ ID NO: 47632 - DNA, 1071 bp, Homo sapiens
cagacagacaaggacgaaggcctcagaagccacttggaggaggcatttctgaaggccactgtaccgaggaaggaagggatgtgatgcctcagggaactcttgggacatggggagaggtgggagcctagctggagggcagtggtgtgttcctcctgcccatccctcaagcctgcatgctctcagcaggtgagagctgagttctctgacatatgagtctaaaacagttgactgcaaggtttctcaggctcagcaggttgatgtggtgggtcagctcatgctttgttgtgggaggctgtcctatgcatgtagggtgttcagcagcatctcagctgccactcacaggatgccactggcaccgcatcccccagtccatggccatcaaaaatgtctccagacatggctgaatgccccttgaggcaaaatcacctctaattgagaagcactgagtagggaaagacaccaggccctctgaccttctatgtgccagaccctcaaaactccctctatcccagatctggctttttcctattgcctgatgaaagaaggattcacactcttaggggtggccctggtcacctaacacttgcctggccctactgccaccttttaagcagcacttgtgcaattttttcaatattttattgcattttgttctgagattttgaaaaagtaaaataagtgagaactgggcaaaataaaagcactattactagtaagaagaaacatttttcccacaaaggtagacatcaccagcttggcaaagtgaacataagactgtctgatggtgaagagaaataatgacatttaaacacataaatatggtagagcataaaatgctggcaagtatctttcttggtcaggtatctgatatgacgcacaaaatgcatgaaataggcaaagcatatttgagaatctgaccctactttcagttctctgcaagcagaactctgcttatgtgcaagtctgttccccaatggtgacatgtttccaggatcaccttatccttgggagcaggggatgcctgcctgcatctggggtcaggactggggttggggggagaagatccacaga

SEQ ID NO: 47633 - DNA, 1340 bp, Homo sapiens
ggcccccaggtactccccaggccatgaggcaggacaggaaccacagtggccatggttagaagtggagggggtaggagagaaatgaagccttccgaggaggctgagggcagggctcctgggtggaggattggtggacaactaggggtgaggtcacccaacagacagcgaggagacccccttcctggcaacttttccagaaacctggcactgggagggccctaacccaaatcccagttcccaagagagtcccggcgtgtgcctcaatctcccagaatataccagctgggcccccagagcagtcacctgatgctgggtctgagtgaccccctccaaggggcagagccctgaaacagcccccacagctgcctcccatggccagacatgtgcatacatgagtagaggcggcagacctccccacgggtggacacgtgtgcatgtgcatgtacaaatgcatcagcagttgtgcgtgcatgtaaatgtgtgagcacactcagagagcagcctgtagatagagttgtgtacgtacgcatccttggtgcgtatgagcatgcatgtgagtgtatgtggccagtatgtgtgcatatgggtgcagacgcgctcagatttgccggcatattgtgctggcatgtgtgggcatgtgtaaacagcagggttgggcagatgcagatggacaggtaggtgtgagtaggttgacacgcttgagtacacgtatgcacacattgtcaacatacacatatgtattgacaggcatgtgtgagtggacacgggtgagggcctagactgttggcacatgcaatacaggtatgcacacatatgtggtacctgggtgctgtgggtggcagtacagtcagtcctccctcaccctcttggataggttcttggaaactgtgacattaagcgaaaccacagacagcaggtcctcaaataacgtttccatgtaacacggacgaaaaaagtttatttcattatatggcgtttctcttaaagtcgcagttcccaagaacccatccacaagggtaagtgaagacttactgtgcgtgtcacaggtgaattatcatgggtgtgggtatagctgtgggtaggcatgaggattgggagcccagcacacacagacctcccacgctagctgccaccactgtggttgtctggaggggagtgcaggacagatacacagccaggggccatgccaggtggcagagaagggggcaagagaactatcagctgggacacctcccatactctccagagtttggcacccaggcacagccccatgcccagctcaccagccgttggcaggaattcaatcccaccccagtaaacccagctctgcttcgccaccg

SEQ ID NO: 47634 - DNA, 1044 bp, Homo sapiens
ggagatggttggtcctccctctggaggagagagctaccatgcctcaaggtcttatatggacagactcaggctcattcagagggtgattagaatgtggagaaactgctgggcatggtggctcacgcctgtaatcccagcactttgggatgccaaggcaggtagatcacttgaggttgggagtttgagaccagcctggccaacatggtgaaaccccatctctacttaaaatacaaaaaattagctgggtggtggcccgcgcctgtaatcccagctactcgggaggctaagacaggagaatcgcttgaatccgggaggtggagcttgcagtgagccaagatcatgccattgcaccccagcctgggcgacagagcgagacttcgtctcaaaaaaaaaaaacaaaaaacaaaaaaaaaaaacaaaaagactgcggagaagctgccacaggagcctaaccaagaaagggaggtgtcactgtctttgagtgcctgaagggcaagaaggagctcacttagtctgtggggccccagctgaagctgggcatttgaacacaacatatgacacccccaaatctgtctcaaccccatgctttttaccctgagcatgtttttatcacctgcctggtaaaatttgtagtaataaactttggtaattttgttaacattgaaaaccacccatcctgatcctggggaaaatttagcttggtaaaataatccatacaaaatataactgacaacggtgacacgaccacagtaagatgtgtcactggccacaaattaaccaaagagtccatcagcaggatccaatacaggcaaaaacctgatgctagaggaaagctttatagaaaatttttcatgaaaaataattatctcaatgagaataattttagggaaataatggggaaagtagaaaattatttgactctactagaaagaaaattgatttaaaaaaatgctttaatggagtttgttccagaaaacacttgctcaaagaaagtttattagtgttgttacagccctaattaaaatgctatggtctatgtgcagc

SEQ ID NO: 47635 - DNA, 1047 bp, Homo sapiens
ttctgatttcaggaattttaaaatgtgaaaaaatgcatgtctgaaaattaattgaagagtatcattttcatgaactttttttttcttgtttttgtttttgttttgttttgtttttttgagatggagtctcgccctgtcgcccaggctagagtgcagtggtgcaatcccggctcactgcaacctccgcctcctgggttcaagcgattctcctgcttcaacctcccgagtagctgggattacaggcgcctgccaccacacacagctaatttttgtatttttagtagagacagagtttcaccatgttggccagactggtctcaaactcctgacttcaaatgatccacctgccttggcctcccaaagtgctgggattaacaagtgtgagccactgcgctgggcctgaacttttccttttcaactctatttatatttgcagttagaataggggcttttgtcttatttgtaacatattgaggaaaaaatattttttaaaatttgtcgatatgttgttaatttcttgaaatgagtactgtttctgccttctgctttcttgatttcagcttcttatcctgaattctaatgcacgtgagggtacagttaaaaacatttccttggctttattgaaattcaatggaaggatgatcgataaatggggggttagtttctagaacgttaccttctcttttgaatctcagagagtttgctgtaatagaatgtttgtcctagaagtttttaagtaaaacattcagccgtggcttaaaattgaagggaatcatgaatcaaacttcataaagcaggtggcttgtttttttaaaaaacatcttaaaatagtttttactaagtgatttggccaaagtgttctaattaggaaaaaaatggaagaatactgattgacaatggtcaggagaccaatagcactgttccaaaggatatattaattctgcaaaattacatagtcattgaccatgttttctagttttaatgaatatgccacagtaatggatgagaggtatatgggagttatgcactatcttttcagtttttttg

SEQ ID NO: 47636 - DNA, 1095 bp, Homo sapiens
cttctctctcgctgttttcactttcttgtattttagtagaaggtccccaaagtgccttccacattatcgattccatttttttactgttgtaattctgcttcttattgcctgtgtaaatttctgctctatattagtttcctgataccctatcattaattcagtctgcccttttttcatatcattctactgttttgtctcatcttccttatactttattcagagactgtgttttcatgaagtttgtgaaaaacattttaaaaattgtttaaaatgtactctttgtctatttcttgctattttttctttttgatattctggaatatatccacagacctgtgttggttttattttgtttaattcttgagagggaaacattctgttcaggtctgaaatttgcttttgggtcccttgttgtatacccgaatattgttagaatcagctcttagttcttaagctagatgcagggctgaaccacattgacatctgggattagttgagtggggctggaggggtaggccttaggccctctcaggggagcttgagctctgtgtactttctttgcagttggtgaaattgggatactaggaccctctgttgtctttggcccaactggcaaatgatggctatgcctttacctccttcctggggctacggagtcccacccccttatgttaatattttttccttctgccaaggtaatgtgcaacctttggtatcctaataccacccacctctgagttttgccagtctgcaggacctgtctgtccttggcttttagctctgggactcccaagtgaaagagtgttactgatcccgtcagaattgcctggaataggacgtggagtttcaggccagtgtttcccttcaacttggccccatttccactgtatcttttttttttttttttttttttttttttgagacagagtctttctctgtcacccaggctggagtgcagtggtggcagtcacagctcactgcagcctcgacctcccctgttcaagagatttcccctcttcagccttctgagtagctaggatgtcaggtgcatgccaccatgcctggctaatttttgtatatttgtagagatggggt

SEQ ID NO: 47637 - DNA, 1034 bp, Homo sapiens
ttttttacaaagcattactgctcattgagaaggcacttggtcacccaagagctctgatggagatgtacaaggacattagtattgttttcatgcctgttaatacaacatccattctgcagcccatggaccaaggagtaatttcaattttcaagtgttattatttaagaaatacattttgagccaggtgcagcagctcacacctgtaatcctagcacttcgggaggccaaggcaggcagattgcttaagcctaggggtccaagaccaacctgagcagcatacaaaaccctatctatactgaaaatgcaaaaaattagtgaagcgtggtgtcatgcacttgtagtcccacctacccaggatgcagaggtgggaggatcacgtgagccagagagtcgaggctgcagtgagccacaatcgcaccactgcactccagcctgggtgacaaagtgagacccccatctcaaaaaaaaaaaaaaaaaaaaggatattttgtaaggctatagctactgtagctgctattgatagtgattcctctgacactctgatggatatctgggcaaagtaaattgaaaatgttttggtggcagtgtggtagctcacacctgtaactcccagcactttgggaggccaaggtgggtgaatcgcttgaggtcaggagtttgaaaccagcctagccaacatggtaaaaccctgtctctactaaaaatatatataaaaattagtgtggtggcatggtgtcacatgcctgtaatcccagctacttaggaggctgaggcaggagaattgcttgaaggcaggaggcagaggttgcagtgagctgggatcgcaccactgcactccagcctgggcaacagagcaagactctgtctttaaaaaaaaagaaaaaaagaaacacaaaaaaaatgttttggaaaggattcactattctagatgccgttaagaacattcgtgattggtgggaggaaatcaaaatatcagccttaacagaagttgattccaaccctcatggatgactttgaggggctcaagacttaag

SEQ ID NO: 47638 - DNA, 1048 bp, Homo sapiens
ggagaattgcttgagcccaggaggtcaaggctgcagtgagccgtgatcacatcactgcatttcatcctgggcagcagagcgagaccctatcttgggaaacaaaaaagaaagaaagaaattgctacagccaccctaccgttcagcagtcaccaccctgatcagtcagcagccatccactcaaggtaagaccctctaccagcaaagggattacaactggctgaaggctcagatgattgttagcatttttcagcaataaagtatttttaaattaaggtgagtacttttttttttttagacataatgctattgcacacttaatagactacagtatggtgtaagcattacttttatatgcactgggataccaaaatttatgtggctcactttattatggtgtttattttattgcggtgttcttgaactgaaccaacaatatctctgaggtatgcctgtatatgtctttatagcaggcttaactggtttataatgttgttcaagtcttctatttccttatagatcttctgtctgcttttttctatcaattcttgaaagtggggtattggagtctccacctattattatagaactgtctattccttccttcaattttatccacttttacttcatatattttagagttatcttgttaggtgtgtatatgtttataattgttatattttcttgatagattgaacctttttactcaacatataattctttgtctcttgtaaccttttttgacttaaaatcgatcatttctaataatatagccatctcaggccattttttgttgtgcttacctggaatatcttttttcatccttttcctttcagcctctttgtgtcgttatatctaaagtgagtctcatgctcacctcggcagcacatacactaaagtgagtctcttgtagactgcatgtagatgagtcgttttttaatccagttactgacaaggaaagattcactttacaatttagctatttgttttctgtatgtcttacatgttttttattcctcaattcttccattattgcccccatcctactttt

SEQ ID NO: 47639 - DNA, 1022 bp, Homo sapiens
tttcttgttaaatgatatccagtcttgtaagagtgtgctaagtagacactgtcattgattgttggtgagggtgtgacttggtgcaggctttctggcaagtagtttggtaatatgtatcagaaaattttttaaaaacattagccaggcatggtggcatgcctatagacccagctgcttgagaggctgaggcagaaggattgcttgatgacccaagagttcaaggctatgtcaaatgcacagccccttaacccagcagttccactggtagaaattaagctataaatatttccaaaggtatgcaagatagttatgcaaaaatatctattgtagcattgcttgtgattttacaacccctgccaactgaaattctgtaagaggagaactgcttacattacgatacatccatataatagaaagctatgtggccattaaacagaatgagttagctctttttgtgctaatgtgggaagatctccaagatatattaagtgacaaaagctaagtgtagaataaaatgtaggtaatgaacccagttgagtagggatttttaaaggatgtatatgatttattctgatatatgcacagggaagtttctagagatataaacaggagtttaatggtgatttcctttgggggagactaggaataaatgatgggagagattttttttttttacacctttctataatttttttttacatgtgcatgtgttatatcccacaccccctttttcaaatagctaaaagcaaaattctacagtggtgagatctagcagagaatctgttcacccagatgtagtttccagaatttacatacttttagtctactcatttatatagtcaacttttctttttgaaattacgaatacctaaatcatttatttcatgatctatttttgttttaaattactatgaaatgttttaagatgtataaaacgataaattaatacttcactctaaaaacacagtcttttaaaattattagtgcctaatctggcatttttggcatcttagaggaggcag

SEQ ID NO: 47640 - DNA, 1776 bp, Homo sapiens
cccagctactcaggaggctgaagcaggatgatagcttgattacccaagagttcaaggctgcagtgaactatgattgtgccactgcactccagcctgggcaacagagcaagaccccatctcgtttaaaaaaaaattatattatttgaatgggtatcttgtttgttttaactgtaaatatttacagtacttggttttacttgggagatttgtatagcttacaaatcttgtccctatggattcagttctcttacccacagacacagaaccaaaatcaggagttccacaaggagtggtggtgagtcctgcctttggcaaacacgcacctgcaagctttgctctagggattgaatcccttacccagtggggcccataggctagaggactttgtggaactttggaacttgtcttaacaatggaggaggggataaaataagtttatctttgggctggaatttgtactaatttttctttctcttgtagcaccgaacaagatttgtgatgaaatggagcctggaacaaactcttttcgggtagaatttcctgatttttccagcaccattctacagaaactgaaccagcagcgccagcaaggacaattatgtgacgtctccattgttgtccaaggccacattttccgggcacacaaagccgttcttgctgccagttcaccctacttttgtgaccaggtactcctgaaaaacagcaggagaattgttttgcctgatgtgatgaacccaagagtgtttgagaacattctcctatctagttatacaggacgtctagtaatgcccgctccagaaattgttagttacttgacagcggcaagcttcctccagatgtggcatgtggtagacaaatgcactgaagttttagagggaaaccctacagtcctttgtcagaagctaaatcatggcagtgaccaccagtcaccaagcagcagtagttataatggcctggtagagagctttgagctgggctctgggggtcatactgattttcccaaagcccaagaactgagagatggtgaaaatgaagaggagagcaccaaagacgagctgtcatcccagctcaccgagcacgaatacctgcccagcaactcgtccacagagcatgaccgcctgagcacggaaatggcaagccaggatggggaggagggcgccagcgacagcgccgagttccactacacccggcccatgtacagcaagcccagcatcatggctcacaaacgctggatccacgtgaagcccgagcgcttagaacaggcttgcgagggcatggatgtgcacgcgacctacgacgagcaccaggtcacagagtccatcaacaccgtgcagacagagcacacggtgcagccttcgggagtggaggaggacttccacatcggggagaagaaagtggaagctgagtttgatgaacaggctgatgaaagcaattatgatgagcaggtggatttctatggctcttccatggaagagttttccggagagaggtcagatgggaatctaattgggcacagacaggaggctgccctcgcagcaggttacagtgagaatattgaaatggtaacagggattaaagaagaagcttcccacttaggattctcagccactgacaagctgtatccttgtcagtgtgggaaaagtttcactcacaagagtcagagagatcggcacatgagcatgcacctcggtcttcggccttacggctgtggggtctgcggtaagaaattcaaaatgaagcaccatctcgtgggccacatgaaaattcacacaggca

SEQ ID NO: 47641 - DNA, 1061 bp, Homo sapiens
aaagttcagaaaagtcattcacattgttccaaatttgtaatggttgtcacatgtcacatgcgtctttttcagtaagtgccagagtgttcccactgtttctgcccagtgcttgacttctcggcccggaagagaacctgctttctctggtttccttcctgagtctggcacagacggggctattgtagttcttgatcaagtcctggagtcagccttgcctggctctccttgtagcagattcagtccacagacctcttgctgcccctcagtgacaagtatgctgtgaattcaacctttggacttgctgcccaagcctttggttgctgccctgactattgtaagaggtaaacttacctggtttgtttgagaatgaccattttcctaatgtgaaaaccatctctctcaccacttttattagtagggctaacatttttttccgttataaatggttgagcaatttgaatgacttaacacagtgtcattatcttgcaatataaactggtaacctcacaactccacacttcatcaccatatgaagtaaatgaagctagctaagcggatgctgtatcaactagtaacttgccattaaggattattttatagcatgaatttaagactatttattcaaatgatattttactcttgtattcactttgttttagatttgtgacatgaatatttcagtgctgcttaattttgttctgaattcttgtttcttgcttgtaaatggcttttttatggtataaataaagtcaatggacattgctgtttgtaaataaaaatgctgctagagcaaatgtgctgtggtctccctctgcgtgggccccctgagcttcggtgagtgtcagtggctctgacaaacatctgcagtgtcatagtttctgtaatcactgtttttgaaaggtgagggtttcctaagaagctcttgtgccaccatcgtgctgaaaagaagagaaagaagcgagtatatttctgacctcttgtgtggcgactgaattgtcggcctcggtctgcacccaggcacccccagaacaaatcgtgaatccctgcccctcgcgcctgca

SEQ ID NO: 47642 - DNA, 1050 bp, Homo sapiens
gagagagatctaggctggaacagtggttctcacactctagagcatcagagtcctctgtagtgtttgcggggagggaggctggtagtcttatgtttaagggctttcacagatggttctgatgccccaggagatacttggggtcattcttgcatagctggcccctgaagttgtgtcataggagaggatgggatcactcaggaaggctgtgtggtagtggatgagagtcccggctgaattgctggggagcgtcagcatgagaggtggaagtggaagtcagggaagaagcaagaggaggaatgggcagctaggaagaaagacaggaagaacgatggtgtggaaaccggtggtgggggcaccaacctccacttctttccctgcagggcttcagttttctcattttcctctctagtaattcattagggaattattgccctgctacctagagctgagccttccgtgcctcccttcaacatttgtttacactagtgtcagagccagtctccctgacaggttatgcttcagttacctttgttgtcgtgtgcagaagactctgaaagaggctgtttgctgcagacagtctctacccccttcagcgcctcccagcaaccttctcaagcaattccctcatgccttctattgctggtcctcgggactaaaatctctatccgctgaagccagaaagttgcgccctcccccatctaacattgtgaggttcaggatggatctgcaacctcagggatgtgtgtctgggtcctaggaaaggcagctgatcggaacagtttgagtctgagaagatgattaaaacattcagattagactaacgcgatgcgtgggtaggtatctgtgacttggggttggggtgcatccctggtccactctgtatcctgtgcttgggtagcagggaaaagcctgttacagaatttctggaacttattgttggggtctgagagttagagtacttgggatctactcagactgctggtggcggtatcctaaattggtaaaagtggaagtctgtctccctggtaagcctaagtgcctgactgagct

SEQ ID NO: 47643 - DNA, 1024 bp, Homo sapiens
agaccgcagtctgctaacccatttcacctgggcccacctggatgacagctgaccagtcatcccgagcctcaggcatgctaaggcagcaggaggtcaagcagtctgttgtgaacaggggatagagaacctgcactcactgacaggcaaagacaagtgacattgcatttaaggactcttggccatggaagggagagaaggaagccaagcttcatacttgcagctgtggcgcttttgaggcaggatgaatggagtgactgcataagaactttataaggagagaacttccaaagcgaggagattaaagtatatgagagactttctggaactgaaagtcaatgaagaactgaaattagtagtttggaaggtcaaaggaaaaatatttcgtgacagagtaataatgacaagaaatgggaataatgaaaatgtgaggtacttagaggcagcaagaacagatttatttattatttttttttttccaaaggaaagagaattaggctgtctttgggcttcccctgtgcaactctggaggctggaagacagtgggctggtatctccagactattaaagggagagggccccaagtcctctatatacccagccaagatgtcagtgaggtgccattgcaaaagaaagccattttcaaacacgtgaggacacaaaacatttattaaatgtacctgaggaaaatatccagtgaagttctctaacccaaggacaagggaagtggagtagagatatggagacaggtaaggaaggagtgcagggaacaggaacggcaccttttttttttttttttgagacatagtctcgctctgttgtccaggctggagtacagtggcatgatactgtctcacgaaaacctccatctcccaaatagttcaggtgattctcctgccttagcctcccgagtagctgggattacaggtatgcaccaccagacccagctaatttttgtatttttagtagagatgggtttcaccatgttggccaggctgctcttgaactcctgacctcaggtgatccg

SEQ ID NO: 47644 - DNA, 1055 bp, Homo sapiens
tttagtgaatatccttctatacttctatatgtgtgttcacatgtgttataaagattttaaaacatgttcaagtgtcattttctcagtgaggacttctcatatacgccccccccctttaaaattatgacttcgtctagttgtgggggggggttgttggggaaggagggatgattaatggattcaaagataggaagaagattggataagatctagtatttgatagcacaacagggtgattgtagtcaataataatttaattgtacatttaaaaataacaaaaggagtataactggattgtttgtaacacaaaggataagtgcttgaggtgacagatattccatttaccctgatgtgattattacacattgtatacctgtatcaaaatatcccatataccccataaatatatgcacctgctgtgtacctgcaaaaattaaaaataagtgtaaaaaaaagagaaaattatgacctgtctcccaccctgcctacttttctctgctttacttttttctttatcacttaccatgagctggcaagccttgtcttttgctgaatgatttacttagtgtctgtttcccccactagaatatactgggggttttgggttttttcttcactgctctatccctagcatctaggacagtgcttgatatatactagcttttcaggaaatagttattgaatgaaagcatgaaagtgagtgtgccctgagtttatggacattgctctctgtcaggaagtattgatctccctcacctttttatctaccacttagtatcccattgaatggatgtgttctaactgtctttactgtggttttcaagtgttttcctggcttttttgtagccagtgttacagtcagtagctttcctggaacatatactctctggttatctatttgatgatttccttgctttgtttgaactctgggcttagtgctttacaaaaaatagctcatattaatcctcacaccaaccctctaagaaagatgctgctcttagtttctccttttcacctgatgagaaagctgaggtttagagagaacaaaccccctg

SEQ ID NO: 47645 - DNA, 1051 bp, Homo sapiens
tcttttttttttttttttttaaagagaacatctgaatgatgtattcggaaaaaaacatttcccaagaatatggagaaagggaattgaacataattcccagtgtaagagtggaatgagcatgtggccctgtgggcctagtcccagtttgttaatcttgtgagcagagctgctggcggctgctctcagtccgctaatcgggctctttctctgtcacgtggacaggagactgctcacagggttgcagttggctgctgccctgcgttgacagctggttctaattgtgcagagctacgtagtactagggctggagagggaaggttttgggaaatttgcatcatcttcctgaccctaagtctgtatgttttccaagcagatggtagcttgaggatttgatgaaacagtagtgactgtaaatgagttgttattctatagaaactagtatgacctgaaagctgagaaagataaattgcttctgcttattcagtgagtacatatatgtgtatactgatttcactggaggcaccatttttccacagtgatcctttccccctcttgtggtttgtctagccaggggttctggggcctcgggaggccctcatgttcatttcttccacggcccatactgcctcctccctttctccacacacacagcccttaacaggtatttatttcaaattaccaaagtgagttgctctcacataagaaaatgcaaatatcccgtgcacttaccaaacttgattctagtatagtagaaggtgcttaaagggtttgggccctctctgccgtgctctccctcatggcatcagggcaatacagcctaccaaacactccatgtgagggtttggggagccacctctgcccagtccctacgttgttttcccatcccatgcagaaaaaaaaaaaaaattgcactctttaccttcccttaaggctgggacctggcctcccacccctgtcctgtctcactgtttcttctcccactcctccccaggctccttctgctccagccatgggctaccttgctgttctcagatatctcatggtgttcctg

SEQ ID NO: 47646 - DNA, 1033 bp, Homo sapiens
ttctatgagaaagatgggtgcctggggatgactgattagggtctgagagggcctggaatgttacccttaggaagcctgttgttccctgatggagtatacagtgggctcctgagtactcaagggaaacaaagatatatccttttttgtgaccatccagaaaggcatttggtgcccactcattcttttaaaaacttaaatattacaaaagtaacacattgcttgttgtaaaaattattcacactgaaaagaagtttataaagtaaaaagtgaatgtgccattcttcttctcccactttccagaggcagccagtgtttgcagtgggtatgtgttcttccagacattcttatccacaaatacaaaaggacatgcctgtggaggggcacatatgatattgtgctttttaaccaaagtgggaacattttatatgtgttgttttgcacatataaactatcatagatattgtacagtggcagcaaatctagaactcccctgttctttctggtagctctttgacacccacagatgtatgggcaacgtgttggatatcgcctggatgagtgctgatttgtctagctgtgtcccaactgataaatatttagactgtttctagtttttcccttttacatatacaagttgaatatccctaatctgaaaatccaaaatctaaaacattttgagagtcaacatgatgctcaaagaaaagcctcactggaatattgtggatttcagattttcagattaggtttgctcaacaggtaagtataatgcagatattccaaaatctgaaaaagtctgaaatctggaacatttctggtcccaagcattttggataagggatgctcagcctgtagtgcagtggggagcatccttatctgtgtgtctttatcctcctgttaaagtacttctgaaacactgagtgctggaagtggaattgctggggcaaaaactctttgcaactttacagtgcctactgctggaatgccctctgaaatgcttgcagttatatttctgcaaacaggatatgagtatgcc

SEQ ID NO: 47647 - DNA, 1050 bp, Homo sapiens
ctcgagcagacagaggccgtggagccagagccaagggtgcaggggaggcctgggccacgcagagaagtgaggtgtgagagaggagagggggaggcttggccgtggtgggggagacagcatttcgccccacagctctgaagcgcaggggccacactcttctattgaagattgccaccagccccctgcccctcaaccctggtaataagcctgcccaggctaggaagagaaatagagccagatgccaagacgaaagccaggaagaccccaggccagttcctccacaccacacacacctctggtgggttgagggcacaccttcatcactaagaatgccactgtcagcaggcaggcaggagtttctattgtctggccaggggtgagactctgcatgcccgtctggtgaatttgccttccctgagtttatgcacatagatgtctcctctttgggtagtagccagagttcaggctgcagatgcccagtaggtccccatagtgttcggccataaagagcttccacacgggagctggagcccactgaggcctgcggagctgctgtactgccctcggtgggaatgggtctgttcctactggactgtggaacaagggtgcagagagcaaaggggaccctcttctgctcttcatcctcctgtctcctcacccatgtcagccttggcaaggacacagggcctgtggggtcggggaggggcagtgagatgcagggaggtgtttgttagtcacttctgagcccccaggctgccttaaagaccctcccctacccttggggcccagaatgaggacagggtggtgatcctgggccagggccctcaggaaccagagagctatgggcaggggtgggcctgctcttctctgtgactccacctagtgtccctggtcagcagtcttcctcacctcatgccggggagagtaggggcgaggagagaaggggggcccccagcacactctgctctcccagggaggtggggaggcggccgcagggcagcggccgcagggcattcagttacctggagaggagggctgtgggcttgtcag

SEQ ID NO: 47648 - DNA, 1045 bp, Homo sapiens
actctcagataccctcttctgatcagcatcttcccttgagacaaggcacccccttgctcagcttagaactaagcccagctccagaccagaactttgaatctggttcctgtgtctttcccacaataggaaatgccacagaaacacccactgggggatgattatgagcagctgtgatatcaccccaggatcaggttctagcatctatttaggtcatccctgccaagagctgacttcatgggaatactccagactcactaaagggcctccctgccccacaacccttgggaataatgcggctagctaacttactgacagccagccatggaccacgcaaagctgctggtgaaagggggtccctagcttctcagtgtgtttgagccagcaggatctgtcttgacataggccctctctggcctggctcatggtatggccccctcccctggtcgcccccagccgtcccacgaagggtgttatgcgaaatgtttcccatgcaggaattggctgaattctctcaacatccctgtgaggtagattctcttactgtctccgttttatgctgagggtcctgaggctcagaaaggggcagacacacatttaaggtcccacattagtgagcagtggagctgggattgaacccaggtctgcctgactcccccgattgtctgcttgttgcccctgagccctcctgcctctcctgcctccacttccctggtaacccctgcagctgagcaaaagactggaagcacatccccagctgtcaaggcttatgagagaaatggctacctgagccctcagcagcagatgggggcgggctgaagcctcctgctccctgggggtcaggtgggcagcactgatgctcctgtccctaagtgtccatgtgtgttttccccagggatcagccagaggaggagcgggggaagcaggagtcctctcctagcccatcttgggagggctaggcgcatggcatagagggtggcgcttcaaggaggacagttaggcgtagtgcctgggagtagactcagcaggccccttgcaggcagcagct

SEQ ID NO: 47649 - DNA, 1047 bp, Homo sapiens
cattgggaggctgaggcacggggaccgcttgaggcctcaggagttcaagactagtctgggctacatagcaagaccccatctctacaaaaattaaaagaaattagccaggcatggtggcacatgcctgtagtctcagctactccagaggctgagtcaggaggatcacttgagcccaggagtttgaggttatagtgagctgtgattgcaccactgcaccccagcctgggcaacagagcaagaccctatctcaataaaataaaacaaaactaatttgtgtttgtgagaagaaatctgaaaaatcaagaaaaatataaagaggataattaaatgtttatttacccataataccactaggtattaactagccttttttcttaactatgtatgtgtatatttatattaatgttttaacttgcttttccacttaatatagtgtaaggatttccacacatccttaaacatttctgaaatctcttttaaattgctgcctggtattctgtcatatggatatattaccatttatttattggacacatgtagtttacttacagtttttcactcttactaaagatgctgtaaatccatgtgcatttgtttagctatgaagaggtcaacttttataaacaggtcatcataaatttatagaagtgatgggagttattggatcaaagaaaatgaacattttaaagccttttgaagcataatgctaaattgctcaccagagagttgcaccaatttatagtcccccaagggcatatgagtgtgcctgtttttccccactctcaatactaggcattatcatttataaatatttgccaaagtggtaccttgttttaatttgaatttctttgtttcatagtgaggtgaaacttttccttgtatttatccataatttatacttatttttatgaaatatagatgcatacactttgtcgattttcctttggaatgcttatgctttccttattgaattgaagcactttttatttatttattaaggaaattaattgtttaggtcaaatatatagcaaatacttttttcagttt

SEQ ID NO: 47650 - DNA, 1050 bp, Homo sapiens
ttctcaggtccaaaaaattcttctggaatcattgggactttagtttccccccatagtttgtttttctcagaagaactataattcatagcatactactgatttccaagaatgtgactgcctgttggtttgtaatcaggttgagttttgtcttgtaaaatttagaacttagaaaatttaaattccatccaagcaggaatgacagatgtgaccttatctgtatgttgaatgtctgagcaagacttacatcctgagaaaaccagtacctgtgaattccctccagcagcacctccctccagggacccaggtctggccttgagaccttgagagctctgaatggctggttaaaatattatctgcgacagtccacttgcaccagatcaaactatcccctcctaaaatatgaaatacctcattataatgagccataccttgatttctggagataggtgaaaactgttagtcatggacataatttgggaagtcctggacaccatattacctaaatgaggctgtataagtaggttcaagtacttaacaagtacttccagtctttctggaatctccacctgaaacaggaggatttcatataatttatcatttaaactgggaccctttgagagtaattactaataacatcaggacaacagataaaacagatataagctagggctgtcttggcaaacttggacacatgatctccctaccttgaagatcctacacccttgggtgcacaggtacttaaaagacccccatcatgcaacccttgctgctttacagactttgctcttgtctgaccctaataacttgtgatgaagacttgacaagaccttgcaaaaccagtctttctggagtctccacctgaagcagaagaggtcctcagcaggggtatggtagcatggtgccagtctcagagcaatcctataaaaccttttaaaagcattggccagtgatcaggtggtagtaggccccatctctgcttgtacatctcagtttcacttgaaacttttcagagaagattatgccatgatactggaaagaatgctggatcaa

SEQ ID NO: 47651 - DNA, 1007 bp, Homo sapiens
cttctgcggccaaggtgccagaacaccaagctggccgttctctgggagccgggcctgcccctctcagaggcatccaggccatgctgctgcgccctgggccgttccccgggtgccccgcccactgccgccctcccgcctgcaggtgtggtcatggtgttcagcacgagtgccttcggcgcctacttcaagctgacccagggtggccctggcaactcctcgcacgtggccatctcggcgcctgtctctgcacagcctgttgatgccagcgtggggctggcctggctggccgtgggcagcatgtgcctcttcatcgccggtaagggggcctgtgggaggctgggcgaggagtgggaggtgatccccccggccctgctgtggcggctcccggcaggtggggtcttccccagcctcacctctcctctcgtaagttccaagctctgcatttctagctctgaccacatgcagctgtggaactaggcccctctgcgttcctttcacttaatcccctgagcagccctcgagcaggccccgttgtgaccccatctcagagacagagcctgtgcctgaggagggaagaggctggccgaggccttggcaggaaagcatggagctggtgggaccacactgggatccgggaccccacagccccacaggctgggaagctgggtctcttggctctgcagcaagctgaggagcccagccctgcggaccctgatgcctgtcttgcctgtctcgctcccacaggctttgcggtgggctgggggcccatcccctggctcctcatgtcagagatcttccctctgcatgtcaagggcgtggcgacaggcatctgcgtcctcaccaactggctcatggcctttctcgtgaccaaggagttcagcagcctcatggtgagggcaggctccaccagcaccgcgttcgtgcagtcagccgagaagcactttctaaaaccacttgtattgcagaagacccagggtcgtggccttacatgcagcctgagccccacc

SEQ ID NO: 47652 - DNA, 1050 bp, Homo sapiens
tggagaggtgggggagatgatggggaggtggggggagatgatggagaggtggggtagacgatggggaggtggggggagatgatgaggtgggggaggtcatgtggggggagctgatggggtgggggaggtgatggggaggtgggagaggtgatggggaagtgggggaggtgatggggaggtgggaggtgatggggaggtaggggagatgatggggaggtggggggagatgatagtgaggtgggggtaggtgatggggagatgatggggaggtggggggaggtgaggggagatgatggggaggtgcacatcaaaatgtgaacagtgctgccctgccacttgactttttgaaagctgccttgaaaataagctttctgggtccaaatgatcctttgctcaagcaaagccactgatacatggctttaggttagtaatatataaaacccagagcttatgagttcggggaggaagtattcacaacattatggttatataaacatcgttactgtaaacctaatgaaatggacttaaagacataatcctatgtcagtcagcctgtgttactcaaaaaggaatattctaagcagcaatataaaatggattttctcttatactacatcagttaattaaaataatgccagatttgagtttgtaccttatttaggacatgataatattagatttcttttttacctggagttttgttgttgttgtttttccttcttaagaaacgtgtcattttcttcaccatatgactgaggtctttcccctttgtaataatgctagctgttgcatggaatccatttttttctccttctgacctcttgttttgggggacctgcggcaaagctgttttcgtttcattgattcctgggttaatttctctgcttcttgggttccacaccttgctccttggattccatttcttttttctttctttttttttttttttttgagacggggtttcgctcttgttccccaggctggagtgcaatggctcgatctcggctcactgcaacctccgcctcctgggttcaagtgattctcctgcct

SEQ ID NO: 47653 - DNA, 1041 bp, Homo sapiens
tggtactgccccttgttctgaggtctgaccctgtctgacatgaaaatcgccactctgttttggcagtaatttctaatattgtcttattccctgtgcctttttattttatttattattatttttttaattttcctggtttccttggtgtcttctaaacctgtgcctttttcgtagcatcctgtgctcttctttttaatggcttgcctgtttgaatttctctaaggatacatattttcactttttaaatatcagctttaggctgggcacagtggctcacacctgaaatcccaacactttgggaggccaacgtgggcggatcatttgaggtcaggagttcgagaccagcctggccaacatggcaaatccttgtctctactaaaaatacaaaaattagccaggcgtggtggtgcatgcctctaattccagctatttgggaggctgaggcaggagaattgcttgaacctggaaggaggaggttgtagtgagctgagatcacaccactgtactccagcctgggtgacagagcatgactctgtctccaaaagaaacaaaaaacaaaaaaaaccagctttgattgaggcattatttacttaagtaaaattcaataattgtaagtataaaatttaatgacttatgacaaatgtatacagtcatgtaactgtcaggcctctgagcccaagcctgcacgtatacatccagatagcctgaagaatcacaaaagaagtgaaaaatggccagtttctgccttaactgatgacattaccttgtgaaattccttctcctggctcagaagttccttcactgagcaccttgtgacccctacccctgcccgtaagagaacgaccccctttgactataattttccactgcccacccaaatcccataaaagtgccccaccccatctccctttgctgactccttttatggactcagcctgcctgcacccaggtgattaaaaagctttattgctcacacaaagcctgttggtggtctcttcacacggacacgcatgacatttggtgccgtgactcggatcgggg

SEQ ID NO: 47654 - DNA, 1047 bp, Homo sapiens
caaagtgctgggattacaggtgtgagccaccgcacccggccatgtgactatttgtgaaggaaatatttaaaggacattttgctaggtgccaacttaccttcccaaaaacattctgccagtttacactcctctcagcagtgtaggaaagtgcccatttctccaccaccatcaccatcacaaacagttaccagttttcttactgtcaaccaacctagtaggtgaaaagattttactttctttagttaccagtaatgttaagcatctttccagatgtttattgatcacttgaatttcagcattggctatttgcttcttttgcccattttctaagggagcgtccatctttttacacaagatactcgaactacaggctgaaggcgaacagagggccccaagggttgcttgtgatgcggtaggcatccagagagcccatctaggtgtaggttgccaaatcaaggaggccttcctggaggaggtggtgttcatctgctgggattccctgttggaaatgttaaatttgctgaatgaatggatggatttttttctagaataagaatggaacagttgatgtccataacccaggaggagactgagagcctgcggcgacgtgacgttgcctgtgagttttgggatggggagcttgtgagcacgctgcctgctggctgggctggcagggtggatggccctccctctgttggccatgcatggagggccctgagtgttagccctcgagaggggcagtcaagtcctgccatggagcacaggctctggggtcagcctagatgtggatgcagagtcccagttcaaacacccaccatgtgaccttagggacattactgcttactgctccccaacttttccaaggctcggttttcttagctataaaatggaggaaatgggccaggtgtcggggctcatgcctgtaatcccagcgctttaggaagccgaggctggaggatcacatgagcccaggagttcaaggctgcagtgagctgtgatcacactactgcactccagcctgggtaatacagcgagaccatttctcag

SEQ ID NO: 47655 - DNA, 1053 bp, Homo sapiens
cactaattgactagcaagaagatcccttaaaaaaagtcacgaggccaggtgcggtggctcacacctgtaatcccagtgctttgggaggccaaagtgggctgatcatctgaggccaggagttcaagaccagcctggtcaacatgttgaaaccctgtctctactaaaaatacaaaaaattagctgggtgtggtggtgggcacctgtaatcccagctactcgggaggctgaggcgtgaaaatagcttgaacccaggaggcagaggttgcagtgagctgagatcacaacactgcactccagcttgggcaacagagtgagaccctgtctcaatacaaaaacaaaaacaaactgattgggagctctcaccctgtggatgggcctgacctggataggctgtttgttggggaactcccggtgtcagcatatttagatttttcttcttggtctctgattccccagaaaggtcttcttttgtctgctgtctgggagataaaggtctggctaccagaattctgggaactgactggatgagatgagctgacagtgggttctcaacaagctttatgcccctcttattcttttttttttttttttttttgagacagagtcttgatctgttgcccaggctggagcacagtagcatgatctcaactcactgcaagctccgcctcccaggttcacgccattctcctgcctcagcctcccgactagctgggactacaggcgcccaccaccatgcccagctaattcttttgtatttttagtagagacagggtttcactgtgttagccaggttggtctcgatctcctgacctcgtgatccgcccgcctaggcttcccaaagtgctgggattacaggcttgagccactgcgcccagccacccctcctattcttttaagttccagaggcagctggtgctgccagttcctgaaacttttgaggattctgctgtgtacatttggttggttttcactgctccctaccaccagataaggattccgctttcatgggcctactaagtcagttacaacgcatctattgtagaaaataaggcg

SEQ ID NO: 47656 - DNA, 1034 bp, Homo sapiens
taatgtgagataacagaatgaggtggaaaatggcctagcaggggaattcaaaaacagcaaatcatggcattgcagaatgaataaaccaattttacaccataagaagcagaatcttcgctataaaatatggaaattgcttgagaaatcacgcagcctgcatattcatgagcattagtgctccccgtgtttcttttggatttttcgcgtcttctcttcctggagctccacctccttcccgtgctcgatctttggccccaaccccaaaaggatgttttcttttcctggtatcttactgtagccagttccacaggttggggaaaggaagccctcttaacactggccctttgtgtgtgtggatgggtgggtggggcatttcctgccttctggaagcttccctggggcttttgtcttatgtgggtttgacatcaatagcatggctgaattgagggttccagagggagcgtgagcttatggccttgtcatgttgtgtgggactaaacatttcctaatatctcagatctgtagacctgaagcaggctaaatcttagagcagaacagattgggctggtcagaatcttggacttgaaaataagacagagctgaacttggtgacatgcacctgtagtcccagctactcaggaggctgaagcaggaggattgcttgagcccaggtatttgaggccagcctgggcaacatggtgagactcatttcaaaaaagaaaagaataggatgactgtcaccaccatggtcatggataaatcatgtgatctctcctggattcagtttctttataagatagactgcatcagaatttctcagtgttggcactattgacattttgggccagatgagcttgtgccttgtgggatgtttagcagcattcctgacctctacttgtagattcccatatcatcccctagtcgtgacaataaaaaatgtatccagacaatgctgaccttcctcttgggggcgcaaaatcactccctgttgagaaccactggactaggtgatctttttttttttttttttttga

SEQ ID NO: 47657 - DNA, 1045 bp, Homo sapiens
ttctactttgtgatgtttgtgtacccgcttgtacacactttttacctcctttctgaggctagcgactccttggtgcccagtggtgttttatacgtagtaggtgctcagtagatgttgcatgcatccatgattagtcccttggtcacaaactgttgtgctttttcctagtactccacccacctgcaccttgctgaggactgtatgaagcattaccaaggcaccgtagacaaactctgccgagtggagcaggtaggactctccttctgccacggcaagtttttgccaggcctatttacccagcagaattttaacatctgcccttgaacatcctgcagaatcataggaaatagagacgggaaggcctgctagatcatgctgtctcaactctggagccagtgcggttccactgtccatggtagggactagattggtctggaatgctgtgccgtttggattttgcatgcctattttgaaaggctctgttttccctggaatgagtgaagaaagatgtgtggggttctgagccctacattgacaggactggcagaattttatattctgaatgtgttctactcttgccatggccagaccagctttggagacctcgaggctgacagagggtagagcagtagcaatcagaaatttgcccaaagcatccctgatcacaattgggattgtaaattgagaatttggggtttgagttctgtctctgtcactgattatttgatgtgcctgtttctttgtgtttcatttttttcatctgcaaaagggaaatcattgctgacatttttcaaggttgtcttgtggagtcactaatcctggcttagattcatcctaattcttcaagtgtttcaacattataaaaccatggttcaaattctaagcgaagagaagatgttaaaagattctgaagccggctgggcgtggtggctcacgcctgtaattccagcactttgggaggccgagacgggcggatcatgaagtcaggagttcaagaccagcttgggcaacacagtgaaaccccatctctactaaaaatacaaaa

SEQ ID NO: 47658 - DNA, 1013 bp, Homo sapiens
ggggtcatacatcatcgtgtttgtaagagaagatggtcattttattctctgtataaaacttagctctaaagcagaaactaaagcagcaaatgcaggaaggctgtctcgccatcctcaagactcagcagctctcattctccagtggtgagcacaccatttgtgctgctgctgttgtcgtgaaatataataacagtggaagtcacaaaaatgtcccctgcccagccccctcgccgcccttgacctcctgcaggccatgtgtgtattacttgtctagtgatgtcctctcaaagtgctgtacgcgagctcggcgccacctccgcctccctttcagagcctgctccccgccctctctgctcgctgcattgtggtgttctcttctcaaggctttgaaatctccccttgcactgagattagtcgtcagatctctccccgtctccctcccaacttatacgacctgatttccttaggacggaaccgcaggcacctgcgccgggcgtcttactcccgctgcttgttctgtcccctccctcggaccaaacagtgctcatgcttcaggaccttgtttgtcgaagatgttggtttccctttctctgttatttatataaaaataatttatcaaaaggatattttaaaaaagctagtctgtcttgaaacttgtttaccttaaaattatcagaatctcagtgtttgaaagtactgaagcacaaacatatatcatctctgtaccattctgtactaaagcacttgagtctaataaataaagaaatcagcaccccttcccggtgtccagggggctccagtctggctttcctttgggcaacggaaggagaaagcttttgcagtggttcatcgcagaggaggcgaccacctccggctgtggcatggagtcttctggacccaggtccccgttgcttgcgttagatctgtagccgccttacactggggactagccatggagcttgtcttgggcccctagcagcaacagcgtgctgcctagagatgaggccattctt

SEQ ID NO: 47659 - DNA, 1042 bp, Homo sapiens
ttcatccatcagtccccagcagcaccccctcctttccctctcgtttccatgccagccgtgggccctgatctggttcctctcaggaacatgtgggagttgaaaaaaaaattggtattggggtttcaggctgatccgtgtggacgttggcggcgaagactgacagttctcatggtttaggctcatctccattgccctgtttatccagaaaatgggatcgtgatccccgcggggttggagtgtggacggagtgaaagaatccgggggaaattttttttctaaaagtcaaagcgagattgttactattgtgggctcttggccgaggtgtgggcataggggcgcagagaaatggtcatccctgggcctgccaggaagagaagtgctggcctttctgtatgagaacctcagagcagaggctgtttctttcccttctgtctcttcccccttcagtctgacttggcgggtgtagctgccattttcccaagtatttcatttactgtagcttagcctgatttacagcctggaataggactcctgagtactttacctaagaacctgtttcactgctgagttagtttggtccatttgtacacatgacaattagagaatctcgtagccaagtatgaaaagaatctggtaaaccgccaatgaattaaaccaatttgttgggtgggtgtacataggtgttgttaactcatgttcaagattcttggatcaacatccaaggtatttagcgctaactattaggatcagcctaggaggaccaagagtaacactacgcaagatagaatggttaagtccaggagatttagagacaagttttttttgtttgtttgttttgagacggagtctggttctgtctcccaggctggagtgcattggtgcaatcttggctcactgcagcctccgcctcctgggttcaagagattctcccgcctcagcctccccagtagctgggattacaggcatgtgccaccacacccagctaatttttttttttttttttttgagagagtctcactctgtcacccaggctcgagtgcag

SEQ ID NO: 47660 - DNA, 1014 bp, Homo sapiens
tagcaggtgcgagggggtcctgggcggctcataccctctgtcccgcgtcctccgcatcgcgaaggggaggctcggagaccaaggtccgtctgccgcccggaagggtcagccatcccgcggggcatcgagggggacttccttcctgttcccaacccacctccctgcggccgccgcggtcctgcgatcctggggccccgcgcggggctgcggtgagagggggcgcgcagttggcggatgtacattcattcgagggacccaggccaggcgagagggcggccaaggtcttacagtccgtcaggagtttgcccacggaggggtggagggagagtccccctccaagtcttttctcagtagatttggctaaggaaggagtaggtgaggagggtcgaggccaattatcaaaaaatagccctaggggccgggcgcttccgcctgtaatctcagtactctgggaggccgaggctggaggatcaagaccagcctgggcaaaatggcgaaatccctctctacaaaaaatacaaacattagccagggtggtggcgggcgtctgtagtcccagctactcgggaggctaaggcaagaggatcacttgagcccgggaggcacaggctgcagtgagctgagatcgcgccactgcactccagcctgagcgacagagcaagagctgtcaaaaaaaaaaaagtaaaaattttaaaaagaaaaggagaggaaaacagagccctgctcccttatcctgcacctaaaatggtcctgcccccaagaacccccttaacaaccgctgtatccccccatccccgcgccgtaacaatccttggctactaagtagtaattcttttatttattttttatttatttatatttttgagacggagtctcactctgtcgcccaggctgaagtgcagtggcacgatctgggctcaccgcaacctccgcctcctgggttcaagtggtcctcccgcctcagcttccagaatacctgggactacaggcgcgggccaccacgcccggctaatt

SEQ ID NO: 47661 - DNA, 1021 bp, Homo sapiens
aagtgctgggattacaggggtgagccacctctcctggactaagtagcaattccggctcccttttctgtggctccctgccttgtgcgtgtcacagcctgggcgactcctcgccctgccttccgcgccgacgttgggcgggcagggcgcgcgggggcactggcggcgcgcagacccgggcaggcggagcgcgttgacggagggcgctcgggcagcagaattcgcgcgtccataaatcactgcagtcatgtgacgagcgccgctccaaagctctggactggctctgcggcagatgggcggcggctgaggagcctaactcaacctggactagtcgtggaagagctaggacttagaggcgcgaaagtgactcagcgaggccggagcgcagggtggcgtccagggccccggggacgtcggcgcctatgggtgaacaggcagcctggagggtggggacttcgaatgctgggctgagaagtaggctttatcctctaagggtagggagcactggagaagggtgtgaacctcatgagtgacagcatcaaatctgccaattagaaaacccgctcccgtgaaaaccaagacagaagcagtgaggagagaggggcgagtcaagactgcccaggctctactgggcacagcggctcacccctgtaatcccagcactttgtggggggtccaggcaagtggatcacttaaggtcaggagttcgacaccagcctggccaacatggtaaaactacgtgtctactaaaaatacaaaaaaaattagccggatgtggtggcgggcgcctgtaatctcagctactcgggaggctgaggcagaagaatcgcttgaacccgggaggcagaggttgcagccgagatcacatcactgcattccagcctgggcgacagagtgagactccattttaaaaaataaaaatcaaagactgcccaggctgccaagcaagcatgttaacaccttgatctgggtgctagcgttggagaggtccaggattgaatcgtgactcccctgccttgtggct

SEQ ID NO: 47662 - DNA, 1065 bp, Homo sapiens
caactaatacatctctgcaagctccttctatgaaccagttttcttgctagtggcccgggcagcagtggcagggctgccctccatagctctccacctcaccacgttcacacagtcccctggcatccaagtcccttcctggccctgtgaccatctgtcctcaaccctttcctcacccttacccccagcaactgacgaaccacatccgggacacactgccggggctgcggaacaagctgcagagccagctactgtccattgagaaggaggtggaggaatacaagaacttccgccctgatgacccagctcgcaagaccaaggccctgctgcagtgaggctcccccagctcctatcactgaatccccgcccccagcctctcagcgtggggctctcccagggttccctttgctgggctgctcctgccccctcaggccacaccactctcccaccaggatggtccagcagttcgccgtagactttgagaagcgcattgagggctcaggagatcagatcgacacctacgaactgtcagggggagcccgcattaaccgaatcttccacgagcgcttccctttcgagctggtcaaggtaggtcaggcagccctggggacaggatggctcaggactccccccaccctcactcaggactctctctgcgtgtgtttttgctggcccccaccccacaggccctgatgcccagccctaggtgtggggtgggccctgtcttgacctcccaggtagtaggacaggccctgaccaggcttttctctgcttttctacacagatggagtttgatgagaaggaactccgaagggagatcagctatgctatcaagaatatccatggcattaggcacgtattggggcctgggagggtggctgaaccccagaagtagggggtctgggacagaggcacagggagtgatgaagtgggcctccctcaggaaggactgaaagctctgttccccagtcctctcgaccccaactttctggctccctgcatgacaggctccagcttggggaggtggacccgggccaccccgcctactgcaacttgctgggccaactg

SEQ ID NO: 47663 - DNA, 1052 bp, Homo sapiens
ctcatcgatatcgagctggcttacatgaacaccaaccatgaggacttcataggctttgccaagtgagtgctcccccaggcaaaaagtgagtgctccctgggcagagaaggtaacgtgtgtgtgtgtgtgtgtgtgtgtgtgtgtgtgtgtgtgtgtgtgtgtgtagagcccaggtctgctaggttaaccctctgggtcctgtgcccactaagcagtgggcagtagagctgggcctcttgagaagttctgagactcctcccctccctcccattagtgctcagcagaggagcaaccagatgaacaagaagaagacttcagggaaccaggtgagtggggcccagcaccccagcccgagggatggagggtgccggacggacaccagactctgagagccccctcccctgaggggaagggtcccacgggggccagggacctgtcagctgccagccacaagcctcccactctgcctcagtaaccctctctcctctctccccgatgcctctcgtggttgctatggttacctctttgcaggatgagattctggtgagtaccaggactggggctctcggcttgtgtagtgagggggcggagggtccatcggcagtggggatctgcaacgggtaggagggcaccctttggctgaagctgcttgtacacaccagcccctggcatttcacacctgccctcaggccagaggcaggcccagccgcatccacccgtccatctgtgtgcacgagccaagcacctacttcaggcagagctagaccgtgtggggctgggtgggtgagaaggctgggcctggcacggagtaggtgctccttaaacatctgctggatggagggatgcacgtgagcaagacacatttttaagaagctgacagccatcgcctccggacttgaatgaagagacgaatgagaagtcaagagaagtcaagaagtcactgctcacctggcctcctgctctctgtccttagatgtctgcggaaacatccctcgtcagaagcgcttgctcagttgtacacatgagcccgagggtcctcagcttttctttcc

SEQ ID NO: 47664 - DNA, 1098 bp, Homo sapiens
gaacccaggaggcggaggttgcagtgaaccgagatcctgccactgcactccagcctggccgacagagcgagactccatctcaaaaaaaaaaaaaaagaagaagaaatataatgaggggctgtgcacggtggctcatgcctgtaatcccagcactttgggaggacaaggcaggaggatcacttgagcccaggagttcaagaccagcttgggcaacacagtgagactttgtctctacacaaaaattttaaagaatagcgggggttggccgggcgcggtagttcatgcctgtaatcccagcactttgggaggccgaggtgcgcagatcacctgaagttgggattttgagaccagcctgaccaacatggagaaaccccatctctattaaaaatacaaaattagccgggcgtggtggcacatgcctgtaatcccagctactcaggaggctgaggcaggagaattgcttgaacccgggaggcggaggttgcggtgagctgagattgtgccattacactccagcgtgggtaacaagagtgaaactccgtctcaaaaaaaaaaaaaagaatagctggggttggtggtagcacgtgcctgtagtcctagctactggagaggctgacattggaagataactttgagcccaggaggttgaggctacagtgagtggtaatctccccactgtactccagcctggtgaaagagcgagaccctatctccaggaagaagaaaaaaaaaaacaactgagtagacaagagttctggtggcatgataggtcctaagtcccctcccggttctgtgaccttggtcagatgacttttcctgtggacctcagtgtcctcatctgagtgagaaaagcgcggtggggaggtgaatcttccagtctacgcagtgtaggagccgcgtctgaaaagccacaccagctcacagtcccagcagggcccggtggggcggccagggcggcacaggcatcaggtccccacctccttccctctttgcctactcgcagaccaaggagttcatcttctcggagctgctggccaacctgtactcgtgtggggaccagaacacgctgatggaggagtcggcggagcaggcacagcg

SEQ ID NO: 47665 - DNA, 1030 bp, Homo sapiens
gtgtgatggcacatgcctgttgtgctactcaggaggctagagtgggaggattgcttaagcccagaaagttgaggctacagtgaggtgtgattgtgctaccgcactccagcatggatgacagagcgagacagaccccatcttaaaagaaaaattaaatttaaaaaaggccgggtgcggtggctcacgcctgtaatcccagcactttgggaggctgaggtgggcggatcacgatgtcaggagcttgagaccagcctgaccaacatggtgaaaccttgtctctactaaaaatggaaaaattagccgagtgtggtgacatgcgcctgtaatcccagctactcaggaggctgaggcaggaaaatcgcttgaatccgggaggcggaggttgcagtgagctgagattgtgccacagcactccagcctgggcgacaacgcgagaactgtctcaaaaaaaaaagaaaaattaaatttcaaaaaatattaaaaatcaggaaaaagggatagtgagtgattgagatgttactgttgtagacagggctgtcagagagggcctttctgatggggcgataggtaagtagagctttaactggaagcatctggaggaagaacttcatcgttgggcgctttctctttggggctaggctatgccttctatgagagcagtgggctgggcttgatgtctcattcattgctgcgctcctggaccctttgtcagttcctggcagagagtgctcactcattcctctgagtgactggttacaagccactaacctaaaaccaggaagaccgtcttcctcggtcccttcttgtatcatgtgtagacagctcatccaacatacatttcctgaagattggctgtgtactaggcactggccttcacagcttctacaggcagaaagggcaaagatgaaagccccaaggaagggttttatccaatgagattataaacccagtgacagatgggcatggtggctcacgcctgtaatcccagcacctggggaggctgaggcgggcagatcacttgaggtcagga

SEQ ID NO: 47666 - DNA, 1027 bp, Homo sapiens
ttttgctatgttgcccaggctggtctcaaactcctgacttcaggtgatcctcccacctcggcctcccaaagtgttgggattacaggcatgagccaccacgcccggccaagaccagcgaattttttaatttttttgtagagacggcgtcttgccacgttgcccaggctgctctggaactcttggcctcaagtgatcctcctgcctcagccccccagtgttgagattacaggtgtcagccgctacacttggccactaagtgttatatatatatgattttcatggtttctcacattaaccagctaagaaaggtgttgtctgcacttcacaaattaagacactgaggctgaaaaatgtgaagcaggccaggcatggtggctcacacctgtaatcccagcaatttgggaatccaaggtgggaggatcacttggggccaaagttcaagaccagcctgggcaacatagcaagacctcatctctacagaaaatttaaaaaactagctgcatgcctgtagtcctagcagtgagctatgatcacaccacttcactccagcctgggcaacagagcaagaccctgtctcaaaaaaacaaaacaaaacagaaatgtgaagcaatttgtactaggtcacctagatagtgaacacacctggactgtagcccagcatctctgatgcctaagcctctaccaatcaatggagacatgatattgtattgtgaaaagtgatttataaaatctttacaacgttgtgctaactagagctgtcccgccccagtagattaagaataagaactatagatatgtatactgatcccttgttgtgtgctgggtaatttgctaagtgtttagcctgaatccttataacaaagagctagacatcatccctaatttatcctgtaggaaacaaaggctcagaccaggtcagctaacttacctaagatgacatcccccatttgtgcccgtttctgtcctttcagacatggtcgcagttctaggggagaccacaggacaccgcaccctgaaggtcctcagg

SEQ ID NO: 47667 - DNA, 1050 bp, Homo sapiens
catggaatgtgaaggagcacctttgtccccagagagatttagataaaggttcaaggtgaggctaccctcccctccctgaggctgattttggtgagaggtgtggtcatcttgtagtatcaagactacaggcatgggcttgagaattaggaggagcctgagtgagaatcctggctctcttcccagctttacaagcctggacaaatcctttgacctcgctgagtctcaggttcctcatcagaagtaagaggacctcccatatatcttccagggcacttatcggccttggtaatggatattaaggccactggctttggaatccagcagactttgtttcaaatgctgactcggccactttactagctgtgtgatcttgggcaaattactttatctctctgagccttgttttccttatttttatttatttatttatttttttgagtctcgctctgtcacccaggctggagggcagtggcacaatcttggctcactgcaacctccacctcctggcaattctcctgcctcagcctcctgagtagctgggactacaggcgcacgccaccaggcctggctattttttgtatttttagtataggcgggatttcatcatattggccaggctggtctcaaactcctgacctcaagtgatccgctggccttggcctcccaaagtgttgggattacaggcatgagccaccacgcccggcccttgttttccttatctatatctgcagtaataacagtatttacctccaagattgcaaggatgaaaggataatatatgtaaaagacaccctaggtgccggcacctggtggatactctatgatcaccttcagcttcacacagcaggctaaggccattctttgggaacaggaagaccaggctgttcccactgtgtatgggtgctgctgagtactcagaggcagtgggcagttaagaggagaagagttctgggatcagaaaagtgcccaggactggccttttattcatatgttcaagaggtgttcattcatccaggccctggatcaggctactggaggtaaaagaataag

SEQ ID NO: 47668 - DNA, 1054 bp, Homo sapiens
agacaagctcttgccccgtcatgtaggctggagtgcatggcataatcttggctcactgcaccctcaacttcctgggcccaagcagtcttcatctcaacctccccagtagctgaggccacaggtacacaccaccatgcccaactaattttttttaatttatatttatttatttttgagacagggtctcactctttttgcccaggctggagtgcagtggcacgatctcggctcactgcaacctctgcgtcccaagttcaagcaagtctcccatctcagcctccccaggagctgggactacaggcgcatgccatcatgcccagctaatttttgtattttttggtagagatggagtttcaccatgttggccaggctggtcttgaacacctgacctcaggcgatccagccacctcggcctcccgaagtgctgggattacaggcgtgagccaccacgactggccgcccaactaattttaattttttgtagagatgaggtctctatgttgcacaggctgcttgaactcctgggctcaagtgatcctcccacccttggccttccaaataatccagatgtgaaccactgtttccaaccaatcaggagctgttttattcttactgtgttcataagcacaaaaagctgcagttcattttggagtggcaaaaaggcattttccttgggtaagagccaaggaacaaggaccggctggatgaaaggtattagaagagtgggtggccctggcttgggtttagaaccagaaaagccccaagatggaagaggctttagcatttttcaggccaattcctcattgcgtgaatagatgattgatggcccagaggcaggcagagaattgcctggagtaactaaaacacaggccacaggccccctggtatgtttaccagtgcctcagtttccctatctataatcagtttctaactgtactatatgtcaggcagtactaagcacttgagatgcattatcgcactgacacctcaaggtcaccacccaaggagggagatggtattttgcttgtgttttactaacgaggcagtaggaata

SEQ ID NO: 47669 - DNA, 1042 bp, Homo sapiens
acttcctccaacagctgacgaagctggatccctgggcaccgcctcttccgtccgcggcacccggagacgcccggaaatttgcgggcgcgccggaagttgaggggagtttcctgcgagctcggcttcctcaacatggctgcgcccttgtcagtggaggtggagttcgggtgagtcacagagctggggcgccgtggggatggattgaagtcgtcgggcccagaattcctttccttctgccgtggggcctgacacggccgaatcactgggtgtcccagtgcccgctgtgagctacgctacccgcctaggagagtctgagaggccagtctctcttggcagtgaggccgtctgtccggaaatagaggcgcacattgggagggaaatgctctctgtgtaccactcggtgccctgtgctccgccggagtcggaggtcgtgactgttagcaggcagcctctctctcttcttttccattcctatctcggaccaatcccatctgtttggcatctgagctcctagaacctagaaggaccaccctccacccgctgatttcattctttgggcagcagtttctttttacactgttattaaggtcttgtttctcgtgggatgtagtggccagggcgggacttttttctttttctttcctaagacttggggatggtaaacagacctgagcctccttcaggacagtcagtaaacttgctgattgccttctgcagaactggagtcaggtggagacacggggacaaataagaaatcacactgaagggaactaacagggacagtatagtatacacaagatgaaaaatgcagagattgggacacacaccagttactgaagaaacacagagcagggaggaagtctacccaaggcactatttgtgcttcctacaaacaggtttgtcatatggtttcaaagctgagggaaactgcagagcttagagagaaggcaaagaaacaggccttgaaagatgggtggtgtactttacagtatcacgtggaaaagaggaaataggtagggatgtgtgtgtgtgtgtgtggaat

SEQ ID NO: 47670 - DNA, 1721 bp, Homo sapiens
aggggctggcctgtggtcacacagccacaggtcacataggtaggtatctgcccacctaacgaaggtaaccagggaatgcaccaggtgtgatccttaaagtcgaggtacttttcatctttcaaaatgcattcgttggccaggtgtggtggctcacgcctgtaatttcagcactttgggaggccgaagtgggcagatcacctgaggtgaggagttcaagaccagcctggctaacatggtgaaaccccatctctactaaacaaacaaaaattagccgggcatggtggtgcacacctgtaatcccaggtactcaggaggctgaggcaggagaatcacttgaacccgggaggcggaggttgcagtgagtcgagatcataccactgcactacagcctgggcgacagagcaagattccatctcaaaaaaaatgcattattcttctcttatctttgtccatgacataagcaggacagcttaagttatagagggaggacgtgaagcccagagaaagatgggacttgcctgaggtcacacagcaggtcacagaactgtggtggggacctggctgtgctgcctccagcctctctgctgtagcacacctacccttcactgttccaaggagagctcgacctcaaaggtgttagtgctttggggtcaaggctgccttggggttcaatcctgtggctgtgccccctcagccttttttcttcccgtccccaggtgtgccacggaccacaatgtggacaacaccacagagatgctgcaggagtggctggcggctgtgggcgatgactatgctgctgtggtctggaggcctgagggcgagcccaggtggtgatctgaggggaagggtgctggggaagatggagaacagctgcagcccagagaggaaaagggacagcccagagccacagcctccaagccagggctctgtccactgccctgcagagagggaggggcatgtaccccatgggaacatctcacctctatcccctcaggttctacccagatgaagagggtcccaagcactggaccaaagaaaggcaccagtttctgatggagctgaagcaggaagccctcacctttgccaggaactggggggccgactatatcctggtgaggaagtctggctagaatcgggcttctgaaaggcggtagtatccgtccctgatagaaatctgggtataggctgggtgcagtggctcacgcctataatcctagcactttgggaggccaaggcaggtggatcacctgaggtcagaagttcgagaccagcctggccaacatggtgataccccatctctactaaaaatacaataattagctgggcgtggtcgcaggcgcctgtaattccagctgcttgggaggctgaggcatgagaatggcatgaacctgggaggtagaggttgcactgagctgaaatcatgccactgcattccagcctgggtgacaagagtgaaactcagtctcaaaaaaaaaaaaaaaagaaaaagaaatctgaatgtgactgacccacccgaaggctggatccttcggcaggctatctgggccagagcccagaccagatgttcagattggatccctatgttaaaagctcagactaggtactaagcctggacccctcagatagatcccgttgtatacactttactgagcctcgatttctgggctagagcccagggtataaattgagcctggatctctgaactagagctcagagtaggt

SEQ ID NO: 47671 - DNA, 1081 bp, Homo sapiens
ctggctgctattaagtttcaaaatttcttgttgaaaagtacaggcccaggagcaatggctcactcctgtaatcccagcactttgggaggccgaggcaggcaaatcaactgagatcaggagtttgagaccagcctagccaacatggcgaaaccccgtctctactaaaaatacaaaaattaccctggcgtggtggtcgcgccaccaatatcagctacacagaaggctgaggcaagagaattgcttaagcccatgaggcggaggttgcagggagccaagatcgcgcccctgcactgcagcctgggcaacaaagcgagtctccatctcaaaaaaaaaacaaaaaaaacggaaaagaaaaacgaaaagaggactggccgggcctggtgtctcacgcctgtaatcccagcactttgggaggctaaggcaggcggttcacctgagctcaggagttggagaccagcttggacaatgtgacgaaaccgtatctctaccaaaaatacaaaaaattagcccagtgtggtggtgtgcacttgtggtcccagctacttgggaggctgaggtgtaaggatgggttgagcctgggaggcagaggttgcagtgaaccaaagttgtgctactgcactccaggctgcttgacagagtgagaccccatctcaaaaaaaaaaaaaatggaaaagtgcagggatgtacacccatcagaagtgtattgctccatgaattttcacaagctgaaggtacctgtgtaacgatcacccagcatcctagaagctgcccctggcttttgtctatgtcactccctccccatcacaaggagtaagtagtcacactttcccatatatatatatatatatatatttgtcattttaaaaaatatatagtcatgtggccgggcgtggtggctcacgcctgtaatcccaacactttgggaggccgaggcgggcggatcacaaggtcaggagatcgagaccatcctggctaacacagtgaaactccgtctctactaaaagtacaaaaaattagccgggcatggtggcgggcacctgtagtctcagctactcgggaggctgaggcaggagaatggcgt

SEQ ID NO: 47672 - DNA, 1030 bp, Homo sapiens
cctgcttctcggtgcttctctcagggaaagtgctctgtgggttagagtagggggcctttccttttctggttctttggatagagttgagggtaggaggtccacctgaagcagaaccttcctgtgggttactcatgagccatcccttccaggccagctttgctccaatggaggacaaactcaaccaggcacacctcgaggtccagcagctgaaggcctcagtgaagaactatgaggggatgattgacaactataagagtcaggtaggcctcactggggccctggcccttctgagcagtgccctccctgcccccatcagactgggggctccctaccaggccactcccagggagggttgggtatggaagatggttttcatcaaaacgtggctctacctaagatgaaccacagtgttgttggtccctaggtgatgaagaccagattggaggctgatgaagtagctgcccagctagaacgctgtgacaaagagaacaagatccttaaagatgagatgaacaaagagattgaggcggtactgctttccttccttgttttcttctcctacccaattccatatctaactcaatgactgtgagtctgttccccttgtttgcctttgaccctacctgatttgggcaacaaaggtgagctcattttctcattggtgggctcatccactctaccctgtgcctctctctcctttgtctctttcttgtttcctctcttctctctctcatgctgctgctttgtcttttttttttttttctcttggttttcttctacctccttttcaattttcttaaaataacaacaacaaaaaaactctcctggctgggcacggtctctcacacctgtaatcccagcactttgggagactgaggcaggcaggtcaactgaggttgggagttcaagaccagcctgaccaacatggtgaaacccctgtctctactaaaaatacaaaattagccgggtctggtggcgcatgcctgtaatcccagctactcggaaggctgaggcaggagaatcgcttgaa

SEQ ID NO: 47673 - DNA, 1099 bp, Homo sapiens
ggggagactggttgaggtgggaggatagcttgagcccaggaggtcaggctacagtgagccatgattaggtcactgcactccagcctgggtaacagagtgagaccctgtctcaaaaataattaattttaaaaatgaaaaaatatatacatctaggtttgtgtaaggatgctttacgatactcgcacaatgacaagatcacctaaccctgtgtttctcagaacttacccccattgttaagtgactgacattctactgattgtgtatacagtagcttacttcagaattcctcgtgttctgttcagtgctttagattgctttcacatatgctttagtgggaatctttgtgcattgtccctttttctgtagttagggttatttagtctgattttcattagaaggatagtagtctaggtcattatcaagaaaccactgtactttgttttcatctgattgttaatacattactttgggtctttgatgtttatttatttaggccttcttagatgttcagtaaggcatgtagtggattatactgagaacagttgacgtgtaagttgagcttaaccctattcttttctctaggatgttttagaagaatgtatgtctcttcccaagctatcttcttattctggatgggtggtagagcacgtcctaccccatatgcaggagaaccaacctctgtctgagacttcgccatcctctacgtcagcttcagccctagatcaaccctcatttgttcccaaatctcctgacgcaagctctgccttttccccagcctcccctgcaacaccaaatggaaccaaggtaaggttgtgatcagcttaagacaaaagacatggtggctgcaaagtcaaaatgtttaatattgtcatatgacagtgaccataccctaggggaaataatgattgctcattgttgtagctgttgtagagacaatgttgacagcaccattcagtgttctctttagacagatccagagggagaaaaatcccctctattcttagtaccgagaatagtataactaatttcatgagcaattggatttttttttttttctgatgaacgctgcgtctgtttaactgatatggtctcccttttt

SEQ ID NO: 47674 - DNA, 1030 bp, Homo sapiens
cgcgcagcatccccagccagactgcagcgatacccccgccccgcccttctccgcagtcctggaagagctcccagggcggagtggtgcgatgcagacgactgtccgcagggcgggcggtggcggggcgcaagctgcggggagggaggtgaggcgggagcgtctctaccgccagggcgtaggcagtgacctcactgcaccatcacccctcaccccttgcgcgcgccccatttccccatcctcccgcggcccgcccctcgctcacctcttcccccgcattgtcgcttcggctccttccgggatcgctcggccctttccgccgggcggtcgggcggcgagccggcgggagcaccgccccctttgctccgccggcgcgctcccccacccctcgcgcagcgccggggcgcttcccccggcgctcgcgcccgcccgccgcgggagcgcgcgtagccgcttataaaagaggcggggcgcgcgcgtcgccgccactacccgctgcggagtgaacggtgtggagcggaggccgcggaggctcctcggtccttcagcacccctcggcccgacgcacccacgcccctcaccccccgagagccggtgagaggggcagccggggagctccgggagggagcggggccccgggcagccgacccccgggtgggagctgggcagctcttcaggcggggcggggccggcgcgcggacaggtgagccgggcgggccgcggggctgcctccattcggctgagtgggggaagccgctgccgctgcttttgtggcgcgtgggctgcggaggagcagccgggccgaggctcggcgccgccgctggaatgtcactgacggggggagggggcgcgaggccgccgggtccctcccaaccacccccaagcctggctgcggcgcggccctgccctgccccatccggctgcggcaggtgggtgggggctccctcgtcgggatcttcgccagccgcctccctgcagaacgctccccgcaccgcccccggtcccttccctcggccgggagcgacttctgcag

SEQ ID NO: 47675 - DNA, 1046 bp, Homo sapiens
tatgatctgttcagcagttacttttctccagaggccaagcttgggactagtgtgcttaccaatgaagaactcttatcttccttcctaggcattagatgaatttgcaaccaagctaattcagaacaaccactatgcaatggaagatgtggccactcgccgagatgctgtaagtttgtaggttcttcatgctcctcctttttggtacatgaatgtctcttctaagatgttccagttaagtctcttcaactggatatccctttgggagtgaacactagagactcacaggggatccttgtctttcagctgttgagccgccgcaatgcccttcacgagagagccatgcgtcgccgggcccagctagccgattctttccatctgcagcagtttttccgtgattctgatgagctcaagagttgggtcaatgagaagatgaaaactgccacagatgaagcttataaagtaatgtactgttagtgttgccatgtagcactcgattagtaagctaaacacagctctcacaaataaattgtagctaaaggacgaaataagggattccagaaaccccactacttaatgtaagccaactgttttatacattcctccataaagataagtatgaaggtagtgcaagggaacttgacgttctcaggttcaagatagaaagaacccccttcttttattcacaggatccatccaacctacaaggaaaagtacagaagcatcaggcttttgaggctgagctctcagcaaaccagagccgaattgatgccttggagaaagctggccaaaagctgattgatgtcaaccactatgccaaggatgaagtggcagctcgtatgaatgaggtgatcagtttgtggaagaaactgctagaggccactgaactgaaaggtaagagatgttccattgaattgtgacatgcatgtttggggaactaaatacccctttctattaagtattttagggacatataccccccaagaaaggtgaggtggatgactttggcgttagggataatttcctgtgtaggaattacttggcttaag

SEQ ID NO: 47676 - DNA, 1047 bp, Homo sapiens
caaatttttgtatttttagtacaaccgggattttgccatgttggccagcctggtcttgaactcctggcctcaagtgatctgcccacctcagcttcccaaggtgctgggattacaggcatgagctaccatgcctggcctgtgtagctatttttaaaagactttaattgaaacctttttggacaaatttagttttaaggaaagatatgctatgttctctacatgttgttataagaacttttctaagcctaaactacaatagatgtgaaagtactcttttttttttaattggggtaaattcacaaagctagccattttaaactgtacaattcagtggtatttagtacattcacagtgttgtgcaaccaccacctctagttccgaaacatttgtgtcacttcagaagaaaaccacatatccgtcaagcattcatttgccattctccctaaccccagtggcccacgcagccactcatctgctgcttgcctccagatttacctattctggacatttatataaatggaatcacgttatgtcactttttgtgactggcttcttttgtttaggttttctttcttttatttatttattttttgagacaaggtgttctgttgcccaggctggagtgcagtggcccagtctcggcttactgcagcctccgcttcctgggctcaagtgatcctcctgcctcagcctcctgagtagctgggattataggtatgcaccactatgctcagctaatttttgtattttttgtagagacaaggttttgccatgttgcccagtctggtctcaaactcctgagctcaggccgtctgcccagcttgccctcccaaagtgctgggattacaggtgtgagccaccgcacccggcccataatgttttccaggttcatcctttttgtagcacataccagtactccattcctttttattgctgaataatatttcactgtttgatacactacacattgtttttgggtttttttgttttgttcgttttttttgtttgtttgtttgtttttcgagacagagtctctctctgttgccc

SEQ ID NO: 47677 - DNA, 1101 bp, Homo sapiens
ctcccaaagtgctgggattacaggcgtgagccaccgcacccggcctgttttgttttgtttttgagatggagtttcgctcttgttgcacaggctggagtgcaatggcgcaatctcagctcaccgcaacctctgcctaccgggttcaagcgattctcctgcctcagcctcccgagtagctgggattacaggcatggacccccacacccagctaattttgtattttcagtagggacagggtttctccatgttggttaggttggtctcgaactcccgacctcaggtgatccgcccacttgggcctcccaaagtgctgggattacaggcgtgagccaccatgcccccagccatagcttatttttttaatcccccccttttttttttttggtaggcctctgtagaagaatccttatagtttcaagccatagtttgtgactatgtctcctttgactttggcttgctattttgggttttagttattatggcttttgctttaaaggacctgaaggccaatgagtcacggttgaaggacattaacaaggtagctgaagacctggagtctgaaggtctcatggcagaggaggtgcaggctgtgcaacaacaggtaggtgtctccatcttggagtgaggctctgttgctgtaaggatgcagctttgttcctcttgtgtctgtcatagcccaacaagcagtgtttcataacacagaactgtggcttggctgtaggtcaggtcctctatgtgaccaaaaccattttgattaacttctttatacccatatccctcactttcacttggtttggaggggggtgggggcttctgtcttctccgtaagctcattaaatatttaatgtttatatagccattaactaatggtaatttcataagttcctcaaagaaaaagtttatatataaatacttgaagctctgctggacatttggactggcatttccatttgtccttttggaattatctcctgtgtttccaggtttggccataataagtattcttgagagatgtgtatttcttctaataataaaactggtttctctctctccttgtaggaagtgtatggcatgatgcccagggtaagtttcgggtgctgt

SEQ ID NO: 47678 - DNA, 1049 bp, Homo sapiens
caagaactccgtctcaaaaagaaaaaaaaaagacatgacttggaaggccttttctgagatgtgttcaagttaaaccttaaaaatgtgtcgtttttgtttgggtgtatatcttcagcttgctttgtgtcattcttgtggtcctcttgggggagagaccataagtcactgttgatggatgacaaagggtttgacccttcccaaaggtccaaagactgtccctgctgaagcctgtcccaccactgctggttactctcactgcctcactgcctcctgttttccttccttttatgattctctatttattaatgttcctctttattatcctcttccccagctagactgtaatgtgtgcatggacagggaccatagcagttttgtcactctctgtccccggggcctagcccacaacacatagcaggctctcaatagtgtgccttggctgcttctactccagggcttactgaagaaacatgaagcttttgagacagacttcaccgtccacaaggatcgcgtgaatgatgtctgcaccaatggacaagacctcattaagaaggtgagtccagcccattggtaagacctccatcgcccactgggacacccacgtgttggtaccacagaggtcccccaaagttcacttcctgggatgttcaccaaaccaaggtctgcgtggagaccagcagcaattccattcctgtgtttcgtgacaagttggatatttccccctttttgaagccagtaaagttattctgcagtgcttattttttctgcattaagcaacagagacactggcactcccaaatgctgctcttagtttatttctcaagcaatacagtctctttatagggacagtagaaaatgcaaataagcaaaacataaaataaaaattacccataaagccccaccctgacaccacacattagatctttgtgtctgacctgccagacctttcttttctctccacaggtttagagctaccagctagatcaaacagccgcagactcccgtttaataggatcatatcactccataaattatcaaaaacctcgagg

SEQ ID NO: 47679 - DNA, 1035 bp, Homo sapiens
gtaaattaattaaggccaggtgctgtgagcctctgcccggggcacccacctgccctccctgctcaggctcttgcttcccccgctcctagagatggccatgtctccttgcaagaatacatggctttcatgatcagccgcgaaactgagaacgtcaagtccagcgaggagattgagagcgccttccgggccctcagctcagagggaaagccttacgtgaccaaggaggagctctaccaggtatgggcctcaggaggtgggtgaagaggtgtcctttggaaaactaaagccaaatttgtggcagagctgagtctggggtaacaggccctgcgctgggtattctccccatttacaaatcaaactcagtatggacagaagtcccggatctgcttgtagaagcagctccgagcccccagcatcctgagacctgggaggtcgggtttgaagtgggtgcagctggctcaggcaccaggtgccatctcttaccccacagaacctgacccgggaacaagccgactactgcgtctcccacatgaagccctacgtggacggcaagggccgcgagctccccaccgcgttcgactacgtggagttcacccgctcgcttttcgtgaactgagccactccctgggtcacccacccctcgctgcttgccctgcgtcgccttgctgcatgtccgctcctctgtgtgctctcactttccactgtaaccttaagcctgcttagcttggaataagacttaggagaaaatggtgcttcactaacccgcttccggtccagtcacaatcatcatgtcactgtggggacccagatctgtgtcttgaagcagctgccctcattccgacttcagaaaatcgaagcagctggctcctccccttgttctctctcccaccctcccccaaatctgttttcatgtaaaagacaaataaatgatgacttcccccaaagctttgcttttcttcatttggcttgcgtcagaaacacaaggctcggcacagcgaaggcttgcacccgcctcccgggacccctcaggccgcc

SEQ ID NO: 47680 - DNA, 1028 bp, Homo sapiens
attttttgtatttttagtagagacggggtttcaccgtgttagcctggatggtctcgatctcctgacctcgtgatctgcctgcctcggcctcccaaagtgctgggattacaggtgtgagccaccgtgcccagcctattattattatttttgagacagggtctcactccgtcgcccagtctggagtgcggtggcgtgatctcggttcactgcaacctccaccttctgggttcaagtaattctcctgcctcagcctcctgagtagctgggattacaggcgtgtgccaccacgcccagctaatttttgtattttttagtacagactgggtttcatcatgttggctgggttggtctcaaactcctgacctcaagtgatttgcccaccttggcctcccaaagtgctgggattacaggcgtgagccgccacacctagcttgtttttgtactttatacaaaagaaatcacatggtgtatactattttgtgtctttgtctttcactcaacattatatttgtaggctgcattcacatcattccgagtaccagtcattcatttcttttcttttttagagacggagtctcactctgtcacccaggctggagtgcagtggcgcagtctcggctcactgcaacctcagcctcccgggttcaagtgattctcctgcctcagcctcccgagtagctgggactacaggtgcgtgccaccactccaggttaatttttgtatttttagtagagacagggtttcaccatgttggccaggctggtcttaaactcctgacctcaggtgatccacctgccttggcctcccaaagtgctgggattacaggtgtgagccacctcgtctggcccatttattttcattgctttgtaactttcctttccttgaatatctcacaatgtattcattctaccttggacagacatttgcattgtttccagtttgtctattatgaatcttgctgctgtgaacattcttgtctattatgaatcttgctgctgtgaacattggtgcacgttatgcatatctgt

SEQ ID NO: 47681 - DNA, 2574 bp, Homo sapiens
ttgggaggctgaggcaggagaatcgcttgaacccaggagggggaggttgcagtgagccgagattgtgcgcttttgcattccagcctgggcgacaagagtgagactgtttcaaaaaaaaaaaaaaaaaaaaaaaaacctcaaagacgggaaaagatatacagctactgctttctattctgtttaggagaagctatattctaattgcttgatgaaagatagtgacagtctgatattgagcaattgcctttagttaataatgggtttataaaaccaaagatgctcactaagttcggaaaaattttaaagggatcacttaaattgttgttagtgtgtgcctgttgaaaattcagctgacctgtaattttctggcctagtgtctgcactgcttggggaggaagatgaagaggcactgcattatttgaccagagttgaagtgacagaatttgaagatattaaatcaggttacagaatagattttgtaagtatctctaacttaatcttgtttgccactgtggaaattaatgtgagctttggttggaagacctgttcatatttctaatctttcaattatttattacagtattttgatgaaaatccttactttgaaaataaagttctctccaaagaatttcatctgaatgagagtggtgatccatcttcgaagtccaccgaaatcaaatggaaatctggaaaggtatgttttgaggaattatttgacaaaaatagcattttgcctatttcagtttagttttaaccacttacaagtgcttgatactttggtcatgtggctaaatacaaaaccttaaaatataaaacgttccagtgtgctgaagccaagtattacagtagtttagggttctcattagatactacagatgtaggcaggaagatctcttgagcctaggagtttaccctgggcaacatagacccttaccttccaaaaaacaaaaaaaaagagaaaaatctagcccaagtttaagaattgagaactggactaaattttttgttgctgttgttttctgcagtggtgactgagctcttcaaatggcttgccatttctcaaaatcatttacatccgtatttaggtagtaagacatagtttagatatttatactgtgttgtgctagtggctgttaacagtggaactaattttatggaaaaccaaatgtagttgatactacctctacctgctgcacagttttataattgctcttaggtaataatggtagcgtagatagtatactgatatttgttttgcttagcttttggggaaaatcttattttttaaattatagggagtttgggtgttatggagagattgtatcaaaagctcttccggtattcatttaggatttgacgaaacgttcgagtcaaacgcagaataaagccagcaggaagaggcagcatgaggaaccagagagcttctttacctggtttactgaccattctgatgcaggtgctgatgagttaggagaggtcatcaaagatgatatttggccaaacccattacagtactacttggtgagttctaatactcatttattcaaggttggacttgtctcggttgtttaaaaatgagtccttatattgtgcttttttttttttaaggttcccgatatggatgatgaagaaggagaaggagaagaagatgatgatgatgatgaagaggaggaaggattagaagatattgacgaagaaggggatgaggatgaaggtgaagaagatgaagatgatgatgaaggggaggaaggagaggtaaaagaaaatttggctaaacccacaaagataacttttaaagaattcatgttattttggggtgtatatatatatatatagtgtggtagaactgaccagaactgattgtggaaaaaaagtaagccattttgttgttcaagaattaaggaaatgtttgataagcacatggtactaatgtttaactaggttttttttggtttttttttgggtttttttggttagacttatcaccacccaagcttgtttttccctagccagtacttaggcaatataggcagtgtagctggtcaaattctgacatctctgaaataacaaagtttcatgtattttcgacaaactgcacaatttctgaatagtcaaattaggataggttggttttatttcggattatttgatccgaaatatacctgatttggttagaactgaagttactaattaatctgaagcaacatcatcacgggtgtttccttcgatgcagctgacttacaggtttagaaactggagtgcccccaggggcactcgtggggtccattgtggtccatatgaaagcaagtctcagcattaatcctgaagattaactgcccactttttctttcaggaggatgaaggagaagatgactaaatagaacactgatggattccaaccttcctttttttaaattttctccagtccctgggagcaagttgcagtcttttttttttttttttttttttttccctcttgtgctcagtcgccctgttcttgaggtctcttttctctactccatggttctcaatttatttggggggaaataccttgagcagaatacaatgggaaaa

SEQ ID NO: 47682 - DNA, 1047 bp, Homo sapiens
atgaccttccaagtttgacttgtataacatcactgtcaaactttgtcaccctaacttcgtattttttgatacgcactttgcaggatgacctcagggctatgtggattgagtaatgggatttgaatcaatgtattaatatctccatagctgggaaacgtgggttcaatttgccattggtttctgaaagtattcacatcatttgggataccagatagctcaatactctctgagtacattgtgcccttgatttttatctccaagtggcagtttttaaaattggccttttacctggatataaattaattgtgcctgccaccaccatccaacagacctggtgctctaatgccaagttatacacgggacagttgctggcatgtcttcattggctatataaaatgtggccaagaagataggctctcagtaagaagtctgatggtgagcagtaactgtccctgctttctggtataaagctctcaaatgtgaccatgtgaatctgggtgggataatggactcagctctgtctgctcaatgccattgtgcagagaagcaccctaatgcataagctttttaatgctgtaaaatatagtcgctgaaattaaatgccactttttcagaggtgaattaatggacagtctggtgaacttcaaaagctttttgatgtataaaacttgataaatggaactattccatcaataggcaaaagtgtaacaacctatctagatggatagtatgtaatttctgcacaggtctctgtttagtaaatacatcactgtataccgatcaggaatcttgctccaataaaggaacataaagattttttttggactggggtcattctccttgttttatagagaaatgttacttgctattggattcagaaattgttctagttttttgtcttcacatcgttagtgactggggaagcgtgggttagcgctaatggtatgacattggtttagaaagctttgagctggtcggtgtccgagtaaaggacaaattcaaatatcttacttggatacagtttctgagtaaacagtttctgagagg

SEQ ID NO: 47683 - DNA, 1044 bp, Homo sapiens
tcaggcctcggtcgaaggggttgctggggcgctggcggagataggcgatgcggtgtgaggagatgaattcccaggtggtggtgttgctggccaccaggtagaggtgcgagacgaggagcaggctggccaccaacgagaagagggacagcagcaggaaggtggcgaacaggagcccgctggaccgcaaccactgaccccagggctggaagaaccggaggcctgacctgcggtgcaggggacaggggcctggtgctgggggagggcaggggagcccttccctccccatgccgggtccctgggagtcctggctctgtccacccctgtgggagcattcatcccaccctccctctacacccgggcagcagcacccaccatgccaggtacaggccccacagaagcaccaccagctgcagcgccaggtagaccacaaagagtgggtggttgcgctctcccacacagttctccatccaggggcagtggtggtcgtagcggcggacgcaacggcggcactcacggcagtgccgagccctcaggggctgctgtgggcatggaggagagtggaggctcagtgccagccctgctgtgggcccaccactgagggaaggaatcagggcctgattctggaaggccttcttggaggaggggcgaggcccaggcagtggggcaggaggaggtcgaggagtctcagctttggcccaacctctcccacgggtgtccgtgcatcactcaccagcaccaggcagtatctgcagcgccgaagagggatggctggaggaaccatggctgtctgctcctctttgagctcctcctggaatgaggggtggggtgtaagacagggtccccttgggagacagatggcattggcgggcagctcccctaggggccggcttagctctgggtatggagtttgggacccatcccatgcagaatggaggtgtggggtatggcggagcaccctggactgagggcggctgtgtatgtttgcaagtctcttccttctctggggcccagcagtttcctcactactgtagatggggctctagg

SEQ ID NO: 47684 - DNA, 1050 bp, Homo sapiens
tcaaaagaacatttcaggccgggcatggtggctcacacctgtaatctcagcactttgggaggctgaggcaggtggatcacctgaggtcaggagttcgagaccagcctggccaatatggtgaaaccctgtctctactaaaaatacaaaaattagccaggagtggtggcacacatctgtaatcccagctacttgcaaggctgaggcagaagaattagttaaaccggggaggcggaggttgcagtgagcagaaatcacgccattgcactccagcctgggcaacagagcaagactttgtctccaaaaaaaaaaaaaaaaaaattagcatccagtctaggctgggtatggtggctcacgcctgtaatcctaacagtttgggaggccgaagtggggggatcacctgaggtcaggagttcaagcccagcctagccaacatggtgaaaccttgtctctactaaaaatacaaaaattagctgagcacagtggcgcgtgcctgtaatcccagctacctgggaggctgaggctggagaatcgctggaactcgggaggcggaggctgcagtgagccgagattgcgccacttcactccagcctaggtgttagagggagactccatctcaaaaaaaagaaaccatccaatctagtcatctttcttggggaaatgattcttgaagaagtacttcttgcccactctactccccgccagttggctccacggtgaagggctgggggttctgggactctggcctggggcatgacctttgcctgctgtgtccacaggcatcccctgtgagggcggactgcggtgcctctgctggaaggtgggtgtgcctggggtggggcttctgctctgctgagagtccctgggttttcctgcatgggctgcccctacccctggcttcttcctcctgttctgcacctttccttgcttgtctgagggagcttttctgggaagtcctgggttttctgttcctcttggtgtcttctctgggatccccttggggatgggacactttgtaatgccaacaatgaagacctctgcttcctggtccgt

SEQ ID NO: 47685 - DNA, 1054 bp, Homo sapiens
cctcatgcttaggggagtgacccccttactgtggacactccaggtactgcaggatccgggccagctgtacgcacgcctgccccttcttcccaactcctgtgaattccccctccacagtcctggagagagagagatgggggctcaggatccagctgtggccccttcaagagctcctgtctacaagtgcacgcgtataatcccagctactcaggaggctaaggtgggaggatcatctgagtgcagcaagtagaggctgcagtgagccatgaccatgccactgcatgcactccagccggggtgacagctgagatacaggtttaggccttctggctcccaatcccacctctgtagtcatcacccccacctggcaactctacccactaaggattacacagggaatatttcaggcagggcacgagggaagagccaggcatgtggacggggccatggtgaagcctcggcccatcccggcagcccctccctctccctgaaccctggcaccctgtgggatggccccttacttggcatcctggccctcctcatcaaacaccacgatctcatccacacagaagatggcacaggctctggcaatctgaccggccaagtaggtgcgaagctccggcgactgagcattgtccaggatggagcccggcagggctacgctcagtgtgtagggccgccctgagcaggggagggatgttcccagccagtgtgagaggcaagggccccctacctttctctcccttcctctgtccctagcgcccatggtttgagaatttcccaagtgggaggaattttgagatgagcaaaatagatccagctcccctctctgggcctcagtctcccagcagtctccatggctcctctgagcagggcaaaccactgggcgaggctgtggagcggttagtagcaatggcctaagttcacatcctggctctcccacttactgcctcagttctccagctatcaaatggggataaaatgaaagctgatatctaataagtctttagtgtgtgcacattaacccgatagccattaacctgatccctagtga

SEQ ID NO: 47686 - DNA, 1056 bp, Homo sapiens
atgatgaaaccccgtccctactgaaaatacaaaaaaaattagccgggcatggtggcatgtgcctgtaatcgcagctacttcggaggctgaggcaggagaattgcttgaacccgggaggcaaagattctagtgagccaggatcgcactactgcactccagcctgggtgacagagtgagactccatttaaaaaaaaaaaaaaaaaaaagaccatgtaaacttaaattgtgcaaagagaacttaataatcgagaaaattattattggataataataattaataagacaattgttctgtgaccttttaaaactctcttaccatctgttaaaaatgtagcccaggtgtggtggctcatgcctgtagtcccaggactttgggaggccaaggcaagaggatgactggagcccgggaattggagactagcctgggcaacaaagtgagactctgtcatttaaaaataaaaaagtatagaaaatgaaaaaaaaaaaaaactaataagaacttagtacactgtaatttaatattagcaacactgaaaattaagacgttttctttcgttataaaagtttatcaaggaaaaaattttattgcaaatagcttgggccaggcgcgatggctcactcctgtaatcccagcactttgggaggccggtaggcaggcagatcatttgaggtcaggagtttgagaccaggctggccaacatggtgaaatcccgtctctactaaaattacaaaaaaaattagctgggtgtagtggcaggtgcctgtaatcccatcccagctacttgggaggctgaggcaggagaatcgcttgaacccgagagatagaggttgcagtgagcggcactgcactccacagagcgagactccatctcaaaaagaaaaaaaaaattaaatacaaatacaaaaaattagccgggcatggtgatgcacacctgtaatcccagctacacggaaggctgaggcaggagaatcgcttcaacctgggaggcagaggttgcagtgagcagagattgcaccactgcactccagcccgggtgacagagcaaatctccgtct

SEQ ID NO: 47687 - DNA, 1023 bp, Homo sapiens
agtcttgctctgtcacccatgctggagtgcagtggtacgatgtctgctcaccgcaacctccgccccctgagttcaagggattctcctgcctcagcctcctgagtagctgggactacaggcatgtgccaccaggcccagctaatttttttgtatttttagtagagatggggtttcagcatgttggccaggctggtctcaaactcctgacctcaaatgatccacctgcctcagcctccctaagttctgggattacaggcgtgagcagttgtgcccggctgtattctggatattaatcttttggtagttttaaactttggaaataactcttcctagtctgtggcttcttttcacttgtttattattatgtctttcgatgtatgctttaactttaatgtgatcaatacgttacgtttcctataaggatttatacattttgtggtaagatattcctatcttaatgacattaagacagtctctgatttttcttttctttttgagatggagtttcactcttgttgctcagactggagatcttggctcactgtagcctccacctccctggctcaagcaattctcctgcctcagcctcccgagtagctgggattacaggtgcctccaccacacctggctaattttttatatttttagtagagacaggattccgccatgttggccaggctggtctcaaactcctgaggtgatcagcccacctcagcctcctcaagtgctgggattacagacgtgagccacagcacacggcctgtcttagctattcttgatcctttgagatcgtgatttaaaaaaaaattttttttttgagacagttttattcttgttgcccaggctggggtgcaatggcgcaatctcggctcactgcagtctccgcctcctgggttcaagtgattgtcctgcctcagccttccaagtagctgggattacaggtgccctgcagcacgcctggctaattctttgtatttagtagaaatggggtttcaccatgttagtcaggctggtctcaaactc

SEQ ID NO: 47688 - DNA, 1057 bp, Homo sapiens
ggtgagccctgggatggaggtgggagcagctggccaatgcgatatacttcccagggccaggtgctggaagatagtggggatcgaggcaggcaggtctcatccttagagcccacatcaagggggtaacagatggaaggatgagcactgcgagtggggacatgggggccatgagacccaggagatcagggaaggcttcctggaggaagtgagcaagagctgagacctggtgcacaggcagatgttggccagagtttggcccagattgtgctgatgctgggggcctggggatcagaaaagatgctgagatcttggggagagagggaagggaagcccagaggccccgtccaagcccacacccacctcactctcacccctgcttttttccctccagatcgagacgctccctccggagctcttccagtgccggaagctgcgggccctgcacctgggcaacaacgtgctgcagtcactgccctccagggtgggcgagctgaccaacctgacgcagatcgagctgcggggcaaccggctggagtgcctgcctgtggagctgggcgagtgcccactgctcaagcgcagcggcttggtggtggaggaggacctgttcaacacactgccacccgaggtgaaggagcggctgtggagggctgacaaggagcaggcctgagcgaggccggcccagcacagcaagcagcaggaccgctgcccagtcctcaggcccggaggggcaggcctagcttctcccagaactcccggacagccaggacagcctcgtggctgggcaggagcctggggccgcttgtgagtcaggccagagcgagaggacagtatctgtggggctggccccttttctccctctgagactcacgtcccccagggcaagtgcttgtggaggagagcaagtctcaagagcgcagtatttggataatcagggtctcctccctggaggccagctctgccccaggggctgagctgccaccagaggtcctgggaccctcactttagttcttggtatttatttttctccatctcccacctccttcatccagataactta

SEQ ID NO: 47689 - DNA, 1076 bp, Homo sapiens
ctgtcggccagagggaatgttctggagctgccaaggagggaggagactcgggttggctaatccccggatgaacggtgctccattcgcacctcccctcctcgtgcctgccctgcctctccacgcacagtgttaaggagccaagaggagccacttcgcccagactttgtttccccaccgcctgcggcatgggtgtgtccagtgccaccgctggcctccgctgcttccatcagccctgtcaccacctggtccttcatgaagagcagacacttagaggctggtcgggaatggggaggtcgcccctgggagggcaggcgttggttccaagccggttcccgtccctggcgcctggagtgcacacagcccagtcggcacctggtggctggaagccaccctgctttagatcactcgggtccccaccttagaagggtccccgccttagatcaatcacgtggacactaaggcacgttttagagtctcttgtcttaatgattatgtccatccgtctgtccgtccatttgtgttttctgcgtcgtgtcattggatataatcctcagaaataatgcacactagcctctgacaaccatgaagcaaaaatccgttacatgtgggtctgaacttgtagactcggtcacagtatcaaataaaatctataacagaaagtggcctttggaggtctttgtgtcatgggaggacgcttccctcacttctctgaagcctgccgggccgtgtggaacgttgcttgggcacctacaggagagttaactctgctcatctcctgccccatgagactctgtgcctttggaggcagttactggagcttgtaagctggacgcagcacctgctaggtaacaggctgtgacctgggctggggatcccatagccagcacaatctctgtcatcctactcacctgtggttgggcactcatgagggggtttttttgttgttgttgtttttttgacagggtctcattctgtcacctagagtgcactgctggaatatagtggcgtgatcacggctcactgcagccttgacctctccaggctcaggtgatctcacctcggcctcccaagtagct

SEQ ID NO: 47690 - DNA, 1050 bp, Homo sapiens
gatgctcagcaccactgcaaacactactgccgcctctgccagcaccgatccactcagcggagccccaggccccggggccggagatgggcactctcgggtcatatctctagacctggggcttcacggaggccggggcgactacggacgccctagacttcgggcccctcagccccgtcaagcagagggaggcactttcacccggccagcaaccttctccctccgttctccagcagcgaggagggaactccaccgcaggtcacttctgcggcctgggagctggcgcccggccaccccccacagcctccaacctacggcgtagacgtcgccactctgcagccttcctcacagttacagccgcccccgctgccggctcctcacctctttgggcctcgccatcttggcaccgccccgcggcaacgtcacgtgacgaaatccccgcccacgctccgggtccgggggcgagcggtcacgtgggcatggcgtctgggggcggggttagggcgagcgggcgcgcgaagatggcggcggccgccggcgggccgtgtgtgaggtgcggagcgggtcgaatggaccggggtggctgtgaagcgcggtgtcaaagccgagcggaagcggggcgggaattggaggcgggatgtggcgacagtggcagggccaaccccggctggatggacgggcaccgagacgggaggcggttacgtccaaacggtccccgcgcgcggggatctgaagagtcttcttcaggaggggggccggctcttcaccccttccctccgcgctcggcctcccatctcctcacccagggccctttgccttcctcctctctcacctccgacgcgtctcttggcgccccacccgcgcttccttctccggccgtgacgctccctcgagccacggggagctttgcggtctcctggggtaccccccacccacgtccctgctgcaggctcccagtgtcctgccccggcgtcgagtgcgccctgctggctccccgacctctcccgcgatctgttcttgttaggattttgtttcgcgttgagcggagccacg

SEQ ID NO: 47691 - DNA, 1053 bp, Homo sapiens
cagtgttttccccacttttttttttttttttttttttttttttttttgagacggagtctcgctctgtcgcccaggctggagtgcaatggcacgatctcggctcactgcaagctctgtctcccgggttcatgccattctcctgcctcagcctcccaagtagctggggatacaggcacccgccacaacgcctggctaattttttgtattttcagtagagacagggtttcactgtgttagccaggatggtctcgatcttctgacctcatgatccgcccgcctcgacctcccaaagtgctgggattacaggcatgagccaccgtgcccggccctaacaatattattatataacaagattactttccaaaaatttaacaaatcgttttgtatattgagattttttgcttttagagagcagacaaaatggctatgaggcagtgtacaagtttgtatgatcagaaagagcaaaattacctctgttctctcattttgcaggagcagtagagaactgtggactattctgcttggaaggtcagctctgagagagctggtaagtggtggtgttcttgagtgggttctctgggttctttgtgtagcttttgttaccaaaaaaaacctttttttaaatgtaggaagtaaacacatttatttatttagagacagagtttcgctcttgtttcccaggctggagtgcaatggcgtgatctcggctcaccgcaacctccgcctcccaggttcaagcgattctcctgcctcagcttctcgagtagctgggattacaggcatgcaccaccacgcccgactaattttgtatttttagtagagatggggtttttccattttggtcaggctggtctccaactcccgaccttaggtgatctgccctccttggcctcccaaattgctgtgattataggcgtgagccaccacacctggcctatttatttattttgagatggagtttcactcttgttacccaggctggagtgtaacagcatgatcccagctcactgcaacctccgcctcccgagttcaagcgattttcctgccacagcc

SEQ ID NO: 47692 - DNA, 1029 bp, Homo sapiens
gacagggtttcaccatgttgcccagggtggtctcgaactcctgagctcaggtgatccggccccctcagcctcccaaagtgctgggattatagacgtgagccaccacgtctggccagttttctttattgtaatgtctgttttatatttaattgatttctgttgtgtatttttttttttttttaaattttcactcttgttgcccaggctggagtgcaatggtgtgatcttggctcaccgcaacctctgcctcctgggttcaaatgattctcctgcctcagcctcccaaatagctgggattacaggcgcccaccaccacgcccagctttttttgtatttttagtagagatggggtctcaccatgttggccaggctggtctcgaactcctgacctcatgatctgcctgcctcggcctcctaaagtgctgagattacaggcgtgaaccaccgcgcccggactctctctctttttttaaaatagatttctgcctccgtgtgtgtgtgtgtgtgtgtgtgtgtgtgtgtgtgtgtgtgcgtgtgcccagccttgttctttagtttttatatatgtatatgttttttctccctttttaaatggatttctgtctctgtctgtctctgtgtctgtgtgtgtgtgtgtgtgtgtgtgtgtttgtgtgtgtgtatgtgttagaagtctcactgtcacgcagagtgagactctctggatttaatgtccaaatattggatgttttttgtaaatatctgggttttttttttgagacaggttctttctctgttgcccaggctggagtttagtggcacaatcacggctcactgcagccttgacctcctgggctcaggtaatcctcctacctcagcctcccaactagctaggactacaagatgctgcaggttttgccatgttgcccaggctagtcttggactcccgggctgaagggatctgaccaccttggcctcccaaagtgctgggattacaggtgtgaagtactatagcagacgaaacatcttattgttctcaatgtttttatt

SEQ ID NO: 47693 - DNA, 1063 bp, Homo sapiens
ttaatgtttgcatatcacatcctagaatggatgcatcctgatttatttgcgctactttctgtctttcactattacaagcagtgctgcagtgaacattattatccctaccaccctgtaaacatttgtttacagttccaaagatttatgtaggtataaatgaacatgatattttttattagatatttccaaattaccttccaaaaaacattgtaacagtttatacttataacaccaagtattctatcgttgctgcaaggtcttcatcattgtttagtctttgccaatctaataagcaaaaaaatgtttcacttttcagtttgtatttatttaaccatgagggaagttgagcatttctttatactgattactgtctttcctgtgaatttgcgggcatctcatgcttgtttgtggtgatgtcccttttagcccagagctgtagtctggatgcttccctttctgccaattttctgggagctcttcagtgcccttctgtgggagcccattgaggtttttgtggaagcagagctctaagcctgtgtgttccggtctccaccaggtggccccaatgtcagtgtatgcttgtctgggcaatgatgcggctgccattcgtgatgccttcctgacccgattgcagagcaaaattgaggacatgcgcatcaaagtcatgattctagagttcctcactgttgcagtagagacccagccaggcctcatcgaactgtttctgaacctggaagttaaggatggcagtgatggctcaaaggtaagcctgtaacctgggatgacactgggagttggctcactgggaggcagatgctgggctctgcaagtacagctgctggcagtggctgtggaactgaactcttacctgtcccttcttgcaggaattcagccttgggatgtggagctgtctccatgcagtgctggagctgattgattcccaacagcaagatcgatactggtgcccacccctgctgcatcgtgccgccattgcctttttgcatgctctgtggcaggatcggagggacagtgccatgctggtcctccgaaccaagtaagtctg

SEQ ID NO: 47694 - DNA, 1057 bp, Homo sapiens
ccagctaattaaacattttttgttgttgttgagatagggtctcatcatgttgcccagactataagccctattttattttatttatttatttaagacggagtctctctctgtcgccaggctggagtgcagtggtgcgatctcggctcactgcagcctccgcttcctgggttcaagcaattctcctgcctcagcctcccgagtagctgggactacaggtgcgcgccaccatgcctggctaatttttgtatttttagtagagacagggttccaccgtgttggccaggatggtcttgatctcctgacctcgtgatccgcccacctcagcctcccaaagtgttaggattacaggcatgagccaccacgcccggcctatataagccctattttaaatcagggagactgttttaccaatgactaattgcctagcagaggaccccatgtttcttggcctctaaaatctggaaaattttcccagctgaaacctttttctgttcctttgcaggcagatataatgcacctgactgactctgtggtgcgtcgccagctctttcttgacgtgcttgatggaaccaaagcattagtaagtgtgtctgggagattttacatttctcccagggaggttgtctttgaagtcaaatagcagaggtcatgagtctgccagccagccgcacaaatagtcaggtcacagggctcacgttggcctgggaggcctgagactgtagtgggtcagcagagctctgctgctgccatgccaaccctggcttctccccctccactccactcctgtgagctcactgctggggaagaaaggcaatgaggccggaggtgccctgtggatggcatgcgaatctttccactgacttctgactggtgtgctgtctcctttcagctcctagttccagcctcagtgaactgccttcgccttggctccatgaagtgcactctgctgcttatcctcctccggcagtggaagaggtgaggctgtgccaggagaggcaagcccgaggccagagccttcttgtcagtgcctgcttgccttcctgaaagggagaaatag

SEQ ID NO: 47695 - DNA, 1245 bp, Homo sapiens
ggccaccgtctgctgcttctgctgccccctcctcctcaaagcagcccgctgctgacacagaggcatcagagcagcaggccttgcacacagtccagtatggccttctcaagatcctcagcaagacgctggcagccctgcgccacttcaccccagatgtctgccagattctgctggatcaggtactgcccatcatctgttcagcaccacctcccctaaaggctctgctctgctgtgtaccgagagctacctggggccttaattgggtcctggatggctcttgtcttttctcgcagtccctggaccttgctgaatacaacttcctgtttgccctgagctttaccactcccacctttgactccgaagtggccccctccttcgggacccttctggccacagtgaatgtggccctcaacatgcttggagaggtaagttggttctgtcagacactgtcctctccccccggctcctccccctgcctgccacttcccagctgaccttgggcatgttgggcatggtacctagcctcccaagcctgctcctctctgtaaactgaacatgacagcacctctgagaattactgtgaggattaaatgaggtaactgattaaatttgcttagtgcaggacatgcaagtaggaagctctcagtaagtgggagctgttcctgttgtcttagttttttacccttgcttctcttcagctggacaagaaaaaggagcccctcacccaggcagtggggctcagcacacaggcagaagggaccaggacgttaaagtaagtgctctttctgggatttgataaggggctggggcagtcatgggcccactgttctcaagcttggccagcctggccctctgcagcagtaccaaaaacctgtgtctcctcccaggtccctcctgatgtttaccatggaaaactgcttctacctgctcatctctcaggcgatgcggtaccttagggacccggctgtgcacccccgggacaaacagcggatgaagcaggagctcagctctgagttggtacggatggatagggatacggagggctggaccaatagggccagagccctgtggggtcctgcctggcaacccccaagggtcagaacagtagccagatgtgctgagcctcaccaagccactttttttcttgtagagcacgctgctgtccagcctctcgcgctacttccgccggggagcccccagctcccctgccactggtgtcctcccctcgccgcagggcaagtccac

SEQ ID NO: 47696 - DNA, 1025 bp, Homo sapiens
ggggacgtggcttacagtattaacctaggtcctgaccactgcagctcacgtagctcaattcacagcctcctgggcagatgtctctacccctgacaacctggaagcttccttagcctgccctgccctctcacacacccccaccagccctagagcgagactgacaggctcctcagtccttcccactcactggggagaagctgtttcttctgctggcccagtgactttggcggccatcccagggagacagggtctgtcctggcttgtgtgttccttccgcttgaggtcccgggagaccttgaaggcatccttgggcttggagctggaagtgggggaggaccctgccgggtcttggggtccaggctaggtgtgatcaagccacttatttcctggccttgggaaggggcaatggggtaccctggcagggaggggagtatctcccaaggtccaggggaaagctgcccagtactctgtggtctgctggggcttgctacttcctgctgcatgtcaaatttagcaaaagcattgtactgagcacaaagtctgactctaccaagtaccagctgtgtgactttggactcctgacttagcttgtctgagattcagtttcctcattggaaaccagaggtgaggctggggggaaggtgggtggcatcaacttcacataatcctttttttttgtttgtcttttttttttttttttttttttttgtggcagagtctcgctctgtcacccagactgaagtgcagtggcgcgatctaggctcactgcaacctctgcctcctggattcaggcgattctcctgcctcagcctcccaagtagctgggattacaggcacgtgccaccacactggctaatttttgtatttttagtagagacggggtttcaccatgttgaccaggccagtctggaagtcctgacttcaggtgatccgcccgcctcagccttccaaagtgctgggattacaggcatgagccaccccagccaacctcacaaaattctaatgattcagtgagatgatggatg

SEQ ID NO: 47697 - DNA, 1051 bp, Homo sapiens
cctcccaagtagctgggattataggcgcatgccaccccatgtggctaatttttgtatttttagtagagatggggtttcatcgtattggtcaggctggtctcgaactcctgacctcaggtgatcttgacctcaggtgatctgcctgcctcggcctcccaaagtgctgggattacaggcgtgagctaccgcgcctgggcttttttttctttaatacacttttttggggactttttgggcaacatccaagttttcaacagtgaattatttatttatttatttatttatttatttatttttttttttggagacggagtctcactctgttgccaggctggagtgcagtggcgcgatctcggctcagtgcaacctccgcttcctgggttcaagagattctcctgcctcagcctcccaagtagctgggattacaggtgtgcaccaccacgcccagctaatttttgtatttttagtagagacggggtttcaccatgttggccagaatgatctccatctcttgacctcatgatccgcccgccttggcctcccaaagtgctgggattacaggcgtgagccaccgtgcctggcttatttatttatttatttattattttattatttttttttaagacggagtcttgctctgccgcccaggctggaggtgcagtggcgtgatctcggctcactgcaagctctgcctcccaggtttacgccattctcttgcctcagcctccccagtagctgggactacaggtgcctgccaccatgcccggctaattttttgtattttttagtagagacggggtttcaccatgttagccaggatgtaattaattaattaattaattaattaattagagacggagtctcactctgttgcccaggctggtgtccagtggtgcgatctcgactcactgcaagctctgcctcctgggttcacgccactctcctgcctcagcctctggagtagctgggactacaggtgcctaccaccacgcccagctaatttttttgtatttttagcagagacagggtttcactgtgttagccaggatgg

SEQ ID NO: 47698 - DNA, 1028 bp, Homo sapiens
aggctctgggtgcaggatggctggggaaagagggggttcctcctggagcctgtggtgagggatgctcagctgtgctcagtgggccaggaatgtcgtggaggaaggctaattaaaggggaaggttgtaattaccccagcaaatccttagctgccaagtcccctaattgcccgtggctttgatggtagccatccacaccaagcaggtattgtcttttttttttttgagtttttcttgttacccaggctggagtgcaatggcatgatcttggctcactgcagcctccacctcccaggctcaagcgattctcctgcctcagcctcccgagtagctgggattacaggcgcccaccaccacacccggctaatttttgtatttttagtagagacggggtttcaccatgttgggcaggctggtctcaaactcctgacctcaggtgctttgtcctcccaaagtgctgggattgcaggcgtgagctgctgcgcccggcccaggtattgtcttagctcaagggctgtactttggcaggattgcagtgtggttacatgcttgggttctggagtccagctggctagtttcataacttgtgaatcatttttgaccctctgtttcctcatctgtagagtggtaagagtcagcagactagtcatggccccctggggaaaattcactgagatcccacgagtagtggttgtcttttgcatagcgcctaacacatactaaataaatacttcgattgttattagctattgttaccattaggcattagtcagttctaattttcaatagtgttgttgcatagaaagctagcttttggctgggcgcggtggctcatgactgtaatcctagcaccttgggaggccaaggcgggtgaatcatgaggtcaggagttcaagaccagcctggccaacatggtggaaccccgtctctactaaagatacaaaaagttagctgggcgtggcggcaggcacctgtagtcccagctacttcggaggtggagtcaggagaatcctttgaaacccgggaggcg

SEQ ID NO: 47699 - DNA, 1004 bp, Homo sapiens
cagaccattcctgtttgatatgactgggaaaggaaggaggatactttttcaccctgtaatctgatcatgtgttccctgcttagaagcctgcagtggctccctattgctcttagggtaaagtctgagctctttcctatggccaaaaggcccatgtgacctgtagcctcctgtcattacacgttctcccttgctctcactgccttcgacatactggcctccttagtgttcctcaaacagatcaaactttttcttgcctcaaggcctgtgcacatgctattccttctggctagaatgcatttcttgcttccctcactccctttgccttgccagctcacatctttcagatttcagattagatgttacttccttaggggaaaccttgaacccttacgtcagggtccttctgtgatatcctccagttagtaccctgtctttctccttcagagctggaatcatagtagtgactgtatatttataatgtctgttgtccctgatagatcataaactttctgagggcaaggacttacttgtcactgtctcctagtgcgtaacatggacagtgactgcttacatagtaggtgctcagtaaatatggtggaattgctgagtgagttaaacctacgtaatgaaatgtaaatgtccagcccgggtcttttacgagtggaattatagtactggtagttcttttttttttttttttttttttttttttgagacagtctcactttgtcacccaggctggagtgcagtggccttatcatggctcactgcagcctcaacctcctgggctcaggagatcctccatctcagcctcctgagtagttgggaccacaggcacatgccaccatgtctggctaatttttgtattttttgtagagacagggttttgccatgttggccaggctgatctcaaactcctgagctcaagcaagctgcctgcctcagcctcctgaagtgctgggattacaggcatgagccaccatgcacggccagtactggtatta

SEQ ID NO: 47700 - DNA, 1047 bp, Homo sapiens
aggttatgcggaaactccagaaaacatacaggatggagccagccggcagccagggagtgtggggtctggatgacttccagtttctgcccttcatctggggcagttcgcagctgataggtactagagcgggaggtgcctatccctccacccccaaccaaggctgcgttctgtggccctcccctgcccctcctgcgctccctccttcccttcttcctgcccagggcagacagtgacagcttggaaagcagggcattagaccagctattgagggaggctgtttactgtcgaccttctgctgtgagagcccgtgtggtgggctggaggaggcggaggccaagcgccaccaagataatgggaagtgacatgggctggagcaagggcgcacgcctggtgcataatggactggtgtgaaatgcgccccagctcctggcagcagctgtggggttttatgttgaaaatgagggacccttttgatttggtgaccagtgtcatccactgttattatcgagctgtgtgcaaaggggcccgttagggagcagccgccaagtgctgggtggtgggcctgcttcctgtggggctcagagaggcctgctctggtgactccccaactcttgaagctagttttcaggatgggcgtaggtgatcatctctattttgatgaagaatgaactgcctacagactgatattcataaatgaccattagttgtggcctcgggtgcattgcctccccgaatcttctcagtgacactgcgaagggtctgccagcatgaagccggctctgctgactggcacctgcaccaggcaccatactgagtgctgtaggtgtggtaattgttgtcatggcccctaggaggaggtgctcttcttgtccccagtgtccaggtgaggaaactgaaccttggcaggctgaagtcatgcgtccaacgccatgcagctagagcttagcacattagaatacacaaacccagagttacttattgctccttcaaggtgaggtgttgagggcaccacgggcaggactgaggcccctgggggggtgtgactgc

SEQ ID NO: 47701 - DNA, 1042 bp, Homo sapiens
actgtgatctaatgagaaggatcctttaatgaaattttaatggggagtggtgggccgccacgactgcagaatttgtgttgaccaaacaataggatttgtttgagttataatgctaaggtcaggtgttggctccttaacttcaggtagggagaatttgggttcctggcataaaaataagtagggatggctttggccaagagcccaaaggtggaggaagccacgcaatttgtgcagcaggtctctacttagaagaggcatggggcaatgtgggattaacaggaagcaatgtatgagggtgacgtcccgaaaggaacaatataaggggagtgtttggaggggagttttctgaatgccctttatgccaacaacagagattaaggagcaaattagaggtgtggggaacaatcttggcagagggaaggacgtgagcaaaggtaaatgaaggaacttcttgccatttgccatttcgataaatgaagttatctaaatcccttaaaatttggtggtcgaatgtgccgttttcaggccaacggttgcccttggcctgaggccaggcagtattgcaaaagaatataaggcactttactttaatgtccccctttataccgagtttagaaaggttacaaatcaggaaacctagaggggaggaaggagtaatttgagattgattggagcccattgagatttggcaaggaaaggccaggggtgtctgccgttagactaggcatccccagaaaaagggcagagacgggagatcctctcaagaggaggtagactgaggggaaaggtcaggcatccctgaacgtcaccctcccaaggtctctgatggtcctaatggtccccaggagaccgggactgcggacctgagtctcctgggtagcacaggagagacaggtgggggcaaaccttactaattagtgtctggtgttggatgttttagaaggaaccagcaaaggacctctcaaactggagccgttggggagaaacagaaagtaaattgcccagatccagcggttggaggcaaaattctgggtccgggagt

SEQ ID NO: 47702 - DNA, 1007 bp, Homo sapiens
ggcagggcactcccccaccccggtccccagaccgcagcaaatccctttctctgagcctgtttcccttccgagaaacagggatatggagagcgcccacttggaggatggatgggaggaatcggtaaaatcggtaaaatgcccagttcagagcctggcacagttaagtgcccgctgcacagaagttgctgtcgtatttaaccttgggtgccacccgagcgccagcccgacacaggtgcagctcaaaaaagacagcccgagagcccttgcggccaaggtcagcctgtctgcagggaggctgccatatcgaaaagcccagactttgctgcgcaccaactgtgtgatctctccctctggactttggtttctcctctgtactataagtgattgccacaactggtgtcagaggccctgacagcggggagggacagtgtaaccggtggttgtggtgtgtagaatgattgcccagtgagatgggatgagcctctgggaggaaccagggctggtataaggagcctggattccctccttaattctgttctcggcttcctgtttgtatgtttaaagacacgtcacttcctttagtgtgctggtttttctctatgtaaactgaggactgtgcgggggttggaaggatgcatggagcgttttggtggaggccggaagccctaggatcacaaggatggcatctaaaaaatctcggtgggggttctgtgcttataggcagaggaagctcactccccactctggctgatttgcagagctgtttgagtctgctggcttggccgcccagcataccagtaacagtcccctaggtgtgtccaatacagcttctgtggcattctaaggcagttttcccatttgatcctcatagtgggcagagttgacaagaatctcatttgacagagatttctaagctcaagagagaatatgtgcccggcactgtgcaaagcactttaagcttttcatatgcacttttaatcacagcctttctgtaaagtcggtattac

SEQ ID NO: 47703 - DNA, 1033 bp, Homo sapiens
acgggtgtttggactgagggtgttggctattctggacgaagactcctagttatgtgccatggtttccaccctctgctccacccccagccttttctgtaccaggctgggacccccagtcctggagccccccaccttcttgtctcatggctggcactggaggctgctgttggccacctgctccatccagcgcctcccctccctccatgttccctctctgcacccttgttcacctgttgccccgcttccattctccccattcctctctgccgttgtttacctggagactcaggagagattagtgcacctgttcaagttatcacctttaagtggaaattagctttcatttagaaatgtgtggcccagggcaggggcagtggctcactcctgtcatcccagccccttgggatgccaaggtgagaggattgcttgagcccaggagtttgagaccagcctgggcaacagaccgaggccccgtctctacaaaaaatacaaaaaaaaaaaaatgagttgggcatggtggcgcatgcctgtagtcccagctacttgggaggctgaggtgggaagatggaggatggcttgagcccaggagttcgaggctacagtgagccatgatcccaccactgcattccaacctgaacagaatgcagaatgcaacctgaactttcaaagataaaggaatgtgtggcccagcagtgtgtcctcccatgctcatcccctcgactccgtacaagctggcagccagcacagacctccccaccagtgctcagcttgtgcggagtcctggaatcctgacttgagtctaagtcctagggctcgtgaggaagggccgcacgtgcggtgacagggtccctctgataggttatatgcctctgcttttcaggaaggcccgaacaagacaggaacgtcctgtgccctggactgtggagctggcattgggaggatcaccaagcggctgctcctgccgctgttcagagaggtggatatggtcgacataacggaggacttcctggttcaagccaagacctacctgggg

SEQ ID NO: 47704 - DNA, 1049 bp, Homo sapiens
acaaggcacttctcggggacttggtttccttgtctgtaaaatggggataattacagaacccactgcatagggttgttggcacaaagttcccgcccataaatgggtgcctcagtgtttacggtggaggagcacagggtgagggatggagtttgagaaaatatacgtactccccttcctggggtgaaatggcactttctctgtccagagacccggcatacccggtccagaggctcttcccccgttcctttgatgtccactagccttaggagccccagctggggacccaaatcaacttggtacctccggctcctgcacctctgcttctcgcccctggggggcgccgtggggccgctgcagggccctggactgggttcccgcgatgtggccgcacacaccccatcctctccgctctcctgggagatctccagggctggcaacgggctcctgacccagcctcctctggaaagacaaagaaacaagcaaatcccaaaccaccagcaggggttacagcgtttacagaagccttaggaaacaggaaccaacagccgtgaagatattcacatgctttcccccagcaaacccgtctctaagctctactttgaaaaataatcaaaatctcaaaatcggggggcgggggaagcaatgtgcacatcagtgtttatcacatattttatacgtgcaatgtaaaaaatctggaaagacacaagccaaaatgtgagtagcttaattttttttttttttttttttttgagactgagtctcactctgtcacccaggctggagtatggcacaacctcggctcactgcaacctccacctccctggttcaattggttctactgccacaggctctcgagtagctgggactacaggcctgcgccactatacccaactaactttttgtatttttagtagagacagggtttcaccatgttggccaggctcgtctcaaactcctgacctcaggcaatccacctgcccgggcctcccaaagtgctgggattatagggctgagccgctctgccaggccaattagcttaaattttatgg

SEQ ID NO: 47705 - DNA, 1044 bp, Homo sapiens
gcccacctctggtgcagcctcagctttgcctctgctctttgcaatgtagcctagaggtcttttttctccttaacaggttttattccctttgttcctcccatccttcatgtccttggcattgctttcttcaaaggaagcctcaaagaactgaaccttgagactgtttctccttttgagatattgtttccacattcattttatattaagttgtctaggagggttagttctcatttaaatgaatgttgtccttgtcaaggttaacattcccactggcaacatagcaagactccatctctacaaaaaataaaaaaattagccaggtgtagtggcatgcacctgtagtcccagctacttgggaggctgagatgggaggatcgcttgagcccgggaggctgagcctacaatgaaccatggtcatgtcactgcattccagtctgggcgacagagtaagactctatctcaaaaaaaaaaaaaaaaaattcctcctgttaggtggggactgaagaaagaaatagaaacttaactgaacaaggaagtagaagtgtttgcccaacaaactgacgtgagacagggaagactgctaaaaaggaaggaaggaaggattttcttgttctttacattcttcataaatctccggaaacagagtaatataaatggttgagggcatgtctgggggagtttcctggtatagcctttcacgctttggggttgagggcttgttgcttgagtgtctttatgtttgtttgaagaaaacatctggaacagatgcttttcatgaaatgtcattgagtcagctctgttggtctggggcactgtgtactgtgcaggtcttgatctagttccttattcctcagtatgtctgatagtactaacttgagattgtagtccaagagagatgaaaactatggctacgttagcagtgaatgatattcacggatcttgccgggtggctcattcctgtaatctcagcactttgggagggtgaggtgggtggatcacctgaggtcaggagtttgagacgagcctggccaacatggcacaacc

SEQ ID NO: 47706 - DNA, 1049 bp, Homo sapiens
gtgtgtctgggacttgctacaaaagcaagaggaagcaggaggttgagatgaagcaagattggccatgagttgttaattgatgagtctaggtacatggaaacatggaagtgcgttatatagtttggtctactttgttttttccttttttttctttatgctcatctttaatgtgacggtaagttctgcctgcttttcacatttacattttctataagttagaaagcaactgagcgggcccttaggatctgacccacttgaggttcagctctagcgccaacattcctatgagaccttagacaagaaggagcctctgttccttagtctgtgaaatggggctgatcacagctgcctcaacgattgctggaagagtttttcataaacgaatgcacaaaaagcacttggtttggtatctgacacctcatgagttttagtaactcacgttctgaatgagaatctggccagttgaccctggctgaccatttgggacagggaggggcacgtaaggaggagtctgggggtccacctctcagatcaggtgggcacacatgcagcttctgcctttgttttttgttttttgtgtgtgtgtgtgtgttttgggatggagttgcgctcttgttgcctaggctgcggttcaatggcacgatgttggcttgccacaacttccgcctcctgggttcaagcgattctcctgcctcagcctcctgagtagctgggattataggcttgtgcatcatgcccggctaattttgtatttttagtagagacgggatttctccatgttggtcaggctggtcttgatctcctgacctcaggtgatctgcccgcctcggcctcccaaagtgctaggattacaggcatgagccaccgcacccagtcttttgttttgtttttaagactcatgcagtcacagaggcttctgcctttggttaaagcagtcttggctccagttacatctttggttggtttggaccttatttggcaacagtttgaagctataatcagcagtcagattcctggatttgattctgctaaaataccgtaggtgaagc

SEQ ID NO: 47707 - DNA, 1026 bp, Homo sapiens
ggtgcaaaccaggactcaagtgtgactgtgtttagaagagggacttctgtgagggagctgagtgcaggcgaggctcctggcgcactccctccctgccacgctacttctaacagggttaggacgtgttccactcacagggagggcctggtgagagacactgagggacgcccgtgctttgtggccattaggaaatgattctgctgcctgggcatggtggctcacgcctgtgatcccagcactttgggaggccgaggcaggtggatcacttgagcccaggagttcaagaccaacttggccaacatggcgaaaccccatctctacaaacaatacaaaaattagccaggcatggtgatgtgtacctgtagtccccgctacctggagggctgagtgagttgggaggatcacctaagcctgggaggttgaggctgcagtgagccgtgatcatgccactgcaccgcagcctgggcaatagagtgagaccctgtctcagaacacaaacgaaaaagagactgtcagggctgggcctagtggtatgcacctgtggtccaacctactcaggaggctgaggtgggaggatcacttgagcccaggaggtcaaggctgcagtgagccatgattgcgccgctgcactcccgcctgggcacagagtgagaccaccccccatctcgaaaaagaaaatgctcctgtcagaaggagagctgcctctctgagcagataggcacattctattcaaccggagaaaattagcatctcccaggccgggcgcagtggttcatgcctgttatcccagcacttttgagaggtcgaggtgggcggatcacctgaggtcaggagttcaagaccagcctggccaacatggcgaaaccccgtctctactaaaaacacaaaaagtagccaggtggtggcacacacctgtaatcccagctactcaagaggctgaggtgggagaatcgcttgaacctgggaggcagaggttgcagtaagccgagatcgcgccactgcactccagcctgggtgacagagtga

SEQ ID NO: 47708 - DNA, 1054 bp, Homo sapiens
actccatctcaaaaacataataataataaataaaaacccattaagtgatgtttgtaggcctggtgcggtggctcatgcctgtaatcccagcacttagggaggccgcaacgggcacctcacttgaggtcaaaagttaaagaccagcctggccagtatggtggaaccccatctctaccaaaaaatgcaaaaattagcccggcgtggtggcaggtgtctctagtcccagctacttgggaggctgaggcaggagaatcacttgaacccaggaggtggaggttgcagtgaaccaagatggtgcccctgccctccagcctgggtgacagagtgagaccctgtctcaaaaaaaaaaaaaaaaaaaaaaagtgatgtttgtaagtaagtaaatcaaatccttctttgcacaaatactgtagaatcggtgccagtcgatcaggacccacctgattacaccagctttatgcagtggatctttcctaatccattggctgcagcctcactttacatactgctttgtgaattctgagtagggagggatgcatttattcactcccccccaaaagtatctggaaagttttgggaaattaaaaggattttcctggccgggcttggtgactcatgcctgtaatctcagcattttgggagaccaaggcgggtggatcacctgaagttcaagaccagcctggccaacatggtgaaaccctgtctctactaaaaatacaaatttatctgggtgtggtggtgtgcacctgtaatcccagctacttgggaggatgaggcaggagaatcgcttgaacccgggaggcagaggttgcagtgagctgaaattgcgccactgcactccagcctgggcaataagagtgaaactctgtcccaagaaaaataaaaataaaaataaatttaaaaagaataaaagaggattttcctcatctcgttcccattgattattatgattgcgcattgatgatgatgatggtgatgatgacgacgatgatgatgattgtgcctcatctcgggcccattgattattagctgctccattctggtaaatctcaaa

SEQ ID NO: 47709 - DNA, 1031 bp, Homo sapiens
ggggtctcgctctgtggcccaggctggagtgcagtggcacgatcttggctcattgcatcctccacctcccaggttcaagcgattctcctgccttagcctcccaagtagctgggattacaggtgcatgccaacacacccggccagtttttttttgtaattttagtagagacagggttttgccatgttggccaggctgttcctgaattcctgacctcaagtgatccacccgcctcagcctcccaaagtgctgagattacaggcgtgagccaccatgcctggcctggatttcactttaaagtcttactgatgttttacattttgtccgtttctcttgtgcaccaatttgctgagcattttaacgatacttaaggagaaagatgtacctcagaattgtgtggttactaagatcttaggcttaagagagactacctggatcctcgtccaactacttcctagcttggtgcccttgggcaagttatttaacgtttctgagcctcagttttggtatctgtagaatgtggataatagaatctacattgtagaacatgataaggactgcatgagcttggcacagggcctacacgcagcgtgctcagtggccaggagcactgctttgaccttttttccttctgtcttatttgaatgtagggtaagagtaaagtctccaccagaagctggtacccagttaccaaagatcatcttcagcagggatgagaaagtccttggtcagagccaggagcctaatgttaaccctgcttcagcaggcaaccagacccagaagacacaaggtaaaccgtaaggtggaaactggctttcagttttcactacctgctttgtagcttttttgttcctaattaaaagtaaaagtaaaacatgatctgttgtcgtcttagcattatattttggaagttacacaaaaatacgtaaatgttaaagaaaaatgtggaaaatctgaagcagatggaaaaacaacagtcatttctccttattcccagtgttagaattttagtaatttatgttttcttataagc

SEQ ID NO: 47710 - DNA, 1028 bp, Homo sapiens
tgtggtcgcagatcgtgggtctggaggccaaggtgtacaccccacattggggctgctagcatcataacagtccacccatgctttggggcctcagcaacttctcatgtctgtaggtcctggcaaatgtagcctacatcatcatagagtccaccgaggagggcacgactgaatatggcttgtggaaggactctctatttctggtcgacctgttgtgttgtggtgccatcctcttcccagtggtgtggtgagtagctcacagggagggaggccacatgacagcttggctgtcaagcccaatagctgaactggccattcccaaactgatctcagtcacatgggacgtgtgtttaaaagtacagctttctgagtcccagactgacctgaatcagcctccaggggcagaaccctgtgtctttttccagttactcggggtattctggcagagctaatccgtcaccatgagctggcatttaacagagttctaagacaatagagaggaattgggaaatgagaacttggtagtaacttaaagtagcagcctgaatttgtggtggtggtagggagttggagaaatcccataaacagccagttcttgccaacttaggtggaaaatgaggaagttcattaacataaaactagtgatagttctcagcacacaaacatttttgatgttttcagaatggattgctccattcctggaaatggcagtgtttagatgcacagattgtgcattgggtctgtgtaaagaagtgttagtgtcaagtcagtggttgatgagaaaatatccttattaaatcacatgcagagtggtagaaattcagaaggctagcagcaataaaacactttacccttagtgatataattccatggctattggaatgcaattcttttgaaataaattttaaagaaaatagattcaccccggccttccattacaagtgcttcttttttttttttttaacccgagatggagtttcgctcttgttgcccagggtggagtgcaatggctcaatctcggcccactgcaa

SEQ ID NO: 47711 - DNA, 1035 bp, Homo sapiens
ccggcccctgcttcgtcctcctgactcgtctacctgttcggtcctccatcttgctttagcgagtgtggggtggctgtggtgactgccactgggaccatttattccacctgaggttggttggtagctgaggatcttagtaaggtgctctgtctggagtagatggcacagcaggtgaggcagcatggggtcagcgttgtcccccagcatctgtagtaaagggtaacttcctttaacaggaacgcttttgtcatggcctgggcacacaaggcagtttctcatttttttccaccaggtgacagcatgggacctcttcagcagagagcgaatctaagagcaggaagtcgcataggtaaaccagggttcacattccccattcttaggaagacatctgctaaggaagcacccatttctcatcagcaaatatcacaaatactctgaaagagggacagagcagattagaacgggattgtcattttggttcatgttcttttccctgaattgattgaggctgtgagatgcttttgggcatcactctgtaccctgaaaagtggttatgcttgcgacactcccagagccagagcagccgtgttcccagctggagcctcccctgcagagaggtctcaggaatggcctgtgctggagctgccctcggttgtgactacagggcggctatgtgctgtgaagcttgcgggaaagcgggagtgggcatgcttccagtcgctggtgctgggatctgtggccccattggccctctgtgccccctcagttcactcctgagatctggaggcaactaggagcacaaaggctacaggcaataatgtctcctattagatttggaagctttgctggatagagcctgacattctgtttcctgttctcaggctcattattccagtgactcatttcatggccttgacagtaacttgggcttttcttttttttaatttaaaatttttgtagagatgaggtctcactctgttgcccaggctggtcttaaactcctaacctcaagccatcgtcctgcctcatgaggcc

SEQ ID NO: 47712 - DNA, 1409 bp, Homo sapiens
tagctggcgtggtggtgggtgcctgtagtgccagctactcgggaggctgaggcaggagaatggtgtgaaaccgggagacagcttgcagtgagctgagatcgcaccactgcactccagcctgggcgacagagcaagactccgtctcaaaaaaaaaaaaaaaaaaaaaaattagccagccgtgatggtgcacatctgtaaccccagctacttgggaggctcaagtgatctgcctgcctcggcctctcaaagtgctgggattacaggcatgagccaccgtgcccagccaatgtgtgttttttattaagctgatttaatacagtgattttaaatttctttaatcaccaaaactctcttgtcattacttttccttagcagattgcactctattcctgtaatgccatcaactgagtcgcagcttctgatgaacattatgaaataatccattaaccagtgataccactctcagttcatttaagctacatccaaaagcagaggtctctcatatcatccggctgagaagcagtcttgtcttggacacattgccaggcttttttaggcctttaaagtgttgggaatctagaacttcagggggcccacagccacccagagggcctggttagtggtccgtggtggcagaccctccctggacctgcctgggcctggttcttctgcctactggtgttaacatgcatgtgctttctgtgtgtcttgagacattgttgagaaccaactcttctcaactgatgactgcagtatttagggaaggtcagattctcttgctgagaaggttttgcctgctattaaccagcctttgtcatcaagcattgggaagtctgaccttcatccttgcctagctcgctgctgtgactgtgtgcagtggacaggaggggttgggggtaatgtgcgcctcagcccagctgcagggttgcgtcccaagtctcactggcatagctcacagcattgcggctgcaggctgcggctggcagagaaacaggagagactgacgggagctgagtctgagatcagcgtggccctttgcacaccaccttctcgggtgcctttggtgcattatggctctagaatcgaaggtaaataggagctggaaacctaacaggcttggcaacagaagtctttgtcagagctagctttcctggtattgtgtggtctttagtgctactctgaggagctgtttctgctgcttttgttgatgctttttatttatcatttaagatataatttcgtttacaataatatgcacagtccttaactgttcagtttgatgacttttcatatctcctgggtcattgcttcaaatgtatatttgaaatgtatttttttttttttttgagacagagtttcgctcttattgcccaggctggagtgcaatggtgcgatctcagctcactgca

SEQ ID NO: 47713 - DNA, 1024 bp, Homo sapiens
agcctgctgttcactgccccatccactcctcgatcgctctgcatcgatggacatctcactgccttttagaggggcctccgcagagtcaaggtctttgacctcatttgggcttttcctcttttttctctccatccttcctccacggagggattgttctcaagtgtagacctgatcgtggtgttgcctaaagcctttgggaggctggttcgaaggtggctgtgacccctctccgttgatttttcagttacagatcgaactccttgttctgctctttcccttctcactgctgcagttgactagtttaaaaaacaaacaaacgggctggcagggtggctcatgcctgcaatcctggcagtttggaaaacagatgggaggattgcttgagctcaggaattcgagaccagcctgggcaacgtagtgagaccctgtctccataagaagttagctggacgcgatggtgtgcgcctgtagtcccagctgtttgagatcatgtaagcccagcaggctgaggcttcagtgaaccatcatcacaccactgcactccagcctgggagacagcgagtgagaccctatctcaaaacaaaacaaaacaaaacaaaacaaaacaaaacaaaacccttcagaatagcagtgtccaatcttttggcttccctgggccacactggaagaattgtcttgggccacacttaaaacacactaacactaacgatagctgattagctaaaaaagaaaaataaaataattgcaaaaaaatcttataatgttttaagaaagtttacaaatctgtgttgggccgcattcaaagctgtcctggggcgcaggttggacaagcttgctttagaggttccctgggacccccaaaaccaacaaggagaacaagctcagtcttctgtgtcttaatttttggctttactcttagccctgccccatttcctaggctctccacagtccagccgctttgagctacttttccttccctgatatgtgcagctctctcacctctgagcctccgcacctgctgttc

SEQ ID NO: 47714 - DNA, 1046 bp, Homo sapiens
cagcatctgccagagaagaggacagaagtcagtaatttccctgtgtggctttattttgctattactactggtaaatattcctcaaagcctgagcataagaaataaaatctttggagattgaaatcaagggcttatgtctgtggatagggtgaggaagggttaagaacaacctgactaaagtgtcttgtgctcccggtgggtgtggctgttagcaatatcttggtcacctggagagagagaagaaattcaagtgtaactagcagagtagccatgtctctccgctgcacgtattaattcacactgtaagtgtcacatacttttctttgagtgattctgttttctgtttcctagttcatttgtgaaagcaaattgttaaagtggtgtcctaattttaatgttgatctgatttcctgtttctttcctcctcatgcagattgtgtgttacatatacttcactaggatcattgcatttctcctcaaactcgctgttccattccagtggaagtggctctaccaggtacgctgctcacagggcagaatgccagagaatttatgcctgaggataaagtcttgaagtgtaacttaacagttgttactaatttatctgggaatgaccactaagaccttccatctcttcttttttttaactaaaaattttttttttagtttttgagacagggtctcactctgtcacccaggctggagtgcagtggcgcaatctcagctcactgcaacctccacctcccgggttcaagcgattctcctgcctcagcctcctgagtagctgggattatagggatgcaccaccatgcccagttaatttttgtttttttagtagagatggggctttgcagtgttggccaggctggtctcaaacacctgatctcaagtgatccgcccaccttggcctcccagtgttctgggattacaggtgtgagccaccacacttggcctccttccatctcttctggcctataattgagatgatctgtttgtccagaaatgctgctggattctatgaggaatctgaaaataattgcattctt

SEQ ID NO: 47715 - DNA, 1040 bp, Homo sapiens
agggtgagagtcgtggtctctgggagttgttttctcacctctggcttagaagggtcaggcagaaaccacaggatgtggggtcacactcactgtcccaagtttgggaacctgaaaaagtctccattcagaacatggttgttctccctgtcccatgctatcttatcttcctaaatgactaatgaggaagcgggtgttctttttctgcactttgattcgccatctgggttctgtagggtgctctgaaggtgtgatctgccttctggctgatgtggaggaagagcaagcgccttcccaggccacagctgctcacctctcggcagatattttaggcaagcatccgtgtgtcttcccatcttcaggagaaaggtaaatgcaccctaagtgttcacttctggacctttttcaagttcacttgggactgtgtgacagaagggagttggagggaggatgggaatatttttaacactttgttttcctgtgcagaaacataataccagttttcgcagaaatgtgtctcaatctgtgactaccaaagccctcctcagtccttccctcagagggacacatttgctgtttctcccgcaagcagatgttgtggatgaggcgatagactccttggcaagaacgaaaggtgtgatgaaacctccctgctcggaagggtctccgtggaggtgtcctcatttcacatgctgggttttgcaagcgaggaagccaggcagtggaggaactagagagaggcaggcgtgtgtgtggacaagcgctggagccgcagccctcagactggcacgggaacgccagcgttgggtgttcagattccacgcgtatgtctgggctcactcacagcatggccgagtgtctgcagtgctggtcctgacccttccagagcagcagtggacagatgagataagactgtttcagaaacaaagatggccacagccttcctaacaagcaggtcatctggccatgtctgtattgtaactggtaaaaggcttcaagtcagattgatgatcaagaaaagtcaaaaccccagcccaagattg

SEQ ID NO: 47716 - DNA, 1052 bp, Homo sapiens
tgcgcttctggaaggaggacagtcagtgatcaaaggtgtcaggaccgaggggactgtctgatttagtaagatgggtcactcgtggccaggcccaaaggccccgccttctattcttgtgctgctcaaacccaaaggccctcttgctggtgcggttttccttcagctgtggtggagggctggggccaggtacagagacactccggcagccctcaaccctggagatggatccagggccaggtccgccccaggagggatggcggaagaggctggattggctggccgtctgccgtccatgcctctagctgaagccagcgccgggagggggctgccagcccctgccttttgctcccaccatgtttgagctgagcttcaatcaggagagaggtgttttgctttagggaaatcaaaatcagacttaacatcctcctgggctcctgggactggctctcgtgttcattcctggcagacaagggctgtgtggaagggaggaggagctggagtagaggagctggggacctcaggagcgctgccggggtggaaaggaggctgtgggcaccgcgggtgcttcctggctgtggggtacgagcctggagtctgtgggcgtgggggtgcggcgaaggctaggacccactctctgctctgagactgcagctgccctccccttctgcagctctggctctctgggggtcagtgaaggggagtagagtggatgcccagccccccctctcccagggccctgtgtcggctctgatttctccatccactcctcaacaaccttgacaatggctctgcctggtaggagtttataccccatcctacaggtgaggacttggaggttcagaggggttaagaaacttgtttggaatcacccaggcttcaagtggccctgacaggatggcaccccagaactttcccctgtctggccccatggagagcatggcccattgccagttttaaatcctggttttggtacgagcctgggcctgcaggcctggaggcagagtgtgatggagagagttcgttttaaaaattggccaaagccagatgaaatt

SEQ ID NO: 47717 - DNA, 1050 bp, Homo sapiens
gtagctgctttttctcaaaccgtagaggggctgcggctgtgggctttgtgggctgtgggctgatggggacagcagtccagctgctcaggatgggggcatgtggaggggcccctgagcgtggggtccagacagcctttgttcagtggcctttgtccttgcgggactgacgtggtttcagtggaactgggttgggggtggcgctggggtgtttgttggtggtccttgctttgagttgcatctttagggaccaccaaggcctgaagggttgattccaggccctgttcaccaaagagaagggtttggataagaaagtccttctatgaccttgagaggtcctttcccctcgctggggctccgtcaccccttctatagaatgatcgattcgattggatcagggatggcaaatgggtttgctcttggatgccagctctattcaatctgtcgtagctgcctggagggccgtgataaggattccgaggccgtacgtcatggagcaaatggaaaagcggcagtgagggataagtggggcctgtaatggatgagcagtgccagggctgggcctgggggaggagggcggtgtattgtccgtctttgtggaatgtggagcagacaggaggctcaccatgtaaggtggctgagctgtaggggtggcacgtagggacatgaggcaatgagcttggagattttccagtcaagtctggcagggccgggcaccccccaggagcctccagggccactccctacacctccctgcctcaagtccaagctgcagatggggcagggctatgctggcccgcctggctctgctgagcccttgctgggaggtgccccatcctgggattgagtttccgccctcactttccacttctgcacttccccaggtgagtgccctagaaacaccctccttctagatcttcacccatgtggctctgcttcctggaatgcccgccttccttcctgggccatctgaactctgcccctcccaaggctcagcccaagtcgcctccaccatgaaacctccctagattccccatccgtacatgttctccc

SEQ ID NO: 47718 - DNA, 1031 bp, Homo sapiens
aaaaaaagggactccaaagaaataaggaatccttctttaaatcaaacttacttaaaactaaaataacttaaatgtaaatttgaaataatgacgttagggaaatccaggtgttacgtgccttcagcaaaataacataaaatggtcaggtgcggtggctcacacctgtcatcccagcactttgggaggccaaggcgagtggatcacttgagctcaggagtttgagaccagcctgggcaacgtgatgaaaccccgactctacaaaaaatacaaaaattagccgggtgtggtggtgtgcacctgtggtcccagctactcgggaggctgaagtgggaggatggctggagcctgagaaaccaagtctgctgtgagccgtgatggtgccattgcactccagcctgggtgacagagtgagaccctgtctcaatcaatcaatcgatcagtcaatcatagaaattcctgtaacgcagggctgcttattagattctggctggagacagctgtttgccctaaaagctttgacctgaggcctgtactttcttaattaaaaaagggagattagcccatgttagaggagtggtagagacgtgctggcctcagacccagctggcgtcttggtaatgatcaaaagatttatcgacagagtgtggagcacggaataataagtttctcgtggtgtgcgtccacgtggcttaaggccaaggccgcacattccttactgtccccctgtctgcacttccgtcattttgggaaacagcacagaccctgtagtcacactgactggggtgtgaatctgacttctccgtttcccagccctggggcctgggtaggtgacggagcctcagcttcctcactggtaaaatggggatgagagcagcacccccttcttggcttggccgtgagggttccatacactgagggttgcgccgagcttggcatatgtcgtgtacgcagcgagcgatccctgagcacagctcggttgtgctcatcggcgctgttttcggcacttaccctctctggatacccgagatcga

SEQ ID NO: 47719 - DNA, 1271 bp, Homo sapiens
cagttccagcagatgaatgtgtcatgtggcacaccttgtcccttcccgcagcatttcctggttccccccagacccttgagcgctctttgggacccagaaggagtccttgcacagggaaggcttgaggtgagaagccgcttcccagactgtcagggccaggcctgggtctagaattcttgctgctgctttgcagagtcaacagcccatcagcccatgttttagaggggacactttggtcctcggttcccaccctcagcaagcaggcctccagcccgaggaaggcctctgccgtagtgacgttgccgtgtggggctgcgtggctgttccccttggctggagcattcagccaaccccagcgtcccccctgaggcgttcattggcagccccctaggactgcacgctggccccacggtaaccccccctcccccaccaacatcctgcagggatggggtcagtggttccaccttcacaggccactttgaagggtggattctttgaggcccctgccagtcggctccctgctcagctgctggcccgggcgacctgggactcagcaccaacggctgaagtttctcagctgggctctgacctggggtctggggcagggaacgaacatggtggctttgggctgagaggatgagggaggtctttcccaggtcaaattactttcctttggcctctgcctgaggctcgatttgcctctctggtccaatgggactgacactgttgtacaacctgacctgtggctgagggtgtctgggcttaagcatgtggaccccttcggtgtgtccggccttcctccatcgtcctgccctttggccttttggtttgaagccacaggtgtggcttctggccttagcagatggtatgcttgcggaccgcagcccagcatgccggtgggcccacagcccgagccagcccagagctgccggaagggccgcccttcccggccctggcggggtgctggacactggccattttcactagagtttgcctggcagggaccgatctctgccccctcctctccccaggcctctggctgcagtgatgccgcagaatcctgagccaggtgcctcctgagcagcccgtgcgcctctccacagcggcgtttgccacccaatgcggctcgcttcagatgctctgatgcagagggcacgcccatagtccctctgcagagcctcgcactggggccagggcaggcaccagccccaggcggccagtcggccacggcctgtcctcttcctcgtagcgtctgctcctcactttgtgtt

SEQ ID NO: 47720 - DNA, 1230 bp, Homo sapiens
ttgtatttttagtagagacggggttttgccacgttggccaggctggtctggaactcctgacctcaagtgatccacccacctcggccgtccaaagtgctgggattacaggcatgaaccactgtgctcggccatgagagcatgtgtaggactccacagcttcagggcaccccagccctctttttgcggtgaggagctgacctccagagagtggaactagtagcattgttctaagtgcctgccacaggcatctgggagatggtccctgtttccatggagctcatagtgggggagagggcagttagaatacagcatgatggccggatgtagtggcccatgcctggaatcccagcactttgagaggctgaggcaggcagatcgcttaagtccaggagttcgagtccagcctgggcaatgtagtgaaaccccatctctacaaaaaatacaaaaattaggcaggtgtggtggcatgtgcctgtagtcccagctacttgggggtggtggcactgagctgggatgggaggatcccttgagcccaagaggtggaggctgtggtgagctgagattgcatcactgcactccagcctaggtgacagaatgagaccctgtctgaaaaaaaaaaaaaaaaaaaaaggatacagctctgatgggcaggaggcatggcgggtcactgaggcgatgcaggtgatccagctgtttctgtggagctgcccctccgtgtttctgtggagctgcctctcttggctccaggtgcctctgggaggaggcaggagcaggggtgactctcagagctgggtgaatcttgggccagcatcatcagatcacacttgcccaggacttcccttccttgagtctccagtggtggtcttgtacctatgagcagggggttaaggagccgagctgatctgagttggagtcctggctctgctgcctaccagtcaaacgagatgcagggcaagttcctcagcccaagcctcagttttcctgactctaaaatgaagagaaccccagatggaagggcttagcctaagacggacatgtctattcccttgattgtggtgttgatgtcacgggcgcatccgcacgccgaaacttgctaaattggacacaaaaaaatatgcgattatttttgtagttgatgaatgtgctgattgggtattctcgtgtgtgtgtgaggtgccaccctcaaactttgttatgatgttggcacattacccatctgatatttaaaaa

SEQ ID NO: 47721 - DNA, 1199 bp, Homo sapiens
ctcccgccagacgctatgtccagcaaaggctccgtggttctggcctacagtggcggcctggacacctcgtgcatcctcgtgtggctgaaggaacaaggctatgacgtcattgcctatctggtgagggagcgacctgggtgtctgtcttcctgcgtgtcctgcaacctgtcctgtctgccccctgccagcctctgtctgggttgtcagcctgtctgctcaccgtcactcattcaagcctggcctcttctctcgaagcctgtcttgaactggaactaggaaaatagcttctcgttgtactgcctcactttctccatctgcaaattggccatccttgagatgccttccagagccaggtgatggaggcgcggggagggcacagaagtgaacttggcagtgctgctggcttagcctgcttgcagagaggcatgggctgggacctgctgccagccctgggaaggcacacagtcttcccatctccagagtatgctgtcagcctgcagtaattcagcaaagattgtggaatcctgagctggaaggaccctgggggatcacctggttctgggatgggaaataggtcacaggtgatgggttatgtgtgaagccacttcctcatccagggcccataggagtcatccctctcaaactagctcctcttcgactgaacctggccacagctctgagtccttctctgtgtggctgtgctgttcaggactcttaggtgcaaattttagaaactgaactcaaaccaacttacgcaaaaaggaaagggaaaagacaattcttggctcacacaactgagaactccaggggtaggatggcttcaggcagggctggatccaggtgcttctaagatctatctccaactctacttggcttcattcttggcctctccacagggcaggcaaggctcatggtcaccctcatagcccacctttcccaaaaaggagggcttacccccagtagggcccatggggacccaccacgcattagtccctatggctgcatcatggggtgcgaggcttgggccatgagcctactccttcagtgggcgggatttcttcctctccatccctgtggaatggggtccacccaggaaagaaggttctgtttccagaggaagtgagcctgggtctctggacagacaaaacttagctcttgccaaaagtggcttgtttgccggcatattggcatgtctaact

SEQ ID NO: 47722 - DNA, 1075 bp, Homo sapiens
agggagagtaacagtgcagtgtgctgggattgatgaatgatgtctactacagatgcagaagaagaagcaccaggtacagcgggggtggccccgtataggtctcagctagctgaggcccctggggctctgtatgccagatggcccctgtccttgcctacttcttccttctgggctcctcttcccgtaggtgttcattgaggatgtcagcagggagtttgtggaggagttcatctggccggccatccagtccagcgcactgtatgaggaccgctacctcctgggcacctctcttgccaggccctgcatcgcccgcaaacaagtggaaatcgcccagcgggagggggccaagtatgtgtcccacggcgccacaggaaaggtgaggcacctgggaagggccgggcagagggagatggaggcggaggggtgtgggaaggagatgagcacccctcgagcggtttcctggtgtgcctccggggcagacttggtgcaaggcagctacatggctttgtttagaccccaatgagaggggtaacagctcgcccctgcgctctgtgcactgtggcacctgaacgcccattctgagtcctcacctccaccttctgctgtgggagcgatgtcaccccatttggcagacttgctgctgaggcctggggacattgtccaaggtcgcattggccaaggtcactgcgtgagtcccccaggggacacgcaggaaagtgttgaaaaccctgagttggcagagtagggttcaaaggcagctctgctgctggcttgccgtgtgtcctcagccagggcccttctccccttcctgaacctcagtttcttcatttgcaagatggggctcatgccatgtcttagtttcccagggcgagggtaacaaaatgtctcaaactggtggcttagaacacagaactgttctgcctcatggttctggaggcctgaggtccatagtgagggcatgggcagggccacgcagcctctgaaggtgccaggaagcctccggctcaggcctctctccagcttccagtggcctctggtgtcccttagcgtgtggctgcgtcactcctgtccttcc

SEQ ID NO: 47723 - DNA, 1050 bp, Homo sapiens
taaatatttttatataatatgtattacatataaatacatatgttttatatatatatatatatatatattttttttttttctttttctggagactcgctctgtcacccaggctggagtgcagtggcacaatctcactgcaacctctgcctcccaagttcaagcaattctccctgactcagctcctgaataactgggactataggcatgcgccaccacacctggggtttcagcattttggccaggctggtcttgaactcctgacctcgtgatctgcccgccttgggctcccaaagtgctgggattacaggcgtgagccactgcacccggctgtagtagccatattaaaaaatagaaaaatgaaacaagtgacatgattttaataacatgttttaccgaaaccgatatatccaaaatattatcattcctcctataatcaatgtaaaaaaataattattaatgtttacattcttttttcttctgtgttgagtctgcaagacccagaatgtgctgcatgcaggcatgtctcgctagctggctggatttcaggtgctctgaatggccacccgtggcttgtggccacctgtgggcagcacaggccgggactgagctcttttgaggccgctttgggctcaagctctggaagagttgccccctcctaagcccccaaggggctcacaggagtttccattttgttctttctaagaggaatctctttccccgtccctttaaccagctggtagctcttgggatgcgtggcctggaggtgagccgtaatgagctctaatgatctgttttgaccccagacaccaggcagctcagtggctgggacagtagctgcttgttgacttgctgccagcgaggccgcaggacggggccctccctcggttcccacagcagcttgtggggccagggtgtccagtttcgaggtctttgtctgcagaggccaagcccaggcactgagatgggattggggcaggggccaagctgctccaggagctgggagtagggctgtggtcttcccatggctgctctgaggggctgaggaggtgg

SEQ ID NO: 47724 - DNA, 1037 bp, Homo sapiens
gcagtgtttctgcacccaggaaatgtcagaatgactgagcagtgatgaggcctcctccaaaattctgagccaggcaggatctgagatggatgacacaaaaatcaatggggctttcaaaaatctctgctttcaagacgcttcggtagccaaggcaaaaaggcgccagaggactcataaaaaacatgcatttgcttcgctggccatcctctcccaacccatcgtccaacggaaaaacactcagaaccaccccatccttgtcactgtcaccataatttaaaaaaaaattttttttagagacagtgtctcactctgtcacccaggttggagtgcagtggcacaatcctagctcattgcagcctcaacctcctgggctcatctgaccctcctacctcagcctcctgagtagctggaactacaaacgtgccctagtacatctggctaatttttgtttttcatatatttatttatttatttttttacagacagggtctcaccatgttgcccaggctggtcttgaactcctgaactcaagtaatccaccctccttggcctccccaaagtattgggattgcaggtgtgagccaccacacccagctttggctaatttttaaatttttttttgtagagacagggtcttgctatactgcccagcctggctataattattatttttaaagccagactacaaggtgggagctagaaacaggatggtctcacgttgtctacatgttggagatcgttttgttttttctcctcaattacaatgagagtgtgaggggaggcacctcgggaccgagagaggctgggaaacacaaatctctttggtcttgggagggtcattgtcattggcccctgttgctttcctccccgccctttagcctctccttgctcctggacggaggtccgctgagaagggaggcaaaggttctttcacgccaccgcccaaaaacagaggctccacggagcctggccggctgctcttcttagcacccagctgctgagctgagtgaggagcgaggacggagcccagcaggcca

SEQ ID NO: 47725 - DNA, 1029 bp, Homo sapiens
tcacagctcttcctcgagccctgaaccccacctgcgccctcccctctctggactgatgggaggcgatgctgtggcctcgaatgttctcgagacaagactgtcagtaagtagggcacacctggaggacgctctgaacacttacctttgaggtaggtcccaaaggaagttggaatgtcagagcagcaggaacttgcagccttcttgttttccagatgggttgcctgggtctaagagagggggctgagaccggccaaagtcacacagcaaagccaagctgggcaccttctgtaaaggccaagctgggcactttctgtaaagcatggttgtaggactcctggtgcccagctccagccctgcaaatgtagtttggactgccctacagttggccgagctgaggacagaaaagcagggaggcgggcctgggtgtctaggagttgaaaatgaggagggctcctgctaccggcctacccaggatggcgccattacgactctgtggccagtgtaaggatgggctttgcaagtttctggaattttccaaaatgtacccaaactaatcactagaaggcctgtttccaacccgatatgtatccagttctagcatgtgccaggatggaggaccagcaggactttgtcagtgtcgtgctcttgggaaattgctttatttctggtaataaggtttctaggctgattgaaaatttgctcctcgaactttatcgttatatctgccattttggagacagagatttcctgtttctgcacacactggtctttctggacacactgctgaaccattcccctttctggtggcttttttggcactgtcatgtttgtgtgcggtcatcatgttttgttttgtttctctttcagacagggtcttgttctgtcaccgaggctgtagtgcagtggtacgatcatgactcactgcagcctcaacctcctgggctccagcaatcctcccacctagcatacaccaccacacccagctaatttaccatttttttgtagagacggggtctccctatattgcct

SEQ ID NO: 47726 - DNA, 1215 bp, Homo sapiens
tcacgtgccctgaccccgccccgcagacgcgactcctccagctgcgagcgtcccggctttcccttccgccggaagtagggcgactttccttttccggctacgggtccccaagcggagcgggaggccggaccggggagccgagcggcggcgtcggcggcgtcggcggcggcggcgacggcggcgggggcggtaatggcggagctggtgcaggggcagagcgctcctgtggggatgaaggccgagggcttcgtggatgccctgcaccgggtccggcaggtacgggcgcagccggctggcaggagcacgagatcccgaggcggggcctggcgggcggggaagaggggttcgggcctggggggcgggaggcagcctgaaccgacgtctcagccgggccgggccgttccgtggagttcctacagccgggaggagccggggggataaggcgccactgcgaggcccaggcccggcctgtcgggcgggtctcccaggtgcctgaagtcgctgggaaagggtttgcttagagcgtctggccccatcgtgccccagcggccagcctggacccacagtgtagctagcgcggggttctgaacctcgcgaggggaggggtccgggaagcccacggggaggatctgggtgtagacataaagcagctgtctgacgcccagtagcttgttaaaacttggggaacatcgtctttagactttctgttgagtagaaggaactcgagggcatcttatatgtgagggtgctctttggagaggtgagagagggaggtgttacatgtgtgggggtggtccccaagatgtagaaatttctcatggcaagcttgcctctactggggagaatgatatggcctcattccgacattgaaactttactgtctgacaatgtcgtgcatttaatcaaagttaaattaactgggttttagaaggctccaggcttccccagagagtgaatatgggacctgccaaaaatacttactggcttctggcatggtacttagaacagaacgtgttcttcatttgtatctaaaacttacttacaagtcagccctaacacttcagcttcctcggttaagtgtcttatgtcctcctctcttcttatgtaattgtaagcgcactgatactttaaaagttgggctataactaattactgcttgattcctaacagaaagccacaggagtcattgtattagaagaaggtcttcactcgggc

SEQ ID NO: 47727 - DNA, 1119 bp, Homo sapiens
gaagaactggctggaaaatcaggactgttgactgattcctggtccagtgctctccttctctgagtttccactaactactggtagttaagtgtctgtgacgttgatttgtttttcatttatcactgtgcttaaaatagcatgggtagtgagataacccatttgcctccccctgaaaagggggaaaataacttgtgtggtagaaaattggtagcagagtcctctcagggtcacgcttgcagataaggaggagagtggccttggttttgtggaccatcctggcttttatctcctggcctacagcattatgaactgaggactgtacctcacttcccttaagtaactactgtttaaaatgatcaattatgtgaagaattgcttgggctctgtgcactggaagtcaggctttatttaagtccttgggaactgagatatgtttaagaaaatattaagtggagggaagggagcagccaagtggtcagagaattttagtcttgaaaatgtgcactgagaataattaattgaaaataggaaattaatgttttctaactttaatgatttgtgtacctcctttatggtttttgccatatcattgaatcttcgacataccatttacttggactccagagtcaggcagacctgggtttgaatactgtttctgccactttttatttttgtttttgtttgtttttgttttttttttggtaaactgaaagcaagtttattaagaaaggaataaaatagagcaggctgtttctgccgcttataagatgggtgactttgggcaggtcactccatgtctgagccccagtttttattgtcttaaaatggaaataataaggccgggcacggtggctcacgcctgtaatcccagcattttgggaggctgaggtgggcggatcacgagggcaggagtttgagaccagcctggccaacatggtgaaaccccatttctactaaaaatacaaaaattatccaggcatggtggcgcatgcctgtaaccccagctactcgggaggctgaggcaggagaatctcttgaatccaggaggcagaggttgcagtgagccaagaacctcctagagaatcatggtgaggaataaatgagatagcatatttaaag

SEQ ID NO: 47728 - DNA, 1029 bp, Homo sapiens
ctgtaacctcaaaccccggctcaagcagtcctcctgcctcagcctcctgagtagccgggactacaggaatgcaccaccacgcacagctacttttttattttttgtagagatgggggtcttgctgtgttgcccaggctggtctagaactcctggcctcaagcagtcatcccgctttgacctcccaaagtgctggagttacctttgctagccaccatgcttttggctggggtgttttagaagcagaaatcagcatgttactctcctgcttaagacttgcagtagctgcccatcagccttcctataaagtccaagctcctcaccatgacctgaaagggtccagtgtgaactacccacctttggaacatatctagttccttccatgctggcaagattgacttcttttccaggctcatacctaccaagcttgctcctgcctcagggtctttgtacaagttcctctgcctagaacatgctttctcaatttttatgtagccagctcctcatcatcacgtaggactcagatgtcactcctcacaatggcctgcccattcaccccatttaaagcagcttcctaagcacgctctgtgtgacattatcttctcttactgtggtaatgcttatcacctgctgaaatgatcagtttattgattacctggtttacctttaacttcccccagctgctgactcttaagtgccaggcctggtagttctccttcaccacaaaagctccagtgcctcaaaaagcccatcacacagtaggtacttaacatttgttgggtgaattgccttgttttacaaccctagtatttgtggtgtgttcaagtattcctccgccttcaggaatcttattatcttttcaaaaactatgaaatatatggtattaccctggggcatcatgcagagaggagggaggcttgcctcaacatcacagaactcgtaaatgtaagggatgatgtctgctgtttaaatcctgtatttggttttcagtatcatgattgtctttggttgtttatttgtttcaggtaattt

SEQ ID NO: 47729 - DNA, 1050 bp, Homo sapiens
gctctgagataaagacttggcccctgagcatcagcttggaagtaatttgacctatttgagaattttgtttgatttagcctaactcccttcttcagtgcgcatgggaattgaagttcccactttctccacagaaaagctacgatttggtgcatggctctagggaagctgtggctacatcttgaccttaaagaaagagaagaatggtgacctttctgcagtctagctgccagctttttcaccattcccatttatgtcaggctttttctagaagcatcccttttctttaattcgtttatttgttgttttgttggctggtttatataccctactccatcccaaaaagaatttgagaacacttagaagtgccaatccccagcactctggcagagtatctatcagatgtgtttctgtagagagcttggacatctttatcatattttgtctcctgttactatagaagagatagtgaagtacactagattgacatgaatttgcatgtagtcgagtgagtcggtgtcttctctgtgttctttttctgtcgctatgtacccaatcatttatgtttgtacatatttctgtgatgtattattatgtgaaaaatgaagatgtagaacagtatgtattatataatcttttctcccaaaagtgcatatttttatatacatagaaaaatataatttgccatgactcatttctctggtctctaggaattcttgtttttttttttaatccctccttagcgatgggatcacactctgctcaggctagagtgcagtggcgccgttgaactcctgggctcgagtgatcctcccacctcggcttcccaagtagctgggactacaggcatgagccaccatgcctcctagtacgtttttaaatcctccagttcatagacttgtttgcaaatctcaatgtcctgaataaaccctatgttaaggttctttttagttaacttaagagttgaagtattttattttatttgtaatttttgtgagtgcataggtgtatatatttatggggtacatgagatgttttgatgcaggcctgcaa

SEQ ID NO: 47730 - DNA, 1033 bp, Homo sapiens
tcgcagctgttaatagggaagaaaagtagttgccaaattaaaagaggattcataggtttccagagttcaacttgatggtagaacctctctcgaatacagtttgggagtgtcacaaaactaaacatgcacttacgcacagtccacaactgcactgttgggcatttatccccaagaaaggaaaatgttcacacaagagcctgttcacatagcagctttattcataatagtcccaaactgaaaacagcccacgtgtccttcaactgatgaatggttctgcttgcgatacagccataccgtggaatatcactcagcggtaaaacggaacaaatgctgagtacatccagcaacttggatcaatctccagggaattatgccgagtgccagaaaccaatcccaaaaaactacatactgcatgatcccctttatgtaaccttttgggaacggagaacagattagtggttgccagtggttagggattgagtcggaggagagggggtcacctaagatcacagctagaagggaacctgaagcttaaactccttattgttgtagataaggaaaccagtgtctctgaagaagtaagtggtttgaccaaggccagatagatacatgataagtgacagaagggaggttgaacctgggtctctgtctcatgtgccataatagtatagtacttaaacatgtggacttcagagtctgacagatcaaggtttgaatcccagctttgctagtcattagctgtttgaccttgggcaagttccttaacgtctctgagcctgtgtttcctcatctgtacaatggacctgatgatacctgcctcatcagattatcatgagggttatatcatgttattttcaagctttaagaaatactactcccgggcctggcatggttgctcatgcttgtaatcccctttgggaggccaaggcagacagatcaacgaggtcaggagattgaaaccatcctggccaacaaggtgaaaccccgcctctattaaaatacaaaaaaattagctgggcatggtggtgcgcgc

SEQ ID NO: 47731 - DNA, 2847 bp, Homo sapiens
agaggttcctgttcctggagttggacatagaagttggccatatgagtacccagcgcccctgatctaactgctggttttcatttttaggcagcaaatgggaatgttccgaagggaatgaaactgcaatcacatgtttcagccttgggtggactccagcatttgcatggaggagggagatgatttatccttcctaagcatctgccagctcagagttgactctggacttgaacctgatttcctctcagtgatgcggctctcagcagcccatctatctgtgggatgatagtgtgaacattttcatctctggtcattatgagtgcctccaccgtggctggcaggaatggtgtcatgtgcgtggcacctgtaacacatactttgccaacaaaaaggaattgccatttttgtgatgagcacaaaatttcaaatggcttttgaacaggagccctctgaatattcttgtgaatctcaggaagttctttatggtagcactgccctttgtttctgtggcttttctggctgagacagaaatttctgaagatcatcggccctttgacatcctttaccaaacaacgcagtggaccagaacccacggtgcggcctcattcccccagctgaggaatgctgagcacctctcctctgtgttctcatcatttcaagacattttagttcttctggcttcagtagattctttacccactaagaggggaattctgatagcaatcagggaagctgagcttgacccataaataggaacagctaaccaagctcacaggtactctgtcgttgacattctcctttggtgtgtttcttttcctccccactgccctatgtggccaacatacctccctcaggaatgtctcagccccaacattattcaggggctgagtctgtggtgaggatttctttcctgacctggtgattgtccagttttcatgcagaatgggagttgtgaacactacctgttccaagcaagaatgtttgttatattcaaacagataggcaaagagaaaattttaagagtcagtaaaaaacaattctcttatccctgagataagcagattaatagtgtctagtgtcaatattttggctgtagaccattatcttgttattgatccagaagaaatatggtattgacttagtagcttcgtttgctttttgctagcattgttttgctttgctttttcttctttttaaatgtcacggtctgctttttttcctttgtctctttactgtccagtcggagaatgacagcagtgagtttgagcacaagcagagcagttggctccctgttctgattcagatggagttcaattgtcaaaccatttcattctctgtcctcaagtgggtgtaatcgatcctttgcgacttagctcatgtccttagaataactttccccaaagacgtatttctgaatgccctttttagcatgttgtaaggtgcatttggttctttgtgatatgtttaggatttgtattttttcattgtctgctgactgtgtttcctgagctgcattttccaaaagagaaacactacagaatcatttttgctgatggctggtgaaggagagacactcatcaatagctgaaagaggagaaactggaacaaaaagtgtagctaaagtggttttgtgggaatgtgattacagagttggttttaataataagaggctgtttggcaccgttgtctttgtgaaatgggcttgaaaggcagttgctcattcttagtgtccgctgcacatggactgctctggtgggtccgtgacgaggcctgtggaggtaggaggctggatcctctccttcagatgcttatggtcttgggggtgggggggccggcgaggggggcaccagggggcgtctcctcccccgtggccaggaggagcatatgtgcgtgttcctcatgactacagctgctgtggagcagtccttaacaatgcatccaaggagggtaaatcttctcatttgtttttaaaagagaaagaaggatctctttccatctttacattgagtttggatccagagcaggagggaggtaggaagttagagggatttaggctagcaggattttctcccaggcctcacagcatgtggacacacagatcaatttcttatcctgtgttcagctggacactgggttacagactgtgttgatcaagatgtcccctcctgtttcatatcatataacgcattcatttcagccactgagcctaaattactgtttgctttctttctgcctttcttttccaccccacccgaaatggtaagaatggtaaggatgaagttagtttatccgtgctaatgctttgattttttttttctctttctctttgccacagtaggtaaccagttaggggccttggtacatcaaaggtaagcagtgggttacgttttattatttattgatcatttctaattgtttattgatccaccatctgtactagagtgctagaaagtcagaggttgagaatgtgaaaaagcatgggttaggcttctttaagactcgagttttttgctagccatttctaagatagtgtcagctcagggataaactaatacaaggcattaaaaatcagccattattgcagtaacttaaaatacttgtagaagattggagttgctctttctaccaatgtacatttaatttaaaaggagagaatgagattttcccacctggttttgtggtgttgccagtattttattaatccttaaccccttcacctgagaagagacacctcgaagtgtgagggtcagacactcacaagagaatgctttgggtgcccagggagtatgggtgggtggctagtgcgtggtgaggaggccagaagccagggttccatccttccgaagtggt

SEQ ID NO: 47732 - DNA, 1050 bp, Homo sapiens
ttttttccaaaatgttctttgtttttaggacggtaataacggaagaattcaaagtgcctgacaaaatggttggatttagtaagtatccatgttgtctactttttccctgattcctgtctcttctttttctctctttttttctgagctgctttgccaggatgttctttttgttttaatctctcttgtgagtatcacctgtagtagaatgctttgcacatgccattccccacagctctgaaatgctgcaggtctcttcaggctgagggagaaaccagagcactggactgtggatgtccctcccttccccacctctccccacctcagctcagatcccctctgcctgtaggctgtttcacaagggctttctgctgccatcatgcccaaagagtggagatgggctcacgggggccaactcgatgtgtagtattgtgagccaagtgtcacagtttgtggaattaattcagtcattcctgcgtggtgaaatatggaataggggcgtgtattctgaccctgttcaatttgtttcagttatcggcaggggaggtgagcagatttcacggattcaagcagaatctggttgcaaaattcagattgcttcaggtaagggctttttaaaaatagatatcaattttgtagaaatcagtattttgcaaaactttccagattcggtactttgcttgttgcttgggtaagtatatgcgattagtgttttccttgcactttgggagttggactcctaaatgagaaccagaaggatcagagcaaaggtgggcccggagataaggcctcctatctggcttctggggtaaaccctccctcagctctgtggccagacatggccccttcccaaacacctgccactctaggacctatgttttctgcaccagaatgttatgccagacatagtggcatagtggggcctgtaggaatcctatggctttggggtcactccttgactacatgcatcaggggaggctcccatggatgagactgtcccttccctttgtgggaagaggatagctgggggtcctggctgaattagcactcact

SEQ ID NO: 47733 - DNA, 1280 bp, Homo sapiens
gcatttaaggaaccagattgcctctcgcctttccccaccctgctcagcgtccggccgtgggctccagtactgtgatggtgttggatccaggcctgtgggcggccacagagtgcctgcctcttggctgccctccctcagaggccttctttttctatcacagcctttgatggtgtcttttgtagggaaaaaccccaagcaaagaatatatcattaatgtcccataaatttgcaggaaaataattttaacttaacgggttttagtgatttttaaattttaaaactgtatatttcattttttttttttttttcatttaggagatggagcctgctgtacttagggcacctatgtatctcttcaacctgcctaacattttgctgtatgtgtgtgcatgtgtgtgtgtttctttaccattgaagtggcagatgttatgacactacccctaaatccttaagcatgtgtctcctaagaataaccaggcctaagaaaactgtacttctgaaacattatctggtatccagtacatgtccagatttctgcaaatgtcctaaggttgtcctaagatttaaattgctgacgggtttgttttgtttcttcctagacacagttctcacattcccttgagttgtaaggtacagtaggtctttagcgcagattcctgtgtggctggtactggcatgggttggccaacatgcagtgatagacttgccaagtgtgtgttttggggagaagaacacttgaatctgcctgggatatagtgacgtccacaaggaagtctcaccagtaggttatagaaataagataggcttgcccttttgttgttgttgttgttgtttgtttaaagcaatgtgtttggctttcagccttttctttttaacttactggagtgcctctgtgttgtaaagccttggcaaagttctctgtctcatggacctgccctcagtgggcgctcttagacaccccttcctgctagaaagaaatggcatcaagaaacacctaggccagtccactttattgatcagaaagaaaaagatttaaaaatgtaaaaacacctaggggtgataggaatccatttctgaccacacgcagatgtgctcacccaactgaggctttttatagaaggtggacccttccccgtgtggacatttgggcagtggaaagaacacatcacttaagatacgatacacacatccccctacatgtcccataagccataagtgaattgtcctacagctgagcgcctttaaacccaagttaagagggtttgatcttgaaatttcac

SEQ ID NO: 47734 - DNA, 1054 bp, Homo sapiens
ctgttttctcagctacttagaggctgaggtgggagaatcattggaacccgggaggcagaggctgcagtgagctgagattgtgccactgcactccagcctgggcaacagagcgagactcagtctcaaaaaaaaaaaaaaagtgccctttaaaaagacaggtttgtgaaaagttctgatgtggtttggtttctctgtgcctaggtatctgtgcctaggtttgctgtggggattgtaataggaagaaacggggaaatgatcaaaaagatccagaatgatgctggtgtgaggattcagtttaaaccaggtgggtatgatgatttaaaaatccttagtgttaaaaaaaaaaaaaaatccttagtgttaaaaggatgataaaacaccttacaaaacaagggcttggctattggttcatgtgtattcacctttctcatccttgcaacatcctgctaccagatgaccaatctcagtttcttctcccagccttcttttccctccccggatacatgtcggtcacctttgatttccaggccttttttcttttttcttcctggagtatatgcatagtatgtcataaatgcatagtatgtcagcttctgattttgccaagtaaaattttaaaatatatatgtataattttgattttattaaattggagataatttaaaaccacacacaaagacaaaacatcttagaataaaggacaaatttttaaattttataaatttgccttaatgagcaaaattttcgacgtggtctgaaaagaggaaaacatggcaggctcttctctggaagctgttgccatagctctgctctgactcccttggcttttttaaagtcaagctttgttttagttctttaatgatacattttttaaatggctataattgcataagaattgagcattgacctgaaacatgcaaaacaatataatgacacacattttcctatcacccacatcactccaaaagagtccctgcagctggcagtattcctgttgccccttttggcaccgcgggtgagaatattgattgggaatcagattaatccttgtttc

SEQ ID NO: 47735 - DNA, 1028 bp, Homo sapiens
ctgtgatctttccaggaaagagacggctttggaggcctggcagcagccagaggaagaggtcgtggccgtggcgactggagcgtgggagcccctggtggcgtccaggagataacatacacggtgccagccgataagtgtggcctcgtcataggcaaaggtaagaggcagctggggtttcacatcccccctcagctgtttggcttgagggaaggcaggtcacgggacctccagaacctttggtgaggtccctttgctgctgcaggctggggctgcccggtctggaggcagtagccaccttctgccgaaaccctgcttggcatggttctctgaggctgctgacgggcctgttgtgaggagcaaagtgtattatttctggtgagtatgaagagacagcagtaaaactccctgcctgttgagggcagcttagcttggtgaaaagataccttgcgcaagatggggggcatttgtcaatcgactgattggtaattaactcacctccaaggaacttagagggacggttgagacagtatcctcagtgaaaattccttctcgacagtgtgtcacttgtttcccttaccaggtttgagtatttggtcttgatccgcgtaacatgtgaaaatggtttttatcctttctgcatatttaccgtgagtcacggactctctgtggagggaaataaacattgatgtgttagttttttctgggcattttggagaacattaggaagaaaccctcattcatggctactgtagctccttcctgtccttcactgagaaccaggagagagcagccacatttctcagccattggcagcagttcatcttggctagccctgggacccagaaaggctactgagaccagggccgaggctgtggggccttcccagtgtagcagcagggctcggcttccgtggggctctgagccaggcctcgctgccagcgggggactcccgttgtcactgggtttcgtatttgccttcattaggtatttgacagcatgtggagaaaacagtcgtctctccagagttt

SEQ ID NO: 47736 - DNA, 1516 bp, Homo sapiens
aggcagtgagtaagtggaggagacgtgagcagacttgtgtggttggagtcctggctcagatttcctttctcttcctttggctggtgcagaactcatccatgtgccacaggaaaatagtccgtgtttttcattgtcgtgtaatcgaacaaaatagggtttttgggctaaatgaactacttggaatggtgatatgtctaaggatagttaatggagactttatacgtggaggaatgtttgaagttagcagtttctgaaagtaagtccagacaatatagttacatgaatttgctgaatgtggcgcctgttccaggctttcaccctgttgaaccgacatctcaaatggtgtgtggtcttgtcagaaagtctgctcacagatggatgaaccccttgtgttttgtctttcagatacattggtgaagtaggagacatcgtagtgggacgaatcacagaggtaacgtcgatatcagattggtgtttacaaagtcgaggcaggctggcgatttcattcatgggacagtcattccacttgtagttacatgaaaaaggcattcattgcatttggccgttgtgtggcttctgatgtaaatatgtggcttgttcgatttcagattactggttcatgtttttttttttttgagatggagtctcgctctgtcgcccaggctggagtgcagtggcatgatcttggctcactgcaacctccacctcccaggttcaagcgattctcctgcctcagcctcccaagtagctgggattacaggcacccgccaccacgcccagctaatttttgtatttttagtagagatggggtttcattatattggtcaggctggtctcaaactcctgacctcaagtgatccaccagcttcggcctcccaaagtgctgggattacaggcgtgagccaccacatctggccttactggttatttatgatatgacacatgaacatggagcatgtgtccaggtgtggaacttggcttataggttcaacagaagaggtggaaggtggagaccaactccaggctggattcggtcttgctgctctcgtccatgaaccttcctggaggagagctggtaagggctacagctggggccatggactagggcccagtgggctggggggagccgtgggaccctttgttccaccagaggactttgatttacactgaggttgcccctttgactcctgtttgtctgctgtgaagtttgctgcctagatgtgtatgtagacttttcaccctgtccaggtctcccgaaagagggagcagttggcatatggtaggatcagaaacatccatggggtgggatcccaacagagagttggggagagaagcccttagatgctggttgttaacagttttcctttttggatataacagccttgcatagtgaagatgttccttgaaaagttgtctttacattaggtttttgtgaattgaaaggcatttcattcaaccatgtgtggaatgtggttgctggcattccagacaaccacagtaactaagccacagcctt

SEQ ID NO: 47737 - DNA, 1036 bp, Homo sapiens
tttatttatttatttatttatttatttatttatttatttttttgagacggagtttcactcttgttgcccaggctggagtgcaatggtgggatctcggctcactgcaacctctgcctcccgggttcaagcgattctcctgcctcagcctcctgagtagctgggattacaggcatgcgccactatgcccgactaattttgtacttttagtagagacggggtttctccatgttggtcaggctggtctagaactcctgacctcaggtgatcgacctgcctcagcctcccaaagtgctgggattacaggtgtgagccaccgcacctggccttctgtctgtatttttaaaaaaaagatattcatgacaaccaaggggagaggtaaggtcacagtgatgtgctctgggtcaaagattgttgagcctggaccattggagaggggaggaaaagatggaggtgtggggtcaaggggagaggctgcagaggacaggacagtgtgtggccaaggctgctgtttgttccttcatcaccctggccaggctgaggtccaggcagtgttctctgacggagctgtctctttgcacacgaggagcctgaaatatggaaaagtaagtcgggctcttgatgttcctgtttgctgactgagactacaaggctatttttgaatccccatagctctctggaattctggcctaaagaaccccagtagctaagcattaatagaggctggcatcccacaaactgatcgtgttccttaaacgtaacatcaggacggtcagggttcacagggtcatgggtcagtagccttgtaaagaacaagttttatcctttttctccaaggagactgactttcaccagaagagcccctccaactgtgggctgggaggtgcagctgtctctcttcctccagggggcgctgcagctcagcactggggctgaggctgtcctgggaacaaaggcaggctgggtctggttaaacagcccttagacaaacgtccaatcagtccagtggatgttattgctggcaaagcttgctctgtca

SEQ ID NO: 47738 - DNA, 1948 bp, Homo sapiens
tgagtgtctggtagatctttccctaagaaacttgcaatattctcaatgcctagtgtcagtctaaggattttggggcaggaggtgtcaggtgggactagtttatgagagcaacctctggactacatcttacctctcccaaatttcagccagcttttggatgaatgtcagaataatatctttgttcttgtcgactatatcccagagcatcttgctgatttattaggctgcttctagcagatcatatcttgtaacgcttagtctctgagacatgaaaggaatacagaaagtttatgttaacggcttgatttatgtttggattggcttggtggtctgtttatggttggtttcttttctgaacaaatgccttttccctttttcagatcaaagacatcttaaagccagaaataatggaggagattgtgatggaaacacgccagaggcttttggaacaggagggataaggaggtgctccagaagcacgggactgtggaccttgcaggagtgaagactgtgatgtgtggtccccatatgtggctcagcaaagactcgagagatcatccctttgtctgcattgacggccctgtgacggcctccagcccacaggcctgctttctcctgtcctaacaccaagcctgggtggcagatgaacagtgcttccttgggttgccagctgagtcccggtattagggaatagtttcagctctttcaaagtgcacagtgttacagtcgaatgggctcccatcctggaataatatggagaatcctttgtcttccactcactgtcattcacaaggcacagtgccccatgaaattgccccaatagaaaacatggcatccctgacctccaaatggtctgttttggcctccattcctatatcctttaaatgactgagaatgcagctggtaaagttggaagaataaagttaaccaagcaggccaggcacggtggctcacgcctataatcccagcacttagggaggccaaggcgggcagatcacctgaggtcaatagttcgagaccagcctggccaacaaggtgaaaccccatctctactaaaaatacaaaaaattagccaggtgtggtggtgtgcacctgtagtcccagctatttgggaggctgaggtgggagaatcacttgaacctgggaggcggaggttgcagtgagctgaaatcgcgtaccacactccagcctgggtgacagagcgagactgtgtttcaaagaaaaaaaaaaacaagcagccttttgcttggttggaatctgattttctgttgcgtgttccttgtagccatagatgtgattatgtccacaccgggctgccttaatctgtcctgcttggagagtgacttgtaagatgctgaattattcatgataatacagtgaatgttctgggtccatgtactcagataaacatgaagaaaataagcaaagaaaaatggagactgggaaagcaaagctgttttcatcctataattgaagtagtgtggagcattaacttgtggatgattcagagttaaaagataaaaagacgccagagttctcgctgaagaatgtgagaattcctgtgcattgttttttctgatgactatctaaaaatggtgccctgatgtaggtttgggggaacattcttaaaaacaagggtgctatgtgcctgtaatccagcactttgggaagctgagtgggcagatcacctgaggtcaggagttcaagaccagcccggccaatacagtgaaacctcgtctttaccaaaaatacaaaaattagccgggtgtggtggcacaagcctgtatgtagtcagctactcaggaggctgaggcatgagaatcgcttgaattcgggaggcggagttgcagtgagctgagatcgcaccattgcacttcagcctaggtgacacagtgagactgtctcgaaagaaaggaaaagaaaaggcggccggacgtggtggctcatg

SEQ ID NO: 47739 - DNA, 1073 bp, Homo sapiens
gtgaaaccctgtctcttactaaaaatacaaaaattagctgggcttggtggcagctgcctatagctactcgggaggctgaggcaggataatcccttgaacccggggtacagaggttgcagtgagccgagatcgcgccattgcactccagcctgggtgacagagtgagacaccgccccccccccccaaaaaaaagcatttattaggaaacaggaaagactgaacaagaacaagagaactaagcatgtaactcaagaagccagagaaccaaagtaatcccacagtacacagaagagaataataaaaataaaaacaaattaagaatggaaatgatcaataaaaccaaaagctaactttgaaaaatattattgatctaggcacacttctggtaagactaatgaagaaaaagaaaaggtagaatatttagaaaaggaacaatatttagaatgaaaatataactataaatactctcagtttttgcctctttttttgtttgtttgttttttggagacaagatctcactctgtcactcaggctggagtgcagtggcaatcatagctcactgcaacctccgtctcccagactcaagctgttctcccacctcagcctcctgagtagctgggactatgggcatgcgccaccatgtccagctgattttttttttttttttttgtggagacggggtttcatcatgttacccaggctggtcttgaactcctgagctcaagcaatctgccctcctacgcctcccaaagtgctgggattacaggtgtgagccactgtacctggctggttttttttttttttcttttctttcctttttttttgagacagtgttttgctctgtcgcccaggctggagtgcagtggagtgatcttggctcactacaagctccacctcctgggttcatgccattctcctgcctcagcctcctgagtagctgggactacaggcgcctgccaccacgcccggctaatttttttgtatgtttttttagaagagacggagtttcaccgtgttagccaggatggtctcaatctcctgaccttgtgatccacccgcctcagcctcccaaa

SEQ ID NO: 47740 - DNA, 1049 bp, Homo sapiens
gtgccgggaatcagtgggggcattttggaggcttgccactcgctgcctgtaaaatgagcatcataatggcacgtgtaccgctaccaccccctgccagcacaaggggaacatgaacctaacataatgggggcagggaacgggcagaagaggcttcccagaggagacacttaggcagagactgggccgctgagtgggcgtttgggaggtgagggtgttccaggctgaggggaggtttgtaggaaggtcctgagtgggaaggcactgcctgcagtagcgcatggcctggaggagacagcaaggcgggccagggtcagagaggccaggacacacacatcactgtgtccttgagggagatctttcttctctaggaatatagctgagcttaccccagaaaccaggggagaaaataggagccgagttttctggagtgcgtttcttctgtgaagtgaggtttgtgtgtaggaggcatctgtccagagcttttcaagttttatttcattattgctggagggaactagctctggtcctgttggttgggactgaactgtattgctgaccctttcccatgttcaaagttcccgcttccattgggggactgtgctttgtgcttcttcttgtaacaatgtgtttagcttatttagcagcatcagattctccttctgatatatgcattcgataaacctggacacctgtgcagatttctttttcgtggtggcactgtgttttcttttgcttgttatgcgtaaggtcagatatgttgtgttttgggtccctgacaccttgggcttggatgaataatgtcacttaagaggaggcaagtaaaaggccaggcacagtggctcatgcctgtaatcccagcactttgggaggccagggcaggtggatcacgaggtcaggagttcgagatcagcctggctaacatggtgaaaccctgtctctactaaaaatacaaaaattagctgggcgtggtggcgcatgcctgtaatcccagctaattgggaggctgaggtgggagaatcacttgaacctgggaggtggaggttgcagtg

SEQ ID NO: 47741 - DNA, 1026 bp, Homo sapiens
tggggtttcgccatgttgaccaggctggtctcaaactcctggcctcaggtgagccgccagccttggcctcccaaagtgctgggattacaggcatgagccactgcgcccagccaaaagttggtgtttttaaaaaatgcttcctggtaactgccttagggagaataatgttaacatttcagttgtgattctcttgaagcacagtatttccctgccttttagatttgaaatggatacttctaagcagttgtgactggctggatttcagtcatttacatcggaacactggtctggtcagctcacctgcatctttggtagagagatatctcccaaacatacactctccctgaaggattttcatccttcatatgcttatcaattcccttgccaagtatttactgtttgtccacatgagtacaaggcattgagcttgtgctactgtagactcacagatggtcatgattttcaggaattgaatagagaagatgaaacactgagacactggattcaaatgctagaccttactgggttgacgttagtaatagacatgtgaagaattatagcggttgagaggaaagagacatctcctcactagggtgactggtcagggaaaaagatgggagtggtttttggtgggagaagaggaggagacgggatctgggcatatgaagaggcctggggtactgaggtggaatttcaccacaccccaaatctgttgaaaagaggaaagtgtacaggcaggagacacagaatctggccagagtgaatgtcctgagcaagggcatgggaagaggaaaacgcagggcacagggattaggtgaggatccaactgaatgcttgcccaaggggcttcactgtcgaggattttgactgagatgggggcaaacatgatagacaaactttagggacaatttagcattgtcttcaaacacaggtatgagggagacttttgctggtgataggacagattatcctgaaaattgacctgacaaaaatacttagacctgatccctaaaatataataaacat

SEQ ID NO: 47742 - DNA, 1052 bp, Homo sapiens
gagaaaacaaacaaccttgcatcacagagcaggaaaatgaacagtagaactatagtactttatagctttagatataaaaactgtcagattcagaatataaaatactggtttaaaaacatttaaagaaataaaatgtgaaatagaaaacaagtaaggactaaaatcctatgaagaaaaatcaaataattgaaaaagaactaaaaaagaaatgaaaactacgatcagtgaaattaaaacttcagtggatgggtttaacaagttagacacaactgaagagagatttagtaaactgagggataaagctgaagaaattatacaaaacgcagcatagagagacagaagtctaaaatataagcctataaggagagagaaaagaagtcaatagagataacagatgagagacaatatttgaggagatattgctaaataatttccaagaatagtgaaaaacaagaatctttagattcaggaatcagagcaaatcccacgtggaattaaaaaaaaaaagtcttctccaaatataaggccaatagaacaccaaagacaaaaataagatcttaaaagcaatcagagagaaactgattacctcccaaggaaccctattaaactcaaaggagacttctctacagcaacgatggaaaccagaaagaagacagtggaacagtatcttaaaagcgctgagagaaaaattattgtcaacctagaattttaaacttagctaaaatataatttagtaatgagagcatgataatgacattttcagataaacaaaaactgatgtctccagcacggtctcacaaaggaacttttatactttcaaaaaagagaaaatgatccaaaaaggaagaatgtctgcaatgcaagaaagaatagtgagggaaaagaaaaagtggaatgaatagagaattagtcatgtggtatcacatggcagctcactcaggaatcataaagctggccttgggataacagagctaaactttagagtcctgagtcctgttaatactcaatcctctgtgaaattcaattaagtgagcttcaagttaacctaaaaa

SEQ ID NO: 47743 - DNA, 1027 bp, Homo sapiens
ttaagtagggggatgaagggggaagcccttcagttaaacaaagttactgacctgtcttttagacaggcaggacagaggatctcctcatgaggtttttttaacctttttgttctgaagttaatgtgtgttttaaatgaataatcttatttataacaacattttcagcgtggcaactgcagtttcagaatggtggaattataccagtcagagagagatgcaaatgatttaaaataggaagaaagcaggtgtctggcccagaggaccagattaagaagaccccatgagagttacaatagttagtgaaaatggtgcttctgcaaacctcatgtctacagaagctggtcaaagaccagatgccaccaggtagaatcccagcaaactcttcaatggtagatatctgtcaccatccttaggaggtaggtctgtggaagctcactataataccatttgcttaacagatatacaaacatggatcagatataatttcaacccacaaggagctcacagtctggctcttcttttgaggcaaaaagactaaagctgttgcctttatggtaagataaatctgccttggagtcaatccaaggtgatttaattactgtaggtagttgtaccaataaggcttgtatcccagagaactccatattgcatttaagcttgttagtaagccaggccagctctatttcctgtgaggactttaaaaaaaattgcattcacacatttaaaaattagcataagcagggtgcagtgatgcacgcctgtagtcccagctacttggtaggcagaggtgggaggatcacttgagccccagaagttcaagaccagcctggacaacaaagtgaagtgaagactgtctcaaaaaaattaattatgacataaaatgttatatgtcttaatttacacaaatataagtatatacttttaaatcccattcttacacacaaaagctagcatactgtgtaaagtattctggacctacacacctttatttttttaacataacaatatgtcttggatacattttcct

SEQ ID NO: 47744 - DNA, 1031 bp, Homo sapiens
agatgaaaaatacactgaagactgtcagaataaacattgcacaagtaaagatttgtgattttgaagacttaaccatagaaactatccaaaatgaagcagaaaaaaaaaagaaaccctgaaaaaaatacatgaacacaacatcagtaaagtgagggacaacatcaggtagccaaatgtgtgtggaattggagtccctgaaggaagggagggtatgagggaccaaaaaatatatatagagagagaaaaaaaaatggctgaaaaatttccaagtgtaatgaaagcagtaaacacacagatccaagaatttcaaggaactccaagcacaggaaacatgaagaaaaactatatactaaggcacatcttaagcaaattgcttaaaaccatggtttaaaatggccaaagaaaaagatacattatatacttaagatcagggtgacaccagatttctcattggaaacaatgtaagccaggttaacagtggaacaatacatttaaagcaaagaaagaaaacagttgtctacctagaattcttttctcagtgaaaatacctttcaaaaatgaaggcaaaataaggtctctttcagactttaaaaaaaaaaaggaagaatttattaccagtagatatgcagtacaagaaatatcaaaggatgtaattaaagcagaaagagaatgataactggtagaaaactggagccaccaggagtcccaggctgcagtgagctatgatcgcaccactgcattccagcctgggtgacagagtgagaccctctgtctaaataaacaaacaaataaaagaaaactggagctataaaaataaatgaagacaatgcaaagggtaactaagtggataaatacataagatattttttctttttgtttcagtctcattaaaagatatgtcttagaggtaattacacattgtagcatttgtaacttacatagaagtaaagtttatgacaatagcagcacaaagactgggagtgggagaacaaatatactcttgtaagctttttacactacatgtgaagttg

SEQ ID NO: 47745 - DNA, 1232 bp, Homo sapiens
agtattttacaaagtaagggtgctattttgcattactaccagcagttcacaccatatgtattcacaccagttgctccatttggtcttcgttctgtgacttgtctctattctcttaacagtatctttagaacagcagaagtttttgattttgatgaaattcagtttatcgggccaggctgggtggcttatgcctataatcccagcactttgagagaccgaggagggtggatcacttgaggccaggagattgagaccagcttggccaacatggcgaaaccctgtctctactaaaaatataaaaattagccatacatcgtggcgcatgcctgtagttccagctactcaggagtctgaggcaggagaatcacttgaaccctggaggaagaggttgcagtgagctgagatcatactgctgcactccagcctgggcaacagagcaaaactccatttcaaaaaaaaataaaataaaatttcagtttatcagtgatttctcttaagtttcatgcattgggtattgtagctaagaaatcttcacctaactcaagtttacaaagattcttctgttttttttctagaagatttataagttttaatttaacttttaggcttataattcatttcacattaaatggtgtatgtggtgccaggtattgctcgagagtcatcatcttgcataggggtttcggatgttctagcaccatttgttcaacagatagcctcttttcattaaattgccctttcacctttgtggaagatcaattcagcatgcatgtatgggtcacttgtatgtttttaattgatttctaaattctgaaaggaaaatgataaaaaggaagattctttcactatatctgcatttccaatttctcccccaagaacgctttcctaacacctgcaggcagaactaaccactctgggcccctgtagctgttgtgcgtatgtttattattgagtttttctggcctttgcagttctttcagtgtctgattctccctctctctcagcttctttctcaagactgtgcatccttggaggtcagaaattgtctcatcctgccgggcgcgatggctcatgcctctaatcccagcactttgggaggccgaggcggttagatcacaaggtcaggagttcgagaccagcctggccaacatagtgaaaccctgtctctattaaaaatacaaaaattagctgagcgtggtggcacatgcctgtagtcccagctactcgggagg

SEQ ID NO: 47746 - DNA, 1375 bp, Homo sapiens
tgatttttatctggtcgttttatactgattacatatgtgttatctgtactatgcacacacaggatgttttcatatatcttataaggtatttatatggccatttcttacactgttttcccacacatgtctttccacgtccatatattcagatctctccctctccctacctcttatttatgtatagctgcccagtactccatttcactcattcatccggtcctcttttgatgtgcatttggttgttttacacatttgtttggtttttgcccttataaacaaagcagaaacaaatattcatgtacacgaatctctgggcactttggctggtatttctaaaagttgaactgttggttccaagaactgtgtgggttttaaattttgatacattttaccaaactgttaaaaaaggttgtgccattgtatgctccagtcagacgcatatgggagtgactgttcctggtccccagtactaggctttgtcagtctgtttagtcctcatgttagtctcattttcatgagaatttctttacttcagactttgataaccgtgaagaaagaacaagatagaaggtgagctgtttggcttagtaattttctacacctactagagcgggactgggaaaaatatatttgtaaatgcagttcttgctgtcactgtctctctggggttttacaatccatattcctgccagcatctaacgtcttttcaaattcttaatgtctataacaggacatgatgacattcatcgttttgacttgttgcagcaaaagatggttagcaggattggaatgttgctttcattctagacttttccttgagaactgctagccccgtattgctagccagatctcatggatgatctgacttgggtttcatctgtccaggttggcagtggaatccctctgaccggccctcctttgctgaaatccaccaagcctttgaaacaatgttccaggaatccagtatctcagacggtaaagtacccatcccggggtacctgcagtggggtgaaagggcagccatgtgggactgcagcctgggtcattcggttcacttcctggtgaaagttcacagaccagcctgtcctgagaccagaaagctgggcagaggtgtggagtattgtgctttcttgtctgctgcagccctgcagagttctaagaaatgctaagggctgtttctccggtatccacgtgccttttctttagttgtatgcagatgagcactgttaccttacaaagaaagagaaccaccacaccaagccaacaccagtactgatggctgctggatttttgtttctgtccctgtatgattcttagaagtggaaaaggagctggggaaacaaggcgtccgtggggctgtgagtaccttgctgca

SEQ ID NO: 47747 - DNA, 1044 bp, Homo sapiens
ttacagagcagaacggtggcaggttgcccccagctgcccagggcctctgcggcctgggtgcccacagccatctttcaggcacttgccctgctatgctcggaccctttctgtacccttggcgcttacctgctggcagcctggccccaccggcatcactgggagtgggctgtgccaccatacaagccacatctgactggcggtatcaggctgtcgcagcgacgtggaagtggggtgaggaggtcacgtcccgtgcttcttgctggctgagggcaaatccctccccacgtgcgcctgttctctctccacctttccgccctaagcccccaggtgcccttactcactcatgttccttgagccaggtgtcttaggtctttgtgtggatgaggaggagcggaggtgtgaggtgtgctgggccttcagggcctgggaaggccatcccagactgagccccaccgccctttcccagctcagtccccaccgagctgacagcttggaaaggggcggttgggaagtgagtagcaccctctgataatgatactgatcaggccagcaggtttgtcaggggtgcacatcctgctcagcagagcatatgaagatcacagcttggtgaagctccactcgagagacctggagcgagactgctgtgcggtgggtgacaggtggaactccagccgggccggggctggtggagcccactgcgagcagtgccaggcacaagattctccccctctcatttcacagggacaaaaccaggctggggcccccaatttccttgccggttgaaccatagctggccaccagatccaccaagcctggggcttctcttgtcctttgaatggctgcttctcccaggtctgaacgaagacataggacaactctggtgacagccacagctggtggccgcttcctcgtgtcagatgtggacggtcaccccgccctcccagcgctaagcgctgagactgcgtgtccagagtcggctcctgcacgtgaggccaattggtcacactgggccagtgtggaggaagacgcctctcatctcccaaa

SEQ ID NO: 47748 - DNA, 1581 bp, Homo sapiens
tgcagctcgtaggcagcctgtgtggtcagggcgtggatcctcttgagccctgaagttggggggaaaatggtgggagaagctgaggggcgtaggaagcgactccccagggagaaatgataaatgacagctgagctcatgcagttggggacagaaagggacaaccaccaagtgcgtgcaatcagccctgggctacttccttcttcctgcaggcctgtgttgggcaagccactgaggaccgacagttttcatgtttggttttctctgttccctttaagtggagctgtgatgcttttcaaacgttggggctctgagctggtgggaagactgcaggaggcgggaggaggtgggggtgacagcacccttacccagactccagccagagccagacagacaggatctgtgttcgcattttcctatacctggcctctgggcctttgcacatgctgttccctctgccaggatgcttgtccctactcctcctcacttggttaccttctattcatttctggaaggctgcctgacctcctgtcggcgttgaggacctcctctgccaacacatgtgcccctgtgggtatttatctttcagggtcccggctgcctatcttgtcagtttccccaccagtgcggaattcccgtgacagtggcatgtccgacctagccactgctgaccccagtgcctggggtggggcctggcacaatggtgcttacccagcgctggcttagtggatgggagggagttggcggcaccctcacccctctaggccggctctgtgcccccatcctactctctccctcctgctgtccccgccccacctcaactctgccctgcccatccccggggtctcatgccaggcctcccctaccatacacatacgtgctcagactcccaagatgcttcactgctggtgtggttactcttgattaagagggcatttaatgaaatgtttcacaagttagtagcagcgagtggtattccatccgcttctccctcctgcctgcctctccccggctccgcacctcccggggtcagtgtgtgctggctggaggctgtgcggatcctcccccatcccgcccggacaagaagcctttggtcccagtcaccaggtccagggaccaggagcagctactgtgggaggagtcacagcaaagctgaccgcacgacccacgttcctccccaaggacctgccagggcatgggctttgacagcctagggtctcacccagggtccccacctccctgactctcctgctgctgagtctcagggcagccgctctccctctctgggccccagctcggctggcgcagggctgatgtgaggggccaggagagtgtcatacacaaaagggcaggtgggaggtaatcatgacaacagccgccacctggacggcactcgcaagggcccagcaccgttctcagcccttcgtgcagatgagtgaatccagtggaattagagtgagtctaatttaattacagaatccctgggcggctcttctggcagggctggcccgctgcacacattatccaggtgctgactgctgcttcccaaggccccggggaaggagtgcctattactacctattt

SEQ ID NO: 47749 - DNA, 1029 bp, Homo sapiens
tgtaatcccagcactttgagaggctaaggtgggtggatcatttgaggtcaggagtttgagaccagcctgaccaacatggtgaaaccctgtcccttctaaagatataaaaaaaattagccaggcatggtggcacatgcctgtaatctcagctacacaggaggctgaggcaggagaatcgcttgaacctgggaggcggaggttgcagtgagccaggatcacaccactgcactccagcctgggtgagagtgagactccgtctcaaaagaagaacttgcttagaatcataggtgggaattgaacaatgagaacactcagacacagggtggggaacatcacacactggggcctgtcatcgggtggggggaggggggagggatagcattaggagaaatacctaatgtaaatgaccagttaatgggtgcagcataccaacatggcacatgtatacatatgtaacaaacctgcacgttgtgcacatgtaccctataacttaaaaaaaaaaaagaatttgactactctggggacctcatataactggaatcatatagtatttgtacttttaaaatttttttggagacaggatcttgctctgttacccaggctggagtgcagtggtgcagtcgtggctcactgcagcctcaaactcctgggctcaagcgattcttccacttcagccttcgaagtagctgggaccacaggcacgcaccaccacacccagctaattttttttttttttttttttggagacaaaaaaatatgttccctatgttgcccaggctggtctcaaactactgggctcaagtgatcctcctgccttggcctcccaaagtgctgggatcacaagcgtgagccaccatgcccggccttatttgtcctcttttgactgacttatttcacttagcagaaagtcatcaagattcacccatgtggcagcaagcattttcaattttcattcgtagtaagaggagagagaattgccatgctctacacgttgtctggacaccaggcccacactaagctattcacaca

SEQ ID NO: 47750 - DNA, 1215 bp, Homo sapiens
ctgcttgggagtttttctttagctgccccatctgttggcgaggatgcggcatctgaatgaggcccagggctgcagtggggaatgtgaacccgctgtccttgtgggtgcacattacaggcttctgctactcaccaggtgccagcaccacttgtggcctggccctggccctttaagagcctgtgggctgcgtcagaggtcctacgccccggcatggtgcttcctgtccttggagttcttgtccaaggcctgagccaccagccccttggatggcctccaagatggtgatatccgcccaccccaaaattctgctgcagctgatacagaaagacaagcctggagggccaggagcaagggttcgccagaaggtgctagaggtaccagcccagaaagagagttaagtcagcgaggagcaggcaggtgggagggcttctgaggacaggcacggcaggggctgccagcttctgatgggtttggaaacagcccctcctgggcatagcacttgggggcctcgctggaggctgggatgggcttgggggactctggcgagcatcagaggctgtaggtgaccaggaaaggcggcagtgaacagatgctattggggactgagatgggagggttcaggcaggttggatggcccatcactgccaggtcagccgggggctgaggacaaagcaaaacttgcccttgagggatggccagtgggccaagacttgccaggaggacttcagggcatcacggaggagcacagcatggtcggtgggtgatgttctttccctgcccttcccccgcacacacacctgcctctcgatgtggcttgagtttggatgatcctaagacataataataattttgaacacttagcaagtgtactaggagccaggctccttctgtgcaattagctcgtttaatccttaccgcaggccaggcactaaggcaggaggatagcttgagtctgtgaggttgaggctgcagtgatcctgcagatcgtgccactgcactttaggcttgggaatggagcaagaccctgactcaaaacaaaacaaacaaacaaaaaaattccttacagcaactcagtgaggaggttctgcatatcattatgatcccatttgatagataagcccactttatagatgaagagactgaggcctagagtggtaaacaggtaaagttgccctgcccagagccacagagctagtatgtgctaaagctggaatg

SEQ ID NO: 47751 - DNA, 2736 bp, Homo sapiens
taatcttgtttttctttctttttttcttttctccatctccaaaccagagtcatgatgtttgaaggaaaagccaacgagagcagccccaagccagttggcccccctccagagagagacattgctagcctgccctgaggaccccgcctggactccccagccttcccaccccatacctccctcccgatcttgctgcccttcttgacacactgtgatctctctctctctcatttgtttggtcattgagggtttgtttgtgttttcatcaatgtctttgtaaagcacaaattatctgccttaaaggggctctgggtcggggaatcctgagccttgggtcccctccctctcttcttccctccttccccgctccctgtgcagaagggctgacatcaaaccaaaaactagagggggcagggccagggcagggaggcttccagcctgtgttcccctcacttggaggaaccagcactctccatcctttcagaaagtctccaagccaagttcaggctcactgacctggctctgacgaggaccccaggccactctgagaagaccttggagtagggacaaggctgcagggcctctttcgggtttccttggacagtgccatggctccagtgctctggtgtcacccaggacacagccactcggggccccgctgccccagctgatccccactcattccacacctcttctcatcctcagtgatgtgaaggtgggaaggaaaggagcttggcattgggagcccttcaagaaggtaccagaaggaaccctccagtcctgctctctggccacacctgtgcaggcagctgagaggcagcgtgcagccctactgtcccttactggggcagcagagggcttcggaggcagaagtgaggcctggggttttgggggaaaggtcagctcagtgctgttccaccttttagggaggttactgaggggaccaggatgggagaatgaggagtaaaatgctcacggcaaagtcagcagcactggtaagccaagactgagaaatacaaggttgcttgtctgaccccaatctgcttgaaacctgactctgcttctctcatttgtcttcctaccctactcacataattcactcattgactcactcattcaccagatatttattgacctgctattataagctttacatcctcccatgttgtcctggcatgtgcagtatacacggtctaactcatctctccccagatctctcagaaccttgagcttgggaattgaactggggtcacctgtgtcctttcttatggactcgcaggattttagaaccctaatgcaccctggagggtagctgggccagacttctcatttcacaggtgaggagactggtgccccacagggattaagtgccttgcccaaggtcaggcttatctccagagggaggtgccctggactggggcccagatgttcagggaccctgcctacacctcatttccagtgtgggctgccttagttagttatgagaacagggaagggctgggaagagacagcctccaaggtcaacacttggagagggtttcacttgctctgaagaccctggtccaggattcgccctctcccatgccttcaagtcagcatcaggcttagggcaaagaccaggcctctgaagctgcctcttgtaattcatgcaggaagatgtcaaagtcagccccatcttggctgatcagggtgttcagccttaaccccacctgtgttctgaagtctcttaccctacctgctcaggactgagacagttattcactgaacatatttattaagcacttgctgtaggccaacagttaagaatccaataatgaaatggacagattcatggaacttagagtccaataggaaagtgagacccagacaatgacaatgagataaatgttaggaagggggaggtatggggtgacttccctgcagtcctgggggcctagatgggcccaagactgggtgagagtcttggcagagcctttgcaacaccttaagtggacaggactgggaggtcttggtggttggagccaacgtgggttccctgcggctccttagtcacctctgatagcagattgagggaggaaaacaggtaaggcatgaggaaatggccaggttgggttaacccactggtttcaaccagttcaggaatgaggttatttggccatgactggctgatcttgagctcaaggatctgcttcaaatgcacacaggcctagttgaagtttaaaccccagcaaaacattcctccctgtaaatggaaaatcctacttctacccccaccctgccctgttttttgttttttttttccccaagatcattagatgtcctcacccctcctcactgcctctcctctctgggacaggctgggacctttgaggaagataaagccttccttcactacccatcatattcagtgtccctgttcctcactcagagaggaaggcagaaccagtcaggcttatttcagtaagttccacagttctacaagactgcaggaattctccttaagggaggagagcaagcaggtgtggccccagcttctggaaatggcagaagagagggttttctcattgaatgggggtgggggctcgtgtgtcctgggaaaccccatcagtcccttcatttcttgagactcaactcctgggaggagagggtctcaagagttgtccctggaaggagggcgggggcagtctgcatctatttcaggttgtggctcttggttctaggactcttacttctctggct

SEQ ID NO: 47752 - DNA, 1055 bp, Homo sapiens
tgttgaaattgtctatagcaaatagattgatgcataaaacaatctttttttatggttatggagaaaaataaactgatttgagataccttgtgtattcagtaatttccattgaatattaaatgtttctgcatttactatttgttaacttatttcacttttgcatatttgttttaaaaggctaaacagcaaaaacgcccatttgcctatcataagcttttgaaagatgcaggaggcatggtgattgatatgaagtggaaccccactgtcccctccatggtggcagtttgtctggctgatggtagtattgctgtcctgcaagtcacggaaacagtgaaagtatgtgcaactcttccttccacggtagcagtaacctctggtgagtaataaaggctttcacactgtagcatacaatcatggtcatctacttaagaattgatttctagaagtgaaagtggatagctttttgtgttttggttttttttttcatgacgagggaggttaaggatggaaggtattcttttttgagacagtctcactgtgtcgcccaggctggagtacagtggcatcatctcagccactgcaacctccacctcctgggttcaagcaattctcgtgcctcggccacccaaatagctgggattatagacatgcgccaccatgcccagctaatttttgtattttttgtagagacaaggtttcaccatgttggccaggctggtcttgaactcctgacctcaagtgatctgccctcctccaccccgcatatgctaggattacaggtgtgaggcactgtgcccggctgagagtattctttatacccatagttaatgtccttgaagccaaacagcatacataatttaacctgaatgtacttgggatttctggagaaatattttggtacagctggtttagaagtgttttttgggaataattgtttctggatctgtaacggtggtactctgaaagtcatttgtacctttgggcggaaaagcattttaaatattaaatgggagcaggagaatgatttctggttttgtttttttttttttgttttt

SEQ ID NO: 47753 - DNA, 1026 bp, Homo sapiens
caagacagtatcttgatttttaaaattatttcatttgctctcgaatatttaatgccaacagtgtgctaggcactgctttaaagctgagtatatagcagtgatcaaggtgatgggcttgcttttatggttttaagtttgttgttgttgttaatttttatttattttttagagacagaatctcactctgttgcccaggctggcatgtagtggtgcgatcacagctcactacagcctcaaattcttgggcttaagccatcctcctgcctcagcctcccgagtagttgggaccacaggcatgcaccaacacagccagctgtttttaaatttttcgcagaggtagggtcttgctttgttgcccacgctggtctcggactcctggctttaagcagttctcccgcctcatctctcagagcactaggattacaggtttgagccaccacacctggctggtcttacattttaatgggatagtcaatactaaatgtgagatcaaggactgataagagtgatggagaaaataaagccgtgttagggatagatgatgactggtatgtgtttgagattgtgtgtcaagggaggccaatttgatacttgaaaaagatgtcttgtttttaactcttttggatttctaataaggttgagtttttgaaatatgtttatctagatgccttattttaagattagaggttttttctattctaggggataatattaacactagtatttattaactgctacttatgtttcatgtactgggctggaagttttgtatgtatcatttcattttacactttacagtagcctctgaagtaggcttagtaggtctagtatacacatgagaacactaagtatcaggaaggttgaaaaatctgcatgtctcgtgggcagaaagtggcagaacagagtttaaatgcagttcggttgatggccaatgtttgtactccttgtactaagtgctgcctttataccatgtccgtatatctggactttgagtaaatattctcatataactttaaatgatttatt

SEQ ID NO: 47754 - DNA, 1060 bp, Homo sapiens
taaataagaagcaagtgcttctcctccccacatggatactttgtgctccacccatacataggtactttgtgcctcttcaaccattggcatttatctgtcactctctgggtggccaggtggcccattaggagggccatggctctcattgtctaggggtggctgcttttggatgaggctagagttcagccatctgatttgctgctctagaactatcttagattgacctcagtaataatttcttattagtacaagtatttcatatgttcacacattaaaaatgcaattttatttttactttctatcagaataatttatgttcatgtttttgaaaagtaaatagtagagaagggcttataagtgaaaagaatcacccctgccctacctgtttgctttctagaggggactgtttttaatttgtaaacattttcttataatgctgccaccttatccctaaagaaaaatctgctttataactagtaattggttattagttttagaccttactgactgtacggcaaatgatgatctagctcacacatggcccccagtcccctccttcctctcaagagttacagcgttgttttaatttcttatcttggtgaacctttgtaattttaattggtgttttttaccctcatttctggtggtatctttttttttttttttttttttttgaggccaagtctcactttgtcacccagtgcattggcgccatcttggctcactgcaacctccgcctccctggttcaagcgattctcatgcctcagcctcctagtagctgggactgtaggcatgcgccaacacgcctggctaatttttgtattttttagtagagacaggtttttgccttgttggccaggctggtctcaaactcctgacctcaggtgatccgcccgcctcagcctcccaaagtgctgggattacaggcatgagccacagctcccggtctggtgataactcttgatcttccactttgtgagaggaatgtcttagcactcccaccctttcccttggtagccttccagttgttatctgcgtcttctcttttgtaaaattgca

SEQ ID NO: 47755 - DNA, 1572 bp, Homo sapiens
tagtgaaataaggtggaggtctgaattaaaactttttcctggttgttaatgaaatgttgcagtgactgaactgttttgtgtgccatagtagcactgagaagtccatgaagtccaattattctaatgtctttccttagttttccttcagtttcatttatctcatgagacctgaaaactccaacatgaactgtgtacccatgtgttctttttgcttcttaaactagtaacatttctggctttattctaccacaaattctttttcacttgctttctattatgtgaacctccactgttacagtgttaacattttccttcctttttttgtcactgcaggaagtactcccactaccccaacctcctctcaagccccacagaaactggatgcttctgcagctgcagcccctgcctctctgccaccttcatcacctgctgctcccattgccactttttctttgcttcctgctggtggagcccccactgtgttctcctttggttcttcatctttgaagtcatctgctacggtcactggggagcccccttcatattccagtggctccgacagctccaaagcagccccaggccctggcccatcaaccttctcttttgttcccccttctaaagcctccctagcccccacccctgcagcgtctcctgtggctccatcagctgcttcattctcctttggatcatctggttttaagcctaccctggaaagcacaccagtgccaagtgtgtctgctccaaatatagcaatgaagccctccttcccaccctcaacctctgctgtcaaagtcaaccttagtgaaaagtaagtcacttctaaagtttgattcttctgtgagttgggtagaaatattggatgttatttactaaaagtagagtcactctgagaggagttaactgagtagaatttttttacccagagtgatacttgcaaatggcaaaaattcaaccaacataaaatactggcatttcatcagtgaatagagtccagaagggtctcttagctagcattttatttttttgactatgggatttatattcaggtatttgttttgcttttttacgttacaaatgtaggaaatattccttattttaaaaaaagaagcaatccagagtatgcatcctggaagggaaatgaatcccttgtagtcttttttcctccctgtgtctacccttaactctctctgaactgctgtctacacagccacaaagtcatcttgtgacactgtaaattgttaggtgattcttctgcttgacagtccctatgaagccccgtggctgctcactgctaattcttaggttggtatccagtttcctccagatctgggtcgggcagctcactcatttcttatttatttacttctttatcttgttcttttcttcccactagaatgtaagcttttggagggaagcaatcccttatatcttgtaacccctcccaagataaccatgagttcccaagataaccatcgagtataagtactaccagctttttccctacttgcctgtactatctgttgttgctatggtggtgctgctgccaccacagttactgttaatactgaattg

SEQ ID NO: 47756 - DNA, 1037 bp, Homo sapiens
caatgtttgtgtttattaatttactgccccaagcatacctatgaataaaatgagttttcatgttttataattcagaccttggacatagtaattgggactatgtgatagtaaataccaaagtgcgaggtttgaatacttgtatactcgtaaaagccatttagctattttaattttttattcatgtataatacaaatagaaaaaagtacacatgatacatgtacagctcagtgaattgtcaacaactgaacataccttggtaactagcatccagatcaagaaacagaattttacgagaacctggctgggcacagtgggtcatgcctgtaatcccagcactttgggaggccaaggcgggcggatcacctgaggccagtagttcgagactagcctggtcgacatggtgaaaccccgtctctactaaaaacgcaaaaattagccgggcgtggtggcacgtacttgtagtcccagctcctgaggaggctgaggcatgagaatcacttgaacccgggaggcggaggccagaaccccagagttctttttcacctgtccccttctagtcactactcttgccaaagagtagctgatttgatttccaacagcatagatgaggttagcctgcctgtacctcctatcaagtggatttgtacagtatgtattcttgtatctggctgctttgttcaacattatgtttgtgagatttatccatgtcgttgtatggaatttattgtgtgattatattacaactatttgttccactctgatgggcgcttgagtagtttccaggtttaagccattgtatgtagcactgctatgaccgttccagttgacatcttcaatgaacacatatgcaagtttctcttgggtgtatccctatgagtgagattgctgggtcatagaatctgcatgtattcctcattagtagattcccaccaagagtgtatgagacttctggctgctccacatacttgccactcttggtatttttcatcttttgttgtatggttttgtggttttaatttgtatttctctaatgatt

SEQ ID NO: 47757 - DNA, 1074 bp, Homo sapiens
tctgagattttggtgcacccatcatccaagcagtgtacactgtaccccaatgtgtagtattttagcccttaccgccctctctcctttccccccaagtctccagagtccattgtatcattctgtctatctatctgtctgtctgtctgtctatctatctatttatttattcattcagagacagtctcactctgtcacccaggctggagtgcagtggcgtgatcttggctcactgcatcctctttcaccgtgttggccaggctggtcttgaactcctgacttcaagtgatctgcccgtcttggtctcccaaagtgctaggattacaggcgtgagccaccgcgcctgttccgttgtatcattcttatccctttgcatcctcatagtttagctcctgctcataaatgagaacaaatggtgtttggttttcaattcctgagttacttcacttagaataatggtctccagctccatctaggttgctgcaaatgccattatttcattcctttttatggctgagtagtagtagttgtgtgtgtgtgtgtgtgcgcacgcgcacgctcgcgtgtgtgtcacattttctttatccactcgttgattgatgggcatttgggctcgttccatatttttgcaattgtgaattgtgctgctgtaaacatgcgtgtgcaagtgtctttttcatgtaatgacttcttttcctctgggtagatacacagtagtaggattgctggatcaaatggtaggtacttttagttctttaagaaatctccatattgttttctgtagtggttgtactagtttacattcccaacagcagtgtaaaagtgttcccttttcaccacatccacaccaacatctattattttttgatttttaaattacggccattcttgcagaagtaagacggtattgcattgtggttttgatttgcatttgcctgataattagtgatgttaagcatttttttggatgtttgtcaaccatttgtatatcttttaagaattgtctgttcatgtccttagcccactttttgatgggattgtttgttttgttcttgctgatatgtttgagttccttat

SEQ ID NO: 47758 - DNA, 1047 bp, Homo sapiens
cggttatacaacattaggaatgtatttatgccatggaactgtacactttaaaatgtgactatggtgcattttatgtcatgtatattttaccacaataaaaaaataaataaataaaaaagaagggaggcaggagaatcgcttgaacccgggaggcagaggtcgcagtgagccgagatcatgccgttgcactccagcttgggcaacaagagcgaaactccgtctttaaaaaaagaaagttttgggggaggaattttgccttcctcagccttcaaaggaaagttgagattttgattggaattgtattgagtctctagatcaacttgagaattgacatttgtgcagtagtgaactctcagttcctgaactgggtacatatttgtatatttgggtgttctttaatttctcttaatgttttctgcgtgggagacatgcacatcttttgttagattaattgctaaaaatttaattgcaaaaatttgttgctcttataatggtagattttttttccttaaattttatggtttatgttggatgtagtatcgagaaataccattgatttatgtgtatttacttacagccaacaacctggcagaattcatttattctaacacgtctgtagctgtttcttggccttgtaactatggaaacaatgaaatcctccatggatactaatggtgacgtttctgcctttccagtccttttgttattattattatcattattattattattattattttaccttacttcactggctagaacctccagtgcagcgtaaaagtgtcgtgtagctctccttgatctcaaaaggagcactttctatagttcatcctaagatgtgaggtttgctgcatctactgagatgatcatatgactttctatccttttgtctccccaccctccctgccctcagtcatgtagctttctacctttccttatctgacgtagagtgtaaacagaataagattctttaaatttcagtgggacgctctttctaatgccaggcagttagctgcatccttgatcacagcagagagcagcacccat

SEQ ID NO: 47759 - DNA, 1036 bp, Homo sapiens
aaaattctgttggtccacagtgacagttcaaaagcctataaggtagagaaagtgaaacagatttgtaagatctcagagtatataatgagtcgatattatgagattttatggcttcacgtaacttctcctacactcactcaagcataattattcttaatttagttttcacagtaaccatgagtgttttgaccagacactttgtccaagtgtcattgcccaaaccaactttatgcagaatgtgggtcttcctcagtgtccccttttgttggctcctttattatagcctacctaatttggcgtgtattacttcctgctgcaagggtcttgtgctgtctgcaatactgaatttttacaacactgttgattctggcatttgtttcaatcatgctcttaagtgggccttcaagcaaattctgttagaaattgaacttcatacattagcagcctgcgtctcataatcttaatcatacagtcattctgactttctctgtaatcccaaactttctgattggatactggatttatctttagtagctattccttgcagaaggaagccattattgcataagccagagttgtattctagaattcggagtgatatggaaccacagttggtatcatgtacgcctcacatgagaaggaggtatctagcacttctcgaccggggcctaaagctttatgttaaaaggaaaattatatagtagaactgtcaaagacttgagtattttacaaaaaggttttgaaagatcatatactcttttttcaaggacttcattggagaggtttttgtcactcttggagttagaatcaaagaaacctaaggaactttgctttatgcatgtctgggcaagtagtgtgacttgcaagaaatttccgagattcaccattcattgctgatcatgaaatcctctcttttgttacgaggtgttcacttctgttttcacttgccaggtaatcaaggtttagaaaagaacttttttcttttggtaggaaaacttccctgaaaggtgctgcttaagagtttgcaaaaagtttc

SEQ ID NO: 47760 - DNA, 1123 bp, Homo sapiens
ttgaaaaccatatgctaaggctgggcgcagtggcacacacacctgtgatcccagcactttgggaggctgggatgggcagattgcttgagctcaggagtttgagactagcctgggcaacatggcaaaattccatctctacaaaaaaaaagacccacaagttggctgggcgtggcagtgcatgcctgtagtcccaactactaaggaggctgaggtgggaggatcacttgagctcgggaggtcaaggctgctgcagtgagctatgttcctatcactgcactctggcctgggtgacaaagtgagaaccctgtctcagtcagtcaaatttatttatttatttagagacggagtcttgctctgtcgcccatgctggagtgcagtggcacagtctcagctcactgcaacctccgactcccaggttcaatcaattctcccacctcagcctctcaagtagtagctgggactacaggtgttcactgtcacacctggctactttttgtatttttagtagagttggagtttcaccatgttggccaggctggtctcgaactcctcaccttaggtgatctgcctgcctcggcctcccaaagtgctgggattacaggcgtgagccactacacctggcctcagtcagatataaaaattaaaaactcagattgggatctgaaagacttgtaagtgcaacaataatttattcagcatacatatcctccagctctcccccgctaatcctccccaactttgcaaagaaaaaggaactaaagcagcactaaaaagtagaaagaactcacagggtcttacattctcctgttttctggaactcttgtttgaaaggtgatacttcctcttgcctcccacctcagatacttacagaccaataacctaaaacctaagtggagactgttgggctaaccagaggtgagctcagtcttcttaaatctgtgactctgttccagatcaacccttagtgaaatctgaataattatttcctcactttaatcagacgaaatgggagctctcactctctaggaaaagcattaatgttcttcagtcaccactgttcttccataatacaaacatacagagcaaccaaaaaagagagtgacacccacaattaaatttttaa

SEQ ID NO: 47761 - DNA, 1044 bp, Homo sapiens
cgtgagctaaccacttcttacaacagtgcttttagatgtggctgtccccatttcactgataggaaaatcaggtccaagaggagatgtatactgcagaagttgcacagctactaagtggcgtagccaggatttagtccagctgcgtttcccgagctctgattggccttgtttacagaacgtctcccaggtacgcctttttgggcaacatttatgcatggaaaagaccccattatagagagttatttgagcagtcccctttgtgacatttatgccccgggctgctttgccctgaaactgcccactttacccctgagaagtcgtgagaactataacaatgaccgcaaaagacaagctgagaacaccagtacttggagttggcatgttctgtatccagaagctcaaagcttgcaagaagggcttcttctctctgtcatccccatagaatctactaaagaaaacctgggaacccatggagacatctaaaattcaccaccactgtggattgttacccataaggacctgttgcctcctttagtattgtcctgaggacactgtgtagggccattcccagcacattctttctgtttagggtcctgaaagacatatttgtctcatcagaagatgaagaagccgtttgatgatgatcttgtgggtttacagggtccctctacaactgttctttaagaaaatatcttggaaagtatcctgggcaagagcttcctgagagaccctttcggagtatgcattgaattcttgttcaatgactttagacctgcaggatgatatggggcctggtctgatactctgtatcggatttaattgctatccagtttatattaagtataatttaattcagattgggtcaggccctgatgttggatgatgctagtgtttttgccaaataaaagaccaaagaagatccatgttttgccagcagggtggaagcccagagcagatgccagttttacctgtacttggcacccctaaagtgtcagtcacagatggctatgcaaagacaaacttgttttttttactggatagttt

SEQ ID NO: 47762 - DNA, 1028 bp, Homo sapiens
tgagactctgtctaaaaaaaaagtatctttattgagattttcctgaatatgaaaactacttttttttttttgagacggagtctcgctctgtcacccaggctggactgcagtgctgtgatcttggctcacagcaacctctgcctccctggttcaagtgattctcctgcctcaccctcccgagtagctgggattacaggtgcccgccaccacgactggctaatttttgtatttttagtagagatggggtttcaccatgttggccaggctggtcttgaactgttgacctgatgatccacctgcatcagcttcccaaagtgctgggatcacaggagtgagccaccacgcctggctatgaaaactacatttttatgtcattttttattgtgataagctatacatcacacaaaattgatcattgtagtcatttgaagtgtacagttcagtggcattgagtccattcacactgttgtgcagccatcaccaccatccatctccagaactcttttcatctttcatcttaaaacacagaagctctgtccccattaagcactgactccccactccccttcccccagcccctggcaacctccattctacactctgtctctgtggatttgactgttctagggacctcaagtaagtggaatcgtactgtatttgtcttttgtggctggctgatttcatttagcatgatatcctcgaggtccatccatgctgtagcgggcgccggcatttccttcctctctaaggctgaataatgctcagttacaggatggaccacatttcgtgtatccattcgtgcacccatggacacttcggttgcttccacattttagctgttctgagtaacgctgccgtgcgcacaggtgtatatgcatcttcttgagcccctgctttcagttattttggttgtatactcggaatcgagctgctggatcacaaggtaattttgtgttgacttgtttgaggacctgtcctactgttgcccacagcggctgcgtgattttacattcccccagcaatgccca

SEQ ID NO: 47763 - DNA, 1024 bp, Homo sapiens
ttcctcctcttttgcctcccctcaacccccaggagagaaattcagccctgttgaaactgtgggcctctgaagagtggatttgccttaagaggtggatttttttcctttttcttttttcctccttctaaatatcgtgggaggtcggagcccacctttaggcaagaattggaggtgttttcagtggtgagcttgaaggaagtgggagaaggggggctggggagtgtcttttgctaaatggcttcctgggagaaatctttaaatgcctttggtttacaggactgttaaactttccctaagattttttttttctttaaggtttagtgtgcatttgatgtggctttgtacagtgtcatccagtttggtttttgtaaccaattgtgtgcggtcttagcatggtttttccgaatctcgctgcagccatttagtcatgtctatgcacagcgctgtggtgtaaggtgggactggggaggcccaggcattggggtgcagatcctgcttctttcttccgtaaacctagtgactctggggctgtctgaggcttcatctgcataaatcggggcgtgcaccctccacctggcaggtttgggcagcggtgaagggcctagcagagggcctggcacagttagtggttcctcctacggttgttggtataactgctgtcaagtcctaggacagacgtgagccccttgtggtgccacccatagagccaaactgtgcccatggatgccacaggtgctggcctaaggcatggacaatacagaaggaattcaaggcccaaacattagtgggcgcttatacagtgctgagcctctcgggaggcagggatgggaaaaagtagcatttggaggtctctagaacttagtagacccggagtgtgtggcagttggtcagtttaaggcagggttagaacagtacgagatgctcaggacaaacagacgcccaaggagtcctgccttctgaggataactgctttccttggggattggcagataatcatctgagagtgagtttctacttgtttggg

SEQ ID NO: 47764 - DNA, 1165 bp, Homo sapiens
cgtgcagcaggagtagctggcagaacaaagcctatctcaagttgctggcggtctttcacatcttgtacaggacttccttccgttcttacctctgcagccagttgtgtggcttccgtctggaccgtcttcctcctttccaagataaccatcagtctttttctctgtggggctgcagcagcagtatttattgcatttttaattgacttgtcaggcaatagatactccttgagcacctatcatttgccaggcattgtacaaggccctttaaatacatttttcttgtggtagggcaaggtggctcatgcctgtaatcccagtacttggggaggccaaggcaggtggattgcttgaggccaggttaagaccagcctgggcaatgtgatgaaaataaaaaaatgcctcttaaaagaaaaaattagtagggtatagtggcgcatgcctgtagttctaactacttgggaggctgaagcaggaggatcacttgagcttgggaggttgaggttgcagtgagccgtgatcatgccactgcactctagcctgggcgacagagtgagaccctgtctcaaaagaataaaaagtaggtcgggcacggtggctcacgcctgtaatccaagcactttggcaggccgaggtgggcggatcacctgaggtcaggaattcaagaccagcctggccaacatggtgaaaccccgtctctgctaaaaatacaaaaattagctggatgccgtggcgagtgcctgtagtcccagctactcaggaggggtgaggctggagaatcacttaaacctgggaggtggaggttgcagtgagccgagattgtgccactgcattccagcctgggagacagagtgaaattctgtctcaaaaaaaaaaaaaaaaaaaaagtctgggcacggtggctcacacctataatcccagcattttgggaggctgaggtgggcggatcacgaggtcaggagatcgagaccatcctggctaacacgatgaaaccccgtgtctactaaaaatacaaaaaattagccgggcgtggtggcgggcgcctgtagtcccagatactcaggaggctgaggcaggagaatggcatgaacccgggaggcggagtttgcagtgagccgagatcacgacactgcactctagcctgggccacagagcgagactccatctg

SEQ ID NO: 47765 - DNA, 1044 bp, Homo sapiens
cgttatgtctcccaggctggagtgcaatggcacgatctcggctcactgcacctctacctcccgggttcaagcgattctcctgcctcagcctcctgaatagctgggattacaggtctggctaatttttgtatttttaggagaaacggagtttcgccatgttggccaggctggtctcgaactcctgagctcaagcgatttgcctgcctcggcttcccagagtgctggaattacagccatgtgtaatcccatggtggcaatgttgagccaccttgccctgccaaccattttactttctttctgtgaaaccgaatactcttaagtacctcatgtaagtgagatcatccagtatttgtcattttgtgtctggcttatttttagcatagtatttccaaggttcatccatgttgcagcatgtgtcagaactaacttcattcttaaggcagaataatattctcttatttgcatgtatctaccacattttatttattcattcagcgacgggcagcagcctgtagatagttttgttttcatgtattgaatggtcctttcccccagtggagtgagtaaatgcatccggaagcagaattctgttgtttcccattcatcactgtgtgccaggtgtctgagaagggggtcttataggagcccacgcagaaaccaagctcacctcagtctgggtgtggggcagtcagggaaggcattctggaaaatgtagctgactcgaaataagcacctattgaaaatagtgtgctgagccctggaacattaaaaatgtgttcctatgtggaaatcagaaatgtatgggtcccagaagagaacttgtgggtcagcctgctttccagagagtgccgaggccctttgaatggtgaacattatgcaagcattcttgtatggccagtggccagcagggaggagggcagagaatgactgtgcctccgggaagccggcgtcaacttcccgacacgcttcaggatcatctctttgtatagaaccatgggatggatcgctgcaggacctactggaaaaaggaggtcatctccagga

SEQ ID NO: 47766 - DNA, 1052 bp, Homo sapiens
tgaaggccactgtgggagctggaaggaggcgatagacacagccaggtctaaggttgattttctgtatcaagtaaaatgattgtccttgctgcctgttttcttccaactgttatacactggagcctggtgcataaaattcagagacggcctccattttaagttttctcatagccccgtctttcacagtccttggtggttttgttgctgttaatattcattgctgttggcgcttttgcagctcctgatagtggctgttgtgcatatctcacttctcgactcaacctcttggcgtcacttgccacccctcctgccccccactttggtttagttcttccaggagatcacaccattggttgaagtgactgcagaaatgaagcactggaatgcctgggtggtggtgtttcatcaggctaggctggcggggatttgtgctctggcaagaggaggtgcggtttggaattacactgctctggctcctgggggggttattgttagctggaattcagagagagctcgctgggagagttgggaatgccatgccccctcttcctggtggagagtagctctcccttgcaggcacagtgcagcaccccacactggaagccctgctttggggtcagctgccttcaagtccaggttctaccacttagaagctgggtgacctggggccagcttttaaatctttttgaatctccattctcttcctctgcaaaatgtgatagtaacaccttcataggacctgggaaaggattcagagggtcatgtgctgcagagttgatagggcacctggcacaagacagcaggctctccatagaccgcagctattaatggttcctggattcagccctccccgggggcccgggggtttggagcaggcaggcttttgtacacttggggcttgtttgttacctaggtgttggggtttctaattatgtgctcagcactgtgctacatgctaaagatttggacccgtagcgcattgccctcacctcctggagctcagtcaccttaactagcaagggcctcccatgggcaggtgcatcagggctctt

SEQ ID NO: 47767 - DNA, 1057 bp, Homo sapiens
gcagtttgtgggttctggctgcaagggagactgcagctgggccagcaacagccctgacttgacctcaggccgacaggagtgttcctttcagccacttagacctacctgctatgaggtcttgaacaaatcatgtcttttgctcctttaagtctcagttttcttatctgccccaaatggatacggaacctgtctcacagcattgctgcaaagattggcgtaatttctgggatgcagtgttagtgcagtgtaggaaacctagtcaacttggaacagtatatggtgttgatactatgttgctcagttcaccgagatcttaaaaacaatgtaacagttacaatacaggcgtgtcacagttacaatacagccttgctacaaacatcaagctccagaagtgtatagagtagaaagtgaaagtcattccttcttccctgctgtttctttataatatcaagagaggactgctgtcttaaccagttgtttttaactaaggggactgttttaactgtgcatatgaattctaaacctgaagtgaccactggaaggtgggaggtgtgactgtttataggtagaccttaatataagcaaagacatctcatatggctccttagtgtggtctcttcagctttttgaggggagaaaaggccattgtaattctttgcacaccctggatgaatcataatgttgtattggtaaagttcagcagtggcatagactgggtttaattaacaagtgctgcttccaaagatcccacagctttacaatttgctgttgacatggttggagggtgggggaaggggaaaggtgggcatgcccttagggtaatggggcagtgcaatacggttttttagacgcttcggggagatggtgggtgggggaggagagttgtgagtatagagttttgggtgaggtgaggagtctgtgggtaaggtgtttataacgtgtgtagtgtatttggagtgagggtgcatgctcccttttcccaccgttctgaagtcacagcttggcgtacctgggaatgcccttggcgtagtaatccctggcccttattttggatctg

SEQ ID NO: 47768 - DNA, 1576 bp, Homo sapiens
tgtcctgggtttcctctagtgtctgaggcttggaggagaagtcatgcacggcttctggggtccagtcctttggcctttgctggagattatttataccaacccagcccttttagctcccacttcagtatttttggatttatttattttcatcaaagagaaagttcctttgtctcggctgagttgatgaacgtctctatagcagcaaacacccgagggcgtgtggcccagttctgagaagctgtggtagagtgaggagggcactgtgtgaccctggttctcacttcacctctgagcctctgttcccttatctgcaaatagggggtgatagtaaggacagccaccttagtggcggttaggaggatgctctctgcagctgtaatgtttattcgggcagcccgatggagtatttcctcaccggggtaacgggaggcattgcatccaggttggagtggttgctgaggagtccttcggtgcttctggtgatagtcattgttggccctaatccgcctcctgcagctgaactgtgggagtgccacagctagagggggtgggaagaagaggatggggttgttgtaagtaggctgtgttctctgcctgtctgggcatttgctgccgaagggcgtctgactcccatgtaatttacctaatgagaggtctcgggccttgctggttactctgtgcggggttacaggtctcaactcttttctttctatggacacaaacgaaaaatgtgctttgcagagatgccaggttgtaaagaaatattggccccagcatgtaaagatacatgtactggagtgttggttgtggcattatttgtggtgggacatgttcagttggacatttccgtagggaaatgggtaaataaaatacgatgccactgtatagtggaatgctgtgtaggcattaaaaagaatgaggtagatcactatgtgtatttttatcttttaatttttaagtctgaactaaacagaacttatgtatatttttagaaagatgaccatgtatagaaagagaagaacccaggttgaataatacagtagcttcctgcatttgtagagaagaccatgactgctaatatgaatgtgtataagcctggaggctgtccaccagtttgttaacactgtttaccttttgagttggattgttttcttgtgcacacattagtatcttttttttttttttgagacagagttttactcttgttgcccgggctggagtgcaaatgatatgatctcggctcactgcagcctccgcctcctgggttgaagtgattctcctgcctcagccttccgagtagctgggattacaggcatgtgccaccacacccagctaattttgtgttttcagtagagacgaggtttctccatgttggtcaggctggtctcaaactcccaacctcaggtgatccacccccctcggcctcccaaagtgctgggattacaggcatgagtcactgcgctcagccacttttttttttttttttcctgagatggagttttgctcttgtcgcccaggctggagtgcaatggcgcgatcttgtctcactgcaacctccacctcctgagttcaagcg

SEQ ID NO: 47769 - DNA, 1054 bp, Homo sapiens
atgctgggattacagacgtgagccaccgcaccttacaggtgcctgccaccacgcctggctaatttttgtatttttagtagagacgggatttcaccatgttggttggccaggctggtctcgaacgcctgaccccaggtgatctgcccatctcggcctcccaaagtgctgggattataggtgtgagccactgctccctggccacattagtatcttttgaatttgtcttactgaatgtgtattagtaacatgtattggttacaaagataataacaaaggtaactcgcatgcatttcagtacagtggagcctgtgggggccgggctgggctggggcagctgctgtgttggtggctcttttcctggtgccagatcaaacttaccgtgaggtaagagctgctccaggcttcgtattccacgcagacccatccagtgcaccctggctcctggtattgggccccagtggttactgtgaatttaactagttcaatcgtctgtctctgttgatgtgtcagtggccctcagaaactgctttgtttatctggttagaaggaacaatccaatacaaatgctgtctccgatttctcttctctactaaatcagattgtacaataaagaacatagattttggttgcatttgcagagtacttctcatttgttaattcaccattatttggaggtggaaaaggaaggagtaactgaaagaagcccatgtatttcatgtatttcttttatttgccaggtccttgttaaattttgacgccagagagggaggcctttgtatagcacatctgtccaactgttcatcactcaccatatgttgaaatcatcttcttccccaccccccttgctaaattaaccgcatcttcaaagcgggaggtaggcaggaacttggagaccgcatatgggctttccagccagagtcctcttcaggcttcagcccaagcctgcctgcctgtgagctagatgaggagaggggctccaggcagaccctgtgggtgaggagcccagagctggtgcagactctgggggtgtgggatgctgtattagagtaaagat

SEQ ID NO: 47770 - DNA, 1024 bp, Homo sapiens
ccagggtggagtgcagtggcacagtcacggcttactgcaaccccaaactcctggattcaagggagtctcccaagtagctgggatccaggcatgtgccaccacacccagctaattaatttttttttttttttctgtagagatggcgtcttgctgtattgcccagactgatctcaaattcctcacctcaagcgatcctctcacttcggactctcagagtgtggggattacaggtgtgagccactgtacctggcctgaatttttcttaaagtctaatatagtcacttttagaacatgtttgctcatctacgttgaccgtctctatcttgatgggcttgatctaccaaggtggacaggcttctgtttgttctaatgtttgtactttcattgtgggtggtcctcttggccctttaaaactaccctgctctgctgcttgctcttttgtgtctgtctcctttgattcaacattttttttgtgcgtttcatctgtatagttgtgtatgtttatttgttcttattgtaggatggtttttggttatgtggatgtaattatccatgtgacagactgagctcatttccatagttcttccaaacaatgctgccacagtgcgggtatgtgcgtgcgtgcgtgcgtgcatgcacacgctgttgggtatatacctaggtttggagttaactgggtcatgggtgagcatatggtggctgcatgggcagctgccagctctcagtgatggcaccaggtacatgagggtcatccttgctctgctgacgctgtaaagatgttgcttctttgcaaattaaccgctggattccctgtaattctagtgaaaatcccagcagcttttcttttgttttagctgtttatttcagaaattgacaaactcattctgaaatttatatgaaaatgcaaaagggccaagaataatcaaagcattctctctctctcttttttttttttttttgagaaggagttttgctgttgctcaggctggagtgcagtgagacgattataggtcactgcagccta

SEQ ID NO: 47771 - DNA, 1743 bp, Homo sapiens
ctcccaggttcaagcgattcttcggcctcagcctcccgagtacctgggactataggcgcacaccaccacgcccagctaatttttgtatttttagtagagatggggtttcaccatgttgggcaggatggtcttgatctcctgacctcatgatccacccgcctcggcctcccaaagtgctgggattacaggcgtaagccaccacgccgggccttaatcaaagcattcttgaagaaaaacaaagctgaaggacatatcctaccaaatatccagactttataaaagctgcagtgattaagacaatgcagtgttgccaaaaagatagacaaataggctgattggagggaacagtcttcaaacaaactgcacatcagtagtcacttaatttatgacacatgacaaagagaaaagatggccttttcagaaaaggtactgggagaactgaactctccataagggaaaaaaatgaaacttttatcacaaatcatatcgagaaatcagtgttaggtagatcatagatgtaaacatgaaagataaaacaataaagcctctagaataaaacataggatatcttcatgattttggaaaaatcggacacagaaagcagtaaccaaagtagaaaaatttgatacattaaactgcattaaagtttgtatcttttgctttttacattgctccaagaaaatgcaatcaatactaatttgtaatttcctggaaatggtagataatccatcctgtttgttcctccagaagcctctatcctgtttttaccaggactgttgcccctctggcccatggtgcggctaccatcttgggctttttttttttttggagatggagtctctgctgtgtcgcccagactggagtgtagtggcctgatcttggctcactgcaacctctacctcccgggttcaagtgatcttctgcctcagcctcccaagtagctgggactacaggtgcctgccaccacgcccaactgatttttgtatttttagtagagatggggtttcaccatattggccaggctggtcttgaactattgacctcaagtgatccacccgccttggcctcccaaagtgctgggattacaagcatgagccaccgtgcctggctgctatctcgggcttctgttggtcgtcattctgggacttgtttttgtccctccacacgtggtccttatttcctggatcctatttgtattggttggataatttggacataatgacagcaactgtcttttttgtttgtttttttgagtcggagtttcactctgttgcccacgccggagtacagtggcacaatctcggttcactgtaacctctgcctcacaggtttaagcgattctcctgttttcagcctcctgagtagctgggactacaggtgtgcgccatcacgcccagctaatttttgtatttttagtagagacgggggttttaccatgttggtcaggctggtcttgaactccggacctcaggtgatccacccgccttggcctcccaaagtggtgggattttcaggcctggccaacagcaactatcttaataagaacgttcattgactcaagtaattgcaagtccagaagtagacaggtttgggattatttgggtgcacccattctgaaccagtcattagaaccggagctgggcttctcttaggccaggcccccgctcccctggggctggggctgggtcagcctccctcaggctccatcaggaaggaggaagggagaattaactgctgggtagg

SEQ ID NO: 47772 - DNA, 1013 bp, Homo sapiens
ggagttcccatatagcctactcccagtttgcccccattaaacacatcttatgttagtacagtatatttgtcacaactaatgaaccagtattgatacattattattgactaaagtttatgctttattcagatgttcttagcttgtacccagtgtcttttttttttccgttctaggatgccacattaaatttaatcatgtccccatagtttccactaggttgtgacaattaagtttttgatgaccatgacagttttgaggcataccgatcagatatttggtagaatgttcctcgatttgggatttgtcggatgctttcttcatgattatcctgaggttatggggtttgggctataacatgcttaattgtaactagggtgattcttgttttctagttattttttaagggggaaaaaaagtttatttcatgggtgtggtatcttctcttgattttatgaggatattaattttataatacatatttttaatctttgatctctggcactgtctgtttcctctgttattttgtctatttatttggtgtctgtcttttagttggtcatctctcagatacctgtggtctcgggcacacagctgattggaaactgcatggactcttcagagtgggtgcctggatgggaggctggccttttcatttcttgaatcccatgttggtgtatataggttttctttctctggggctggtttttcaagagaagactcccttgtctttgcctgaggagtggagggtggtgtggtgtttgtctgctgccctcctgtgaggagcagcagaagtggggggcctgaagcttctgaggtttgccactcaggttctctcttcacttttttggggggtctcctttccccaccccttccccctctgaccctggtgttctcaagtctagacttctcttgtttaatgtatccagtgggggagggaaggggccgtaggtgtctagctgttgcacttgcagccttcagccagtccccccacatctgagttcccaccttcccct

SEQ ID NO: 47773 - DNA, 1045 bp, Homo sapiens
tttctttttctttctttctttctttctttctttctttctttctttctttttttttttttttttgagatggaggctccctctgtcgcccaggctggagtgcagtgcatgatctcggctcactgcaacctccacctcttgggttcaagtgagtcctgtctcagcctcctgagtagctgggattacaggcatgcactaccacgcccagctaatttttgtattttcagtagagtcagggtgtcgccatgttggccaggctggttccgaactcctgacctcaggtgcacctcagcctcccaaagtgctaggattacaggtgtgaaccgccacacctggcctacccttgcttttctgacagtgccacgtagggagcctctgcaagctggaggtgtggtgggggttgggttaggctgtcatcgagtgaggcagcagaagtgtcccctcaaacccacctggttcccccaccctgatatgcacacaagttcatcatcatcttgcaatgtattcatgtccatactttaccctctgaaccagaaggcagcaaactgcaaccccgattgcagcccacctcctgtttttgtaaatatggctattctcttttatgtattgtctggggctacttccatgctacgacgacagcctcaggcagagttgagcaattgcagcagagagctctgtgtggccagcaaagctgagtacatttactgtctggccctttacagacaaactttgcagatctctcctgctgcaggagtgcagggtggagtctcctgtctccatgtccccagcaccaagtgacacagggtctggcacacacattggtcagtaaacgtttgagtatttgaagtaggtgaggtcgccttacttacgttaaaggtttttttgccagacattgattggtgtgttggggaaagatagacttctttcatcttgtccctggatttcgtggtgatggttcttggctgagacttaacaagtaaactgtccagtggccacgtccttttctggcccacattgttacttcctgaagcgtttatccagcctgcta

SEQ ID NO: 47774 - DNA, 1028 bp, Homo sapiens
ataagccaggtttgacttatgctaacctgcgaggacttggtgcgtctatgccgggtctagtcccacagacctaggggtgagtcagagctggatggaaatgcctcagacccgctggagagctgttctcttgcctcagccggcttcctgcttcacacttggatgctcaccggtgctttctccctgcctccggataggctagtttagcttggggtatgcatgtgtgttgatggatggaaactcggcaggtatttgaagcctggtaaagccctgctaacagcgccctggcctgatgtttgtgaaaagcagctggcaagcagtggggccagatgcttgtgggcggggccagcctcgcactcagccggtcagtggagatccctgcaacgggaggaaatccgaatgattctggtttattttggagttgtgtccagtgaaagatctcctgactgccgtaaagcaggtgtgtatacacaaactttgtaaaggaccaggcagtaactgttctgggctttgtgggccatagatggcctcttgcttatttctcttcaggctgccggcccctgctctgatggaacgttgaggctggaagattctccacttgtgcagtcttcactgtggagagtgtaattgtcctcgtaggggctgctttcattcactgcagcagtgactcgcctggttccttgttggtatcccaagtttatataggaaaataggatccaatcccaggcttgtaagaggtggctgattccacagtaagccatttctttctgctacgttttttttttttagacagatttttccctctgtcgcccaggctgtagtgcagtggcccaatctccgttcactgcaacctccacctcccaggctcaagcagttgtcctgcctcagcctccccagtggctgggattacaggcgtgcatcaccacgcccagctaatttttttaaatatagttttagtagagacagagttttaccatgttgctcaggctggtcttgaactcttgggttcaagtgatccgcctgcttcagct

SEQ ID NO: 47775 - DNA, 1050 bp, Homo sapiens
gctgggtgtggtggctcacgcttgtaatcccagcacttcaggaggccaaggtgggcggataacttgaggttaggagtttgagacaagcctggccaacatggtgaaaccctgtctctactaaaatacgaaaattagctgggcgtggtggcgcgcacctgtaatcccagctactcgggaggctgaggctggagaatcacttgaacctgggaggcagaggttatagtgagccaagattgtgccactgcactccagcccgggcgacagtgtgagcctctgtctcaaaaaaagaaaagaaaagaaaagatggagggcattaaagaaaacattgtacaagcaggttaagtgcagatgttagtccaatgtgtttcttgtactggcttcaccaaggctctgtgattggaaggggtggaaaacatttcacctggaacacagaaggtgcccagttaatatttgttgggtggttgaatttactgggaggacatagttcaaggaatagttgtagacagactgacatctcgtaaacacaattctaaatttctaggagagtgtctcatgtttgggcgaggttttttgttttttgagatggattctcactctgctgcccaggctggagtgcaatggcgcaatcttggctcactgcagcctctgcctcctgggttcaagtgattctgctgccttcaagtgattctcctgctttagcctcccgagtagctgagattacaggcgtgcaccaccatgcctggctcctttttgtatttttagtatagacggggtttcaccatgttggccaggctggtcttgaactcctgacctcaggtgatcctctcgcctcggcctcccaaagtgctgggattacaggcgtgagctaccacgcctgacctgagcaaggtttttttccttttgttgccactagggtatggggaagtatgaatcaaaccttctcagagaagtgtggtgtgtgccaggtagttacactgagagctgtgtgtgtccattctacccttttccctcaggcctggtcagcacagagtcagagaaagtagaggccag

SEQ ID NO: 47776 - DNA, 1088 bp, Homo sapiens
atcacttgaggccaggagtttgagaccagcctgggcaacatgatgaaatcttgtctctactgaaaatacaaaaattagccaggtttggtggcacacacctgtaagcccagctactcaggaggctgacacaggagaattgcttgaatctgggaggtggaggttgcagtgagctaagacggtgccactgcactccagcctgagctacagaaagaaactctgtctcaaaaaaaaaaaaaaaaaaaaaaagaaaaagaaaaaaagaagaagaagaaaggaaaatcattcaatgtgaaatcttgccatgcctttctttttcttgagacaggatctcgctctgccctcaagaggcttgcaatctagcccacggaacgatgctcttattaattatgacttttggggagtgggacagcaactccctggacctagcctcagggagggagatttaaaatggcccatggaccccagggcaaggaagcagccaggtcatgggcaccgcagtcaggattgggcacgtgggactgactcccattctgagcattggtgccctttgctccagtgcaggaggtgagctctggggagggctgctggggtcaagcagctgctggcaggtaacttgggggcagtgagtgcttggaagcacttttgctggtatgtttcttcattgtgccagactctcttacgccctctagtacattcagcatccttgggcttggccactgaatgtgggcagcagtcccatcattgtgacatcaaaaatgctcctgcacatttgcaaacaccctggtattccttggcccatggcagcagctgaataaactgggatttgggtgagggaagggagttaagtaaccaaccagcatggctgaagccatgtggggcggagaggagaatttccttgaagaagggcacagtgtcggcccctggttgtgtcccctgctcacacagatcggacgtaggaccgcttatccctcggcatccatcttcctgcgttcttcatgagcatttcttgatacgaattgcatgcggatctgtccctcagtgattggcagatcttaggtatcagtcaatacctgttaaatgaatgaaag

SEQ ID NO: 47777 - DNA, 1050 bp, Homo sapiens
gtcgggcgcagtggctcacacctgtaatcccagcactttgggaggctgaactgagcagatcacatgaggtcaggagttcaagactggcctggccaacatgttgaaaccccgtctctgctaaaaatacaaaaattagccaggcgtggtgctgcataactgtaatcccagatattcgggagactgaggcaggagaatcgcttgaacctgggagaaagaggttgcagtgagctgagatcatgccactgcactgcaacctgggcggcagaatgagactccatctaaaaaaaaaaaaaaaaaaaaaaaaagccaaaaaattcttattgcagttgtatctgtaagggggaagaaaaacccatatgagagactggttaaattatgacctgtctagttgtgttgtgtgctcattaaaagcaaaaggaagatccgtttctatgttgatgaaaagatgttcagatgcatgaagtaaaaaagtcatagagctttatgtatggggtcactccacttctgttagaaaaatactgtattcctgcagtgtaaaactctgctggttaaaaacaaaactgtattaacaggtatagaaaagtctgcttggagtttctctctggatgatgagatcatgatgttctgtgttacctagttttatttataagtttatttttactatgagcatgtatttcttttataaactcagagaaggttaaaaagtcagccctctgagtaggtatgggctctgggtctggggtaaggggcacaagcccttcattccagtgattgaatttccctattggcaaatccttcatttgcattgtttacagtgagcttttagtttttgcagacagaaggctctacaagaaggcagaaaagtttcatttttaaaaaagaaaggccaggcaaggtggctcaagcctgtagtcccacctactcagaaggccgagatgagaggattgcttgaggccgggaagcagaggttgcattgagccaagtttaccccactacactccagcctgggtgatagagtgagaccccctgtctcaaaaaaaagaaaaagaa

SEQ ID NO: 47778 - DNA, 1050 bp, Homo sapiens
tactttggttcctcttgatttaccgtgaggcagggtcactcaggctggactgcagactagttcagggtgaagctccatggaagcgtcacgtgagctccatggaagcttgggtcacaggaagacaaaaagtggcaggtcacaaaaaggttcactggccaggtgagtttgaaaaacaaaacgaagcgagctcctttactgcggtacttctcagtgcctttcatatgctaatacctaatgtgactctctgagaagaggatataatgggcagcagtccctgaatttatttgtcccaggaaacatttctttaccgaatgtctctagggactaatgtctctcagaacacgctttgggaaatacgaagctacaatccttcatttgttgatatgttttaagtgtttttctaagcagaaagtaatgatttcaccaagcaagagctcataacacactcagtccatcagagcctggctacaggtttccagagattggcaggaggatatacttagccagaactagaaatctagatgagaagtctatgaattttttagaagactaaaagtagacgtagatatctcatattcaccagctctcttgacagcgggaatgaacatattttggttttgctttgctgcatgggcaatataaggtctcaaatgtcatcccctctctgctttaaccatactcagggaagtctgtggctttgccagggcaccctctccccacctaacactgaaccgtgcttttaaaattaaagacaagaaaagaggtctataatcatgcaagatgcccttttccttggcctaaatccactgggacccataggctagtcagagtatttagagttgagttcctttctgcttcccagaatttgaaagaaaaggagtgaggtgatagagctgagagatcagatttgcctctgaagcctgttcaagatgtatgtgctcagaccccaccactggggcctgtgggtgaggtcctgggcatctatttgaatgaattgctgaaggggagcactatgccaaggaaggggaacccatcctggcactggcacag

SEQ ID NO: 47779 - DNA, 1029 bp, Homo sapiens
tgctgtgtcactgtctgtgtgacttgaagctggtcactccccaaatcctgctccttgtctgtagagtgggcctggcattttctcgtccctgggaccgctgtgtggagtgtgcgttacagggaaggttcagggctttgctgctgctcagaaagtggtggtggatggatccgtatagggtttgaatctaaggtgctggcctctcagcaccttgttgtaataggctgttattgtacagtggaataagggagctggccctcttctgattctcttccttctttcagaatacaaattcagtgccaggtggaccaaagtcatgggcacagctgaatggaaagccagtaggacacgaaggtggtaagtgcgcacgtgtgtgtgttgtttggggacgctggggagagggaggtgaatgccttttccagaatgtctggttgggtctaggcacccagaagctttgaggactctcttccacaaagaggtaccgtctatggagcccttgcctgtgcacagcgggcgctgactctgtagaggtgccagctctttggtttctttggatgtgtgctcttgctgagacagaggagtgctgactgggctgtgctgctggtgatttttgatgatagcttgaatgtttctagcatactgtgcttcagaccaaactaggcagcagctctgagtgggaaggagagtggtcgtggtgtgggcagacgattcaaaggaatgtactggggaaagcccacaattcactttctcctgtaaagcagcactggctgccctttattaccctttgccaccatcctgatatcgccttctgcttcctgcactacccctgccagccaaggcttcaccagacttggtctttagtagcctgtattagaaaaccagctgcacatccttcgttacctgaacctcacccccagcctgccatgcctaggaggtcctgccccttatgggttgaaatccctgtgctcaaaggctcttccctcagtctccaacgggaaatgaccgatcaatgtgccaattggatttcagtgc

SEQ ID NO: 47780 - DNA, 1037 bp, Homo sapiens
tgcgacgagatctcactatgttgctcaggctggtctccaactcctgggctcaaatgatcctcctaccttggcctcccagagtgctgggattacagacgtaagccaccgtgcctgacctcaaaagggtctttgaagatgctttatgaagagcattcactggacttgtaactggttctttggctttccatatcttatatttctgtaaggttagaattttttgttttgtttttgttttttttgagacagagtcttgctttgtcacacaggctggagtgcagtggcacaatagctcactgcaacctccataaggttagaatttttaaaaatagatagaatatattaatttttatttaaaaagaactacaaaaattaaaagaaaaacttctgtataaattggcccaactcctatggaagccagtttggcgctgcctggcaaaataataacacataataccctttgacctagcaagtgcaccctgaggaaattgctctacaaattatactcgcccgtgtgtgaaatgacttgcgcataagattattcactgcaacattataatagcaaaagattgcaaacagtcccttgaaatgcctgtaaaattatggtactttaatgaaatgtgatttggctataaagaaaaaaagcagaagttttctattgatttggcaagatcttcaggtgaaaaaaagtacagaatggtatgtatagtatcttaaccatttgtgtaaaaaatgggggtgagggctggacacctgtaatcccaggactttgggaggctgaggcagaaggattgcttgagtccggtagttcgagaccagcctgggcaacatggtgaaaccctgtctctacaagaaatacaaaaaatcagccaagtgtggtggcagacacctgtagtcccagctacttgggaggcttgaggcaggagaatcacctgagcaccagaggtggaggctgcagtgagctgtggtcacactcctgtacaccaacctgggtgacagagcaagaccctatcttaaaggacaaaacagaaaaatgggag

SEQ ID NO: 47781 - DNA, 1050 bp, Homo sapiens
ggctgattttataggaggctgtgcttgtctgtggccccaggcagtcagtagaaccttccctgctggggcaggctgtggcctggagcggctgtgatgtcttacctctttccatttgtaagcaggcactggtccttgcaggtcagctgggaaggggcatgatgctgtcagcagcagtctcccttgccaccctcagcaccctcgtggcatctgccagcacagagcacccttgtgacaagactcccttcaaaagcccacttccaggcaacacggctttcaaggtgtggagctgggaagcagacgactgttgactccatctcacttcctccatgtctaccccgtcttcttgacaggtttaaggggctcaagccgactgttatccttctctcccgaggaatttccgacgctgaaagcagctggagggcaggacaaggctggcaaagaaaagggcgtcttagatctgtcgtatgggccaggaccaagcctccgccctcagagtaagtgactgcagcctctgggcactcgatggagtaacagaacttcctcctctcatctctctgcactcctaaaagggtgctgatgccactggggtctccggttcgagctggaaacgtggctctttgactcgccacgtgatctgtgcatccattggacttgctgcctaggccattggattgggccttgtgccttttttgtctcttgggttgggccaggcctgtcccctccccctctgtcatccggttgttaattttgctgtgcctggtggctgtggcaaggatggacaaaggaccaattaacttaggtccccggttcaagagcttgttttctaaagctcccaatcctagctacatctagtcggaatcactggggagtttgtgaatgagtctgatttccagtcctcccctcccccagcccaattaggacctgtatttttaacccattcctctggggattgttacataaatcagcctggtactggtctctactggcccctcatcttaggtcgggccagggaagtggcaggattgtgtagcactggctggaaatttctcc

SEQ ID NO: 47782 - DNA, 1928 bp, Homo sapiens
cagtgatcactgtggatgtgtcttacttaaaccagcactcactgcctttccagtggcccacacaggactggtttattttgctgcttttttttttttgagatggagtttcgctcttgttgcccagggtggagtgcaatggtgcgatctctgctcactgcaacctccgcctcccgggttcaagtgattctcctgcctcaggctcccgagtagctgggattacaggcatgtgccaccacacccagctaattttgtatttttagtagaggcgggtttctccatgttggtcaggctggccttgaactcctgacctcaggtgatccgcctgtctcagcctcccaaagtgctgggattacaggcgtgagccaccgcgcccagcctgtttgcatcattttaagggacacgaattatgtctttctggggttaattaagaggagctgccttgtgggactataaaaacgtagacatagaagaagcttctaagcatcagtttaatctcctcattggagaagatgagaaaacatggacagaggggtgaccttggcttgccccaaatcacacagcaaaggggttgaagagctgggatcagacatgtcctgggtctctttcccttaagggtcgtgtaactcagagacctttgtgcttcaacttctaaccaaaaggtgaccgaaaacaggggtctgttgtctcatttgatttcttgttggcctctaataatttccacccgatcttaccacatttggcaatagaaagcatcattttaaaaagacaggtcagcaggtttccgtctgtgagctacgcaagtgccccacacctccactggaaggacagcagctgcgccttgcctgtcttgtgggctgggggatctttattaaaaggtgccactgctaaacaaagcctgaaaccactgtgcccggaacttgctcctgttttaatgtgtagtccagtgctgaccctaagtgggctggtcagtgtttgttgaaggaatgacccaaggctggtttcatcagggccatcttcatctctctgggttgtgagacttggggaagggtggtgattgttgcttactgatgaagccttctctctgagtagatctcattttatatttcacagtcagacttccctcagcaagttcatcctcattggccaggggtctgccccaaccttccctgacagatttaacagttcttcacttttggtgttttttgtttttcattttatttttttggtgaaggagggggtcccttgaccttcagaacctcatacgatccctccttccccctcctcttccctctccccttttgccccctttcaatttccagatgtgacaagctggagggagggcggtgggcgacacataatttctgccacgtctctgagcacctccccaactgagctgggcagcaggaactcgagtacgggagatggagccccctcctcggcatgtaccagcgattctaaggacccctctctccgcccggctcagcctgtccgaaaaggggcttcacagttcatgggaaatgtataccacccacctacataccatgacatgcttcctgcttttgtaagtcttcagagtgtactttttttccccccatgaagttggattgtgtccagcagataggtcaagtggttgaatgtcccccttggggtctcctcttggccctgttaccctacttctgaggcttccactcgttttgcattttctctccctgctttttaaatcttcagggcctctgacttctttccctggtgatgtggatatgattttagcctttggttctttagaaacaggagaggcaggttttccctgacataggtccccaagtctacttactggcagcaggaatgaaatgggggagatggtggtaggattaattaggaaaccccatgactttcctgtttctttttcccattttccactttataaa

SEQ ID NO: 47783 - DNA, 1014 bp, Homo sapiens
aaccagctcagcgtggcagggtgtgtggggtggtggctgggatttggagctggatgacagattgagtcatgatttcaagtgcctggtagagttgaagttctggcacgtgtgtgttgctgctgccctaggccttagcaaccagcatgtaaaactgcaggacaaggcagaacttctttctgggatgtactcgtttgctcattatatatttcttttaaaggaactgatagaaataattaaatcaaacatgaacctttgcagtgtggaatttatttttggaaaggtatttgattttgcttccgtctgtatactggacatgattccatcatcttttcttttatcagaaaagaaaacaggctgggattgtctcgcccactccgcccactaaggcagctggtggagcgggcaccacggcccaccattatcaatgcggaaaacctgaagggccttgacgatctggacgccgatgccgatgatggctgggcaggtgggcagagaagcacgggtggtttagacgggcaggaccaaagtccatatgtacttaccagggatggaaaccccctggcaccaccgtgtgttttcccttggcaagatagggatgaagagccggacagggaagcagacctgatgccctccttcctcatttactccctgactagaggttccttcctggccaagccattagcttcttttggtctttagtcttgatcttagagttttgttgttaactttttaaaaattattgatgatgcaaaatttaaacaaaaaagaaaatagctcccaaccactgatcactcaggttcaataagtaccaatgttctgccattcggtttttgtttgttttaatttaatttttttccaagagacagggtctcagctactctgggcatactgcctgtgggttagccctactctgcaaggagcagtaaaaaatataaagataaaaaggaaggctgggcacggtggctaatgcctataattcctttggaaggctgaggtgggcagatcacaagatca

SEQ ID NO: 47784 - DNA, 1031 bp, Homo sapiens
aaatttgggtttttttgtggttattatttttgtgtcctgtttaaaaaaatgtttgcttccccttggtggtaaagatgttcctagatgttttatagttttaactattaattttaggtctttgatccacattggattaatttttgtatatggcataagataggagtcaaggtttgttttttcccatacggccaattctccacaacatttgttgataagacttcactttccctatcgaattgctttggaacctttgccaaaagtcaattgactataaaagcattggtctatttctggacactgttccattgatctagttgttcctcataccagtaccacactgtgggtttatagtaaatcttaaatttcagtagtgtaagttttccaactttgtcgttttccaagattgtttccacataaatttagaatcaacctgtcagtatttacaaagggcctgcgggcattttggttaggattatgttgaatctgtatcaacatcgataagtgacatcttaaatttttttttttttttcccgagacagagtcttgctctattgcccaggctggagttcagtggcatgatctcgactcattgcaacctccgcctcccgggttcaagtgattatcttgcctcagcctcccgagtagctggaattataggcgcgcaccacatgcccaactaatttttgtatttttagtagagacagggtttcaccatgttggccaggctggtctcgaactcctgaccttgtgatctgcccacctcagcatcccaaagtgctgggattacaggcgtgagccactgcaccccacctgacatcttaactttgaaacttggtggtgtttttttttttggatatggggtctcactctgccacacaggctggagtgcagtggcatgatctcagctcattgcaacctctgcttcctgggttcaagtgattctcatgtctcagccttccaagtagctgggattacaggtgtgggccactatgccctactaattgttgtatttttagtagagacgaagtttc

SEQ ID NO: 47785 - DNA, 1046 bp, Homo sapiens
atgtagaggtcctgaatgtcttttgttaaatttattctcaggcattttacggttttttgatgctattagaaatgacattgatttttaagaacaatttcattttttaagggtttgctgtcattatatagaaaatacagctgaggccgggcgcagtggctcacgcctgtaatcccaccactttgggaggctgaggtgggtggatcacaagatcaggagattgagaccatcctggctaacatggtgaaaccccgtctctgctaaaaatacaaaaaattagccgggcgtgttggcacgcgcctgtagtcccagctacttgggaggcggaggcaggagaattgcttgaactcgggaggcggaggttgcaatgagccaggatcgtgccactgcactccagcctgggtgacagagcgagactccatctcaaaaaaaaaagaaaatacagttgatttttttgtgttcactggtaccagacactttgttgaatatacattagttttactagtttttgttgatttcttagagttttctacataaacccttatgtagtttgtaaataaggagttttacattgtctttttcagattacgtgccttttatttatttatttgtattttgccttattgcactgtggtatacttctagtataatattaacctcaagttctttctggtctgaggaagaaaatgtttcatgtgtcagcatgaagtgtcagctgtgggtttttcagagatgctgtttatcaggttgaggatgtgttgccttctgtgtctagtttgctgagcctttgggttttttgtttttgtaaattatgggtattgcattgtgttcaatgatttcctacatctgtgttcatattatttttctcctttattttgataatagattgcatttttttttaatgctaaaccaaccttgcattcttagaataaaccctccctctttgtatgcctagactcaatttgttaatatgttttaaagttctgtcatgagggatattagtttgtaattttctgttcttttaatgtctttgtcaggttttggtatca

SEQ ID NO: 47786 - DNA, 1935 bp, Homo sapiens
ctctgtaattgttgtcccctctgtaattttcccctctgtaatctcctaagctatgttacctgcctcgtcttccctccctcgccacgtacgtgtgtgggtagacacacaggcccacacatctgccatccctgattcccgcttttctctgatctgcagtattaccgggcccttgcaaatgctttgccccagcaccattgcttccattgtgaggcgtccagacgagcatggcacccatccccttcttgtccagccacccctgcagctctgtttggaacacctcctccttttccatgctgtgtcggctctgcttgtctcctcttgctctttttattgtggcactgtttagtagtcatcttttgttcttttgaggggcatttattgagcaactggcttgtgcagagcatagggagggagatgtaccaaaaggagacggacacgcacctgggagtcctggttcaaatctgtgagctcctccctgtgaggggtgccccgttaaccttgatgagactcagctactgactttttaaatcaagagtgtccaatcttttggcttccctgggccacactggaagagttgtcttgagccacacataaaatacactaacactaacgatagctgataagctaaaatgaaaaagttacgaaaaaatacctcataatgtgtttttatttttttttttttctgagacggagtctctctctgtttgttgcccaggctggagtgtagtgccgcgattttggctcactgcaaccttcacctctggggttcaagcacttctcccacctcagcctctagtagctgagattacaggtgcctgctaccacacctggctaatttttgtatttttagtagagacttggtttcaccatgttggcctggctgatctggaactcctgacctcaaatgatcagcccgcctcagcctcccaaagtgctaggattacaggcgtgagccactacgcccaggccctcttataatgttttaagaaagtttacgaatttgtgttgcgctgcatccagagcccagggccatcctgggccacatgtggttggacaagcttgctttaaagtgaggatcatgaggacttttttttgcatcggtgaaatagtgtgacatatcgtgcctggggctctgtttaatgagagtgacttgataaatggtggggctgaaccgtggaattcacatggaagtagtgggagtggtggtccattctaatgaagaaaatgatttggacagctgacttgggaattctcaaggcctctgaccagtgagatcagaaatgcttggcctgagtgcaaaaacttaacatcaaatgtggtttgtcctaggaacagttgggaccctaggaggcagcggcagttgtcaatgagctctgcagacagtgcggacgctaagcggactcgagaggaagggaaggactgggctgaagcagtgggtgcgtcccgtgtggtccgaaaggcgccagaccctcagccaccgcccaggaagcttcatggctgggcaccaggccctgactaccaggtaccaagggcccttggctgtcctgtgtatttgtacttcattgagttgggtggctgggtttctgagaagtcctaagtgggcatttctttttcatttttatatttcttcttttgttaaaatgttttttcatagagacagggtctcactatgttgcccaggcttgtctcaaactccagctcaagtgatgccaaagtgctaggattacaggtgtgagccaccatgcccggctgttcttactttttttaagataaggtcttgctctatccttcacctcccaccctcaagcgatcctcccacctcagcctcctgagtagctgggactacctgtgtgctgccacacctggctcatttcattcattttttgtagagacgaggtcttactatgttgcccaggctagtcttgagctcgtggg

SEQ ID NO: 47787 - DNA, 1816 bp, Homo sapiens
ggtgaggcccggaagcaggcagagaaggaagtgccctggtctccaagtgctgagaaggcatctccccaggaaaacggccctgctgtccacaaaggtaagagctgggccgtcttcccaccaactggaaaccctggcctgttgtcctcgtcttgttacttgcaactgccttccttcttagctagcagaacgtatggcttacaacgagatcgtattgggaagcatcagttattaagagcataggcctgggtcaaatgcctgggttctgatcctatttgaacttcttttttataatttcaacttttactttagtttcagggggtacattgtgtgatgctgagatttggggtatgaatgatcctatcacccaggtactgagcatagtacccaacaggtagtttttcagccctttttccttctcccatctgaacttgttaaactagctggtgagcacctcacctctctgaagcctgtttcttcatctgtgaaatgggatgagtatgtacctgccagcacgcggaggggtgtacagcacgctccagtttctgggacattgaaaccatgcatctactcactgatgatactcatcatcgtcactattatcctcgctatccctgcctaatcaaagacacgtgtgctctaggactttaataaaaccacagatcctttaacatggaataaaaataagcccacttgcttggtagaatacattttttcctggtgttgattctaaaaggaatggatcacatggccctattttttttttgaaatggagtctctttctgtcacccaggttggagtggtgtgatctctgctcactgcaacctctgcctgccgggttcaagcgattttcccagctcagcctcctgagctgctgggattacaggcgtgtgccacgacgcccagctaatttttgtatttttagtagagacagggtttcgccatgttggccaggctggtttggaactcctggcctcaagtgatccacctggcttggcctcccaaagtgctgagattacaggcgtgagccactgtgcctgggcaacacggccctatttaagagtaatgaagcagtgctctataatgcagagtgtctcttgtagcagttttgaagaatataatcagctgttttctttataattttcttaaataaactcagatcagctcttgttaggagacaaggggatgtttgaggctctgaaagcttctcgggttagagagtcctagtgcccttctggccagggaactcatttctagtttttcttctgccctcctttcattaaaggttgagtgaggactgtgccactcttataggaaagttgcactgagcattttctgcctgtcaggcactgttttcagtatattattgtaattaattcaattcttacagaaacccttggtgaacacatggtagttattcttatttgcagatgaagaaatggccaaggagagcctgaaaaatgtgcctaggtcacatagcctttctcttgtttttgtttttttcctcttttaaaaaaatgttttttcctttatatccttgccagcaggaagtcatacacagcatttccatatgttgagttcctgctgttcagatgttggatatgtgggctgtcactgagttcatggctgttctctatcagtccttttttttttgctggggggagatggagtcttgctctgtcacctaggctggagtgcaatggtgtgatctcactgcaacctctgcctcctgggttcaagcgattctctcacctcaacctcccatatagctgggattacaggcgagcgccaccatgcctggctaatttttgtactttct

SEQ ID NO: 47788 - DNA, 1022 bp, Homo sapiens
cccatagccccagactcttcacggcctcccaggctccagcttgctcttgctctttgacccggaggattgcctggctcctctgtctccagggggcacaccgtacccagcctgcggccacgacagtcttcactctcaaggactccaggggccaccgaccaattcatggcctggcatttctgagacgtgtttaaagatagaacaaatgttgatgcttatgtttttttttggttgttgttttttgttttgtttttctagctttctttttaaaaagtgttttagtttttgtttttgttttttctttttaaaactaagctctgtgttcagcatggaaaccaggaaccaggctccaatcgcattgactgatttttctggttccttttcaggaatgaaagctctttctctgcctcactcggaagggcagggggcgtaagtgctcagcgcgatctctttgaggagagaggggaggagtacttgagtgcttttgacaagaaggcccaagcagactttgacagctgtatctcttctcaaagaataggccaggagcttttgtttccaccccaagaaaatgttcaggatgcaggtgctcctgggggtcacacccaaaacctcaggtgttccccattggagcctgactttgtcccagatgagaaaaagccagagtgtggcagttgggatgttagccaccagccagagaccgctgacacagcccatggtgttgagcgggagacaccccgggaggggacggcctttaacatctcctcctgggacaagaacgggagccccaacaaacagccatcctcggagcctgaatggactcccgagccccggagctccagcagccagcacccggagcagacgggcaggacccggaggtcgggacccatcaagaaaccagtcctgaaagccctcaaggtggaagacaaggagaaggagcttgagaagattaagcaggagctaggggaggagagtacccggctggccaaggagaaggagcagagccccacggcagaaaaggatgagga

SEQ ID NO: 47789 - DNA, 1034 bp, Homo sapiens
tgcggatcccggcgacctacagacagagactatgtcccagattcctacagacaccctgacgcatttggtggccggggctttgaggacagccgcgcggaggacaagagatccttcttccaagatgaacacgtggcagattctgaaaatgcagagaaccggcccttcaggagaaggcgccccccacgccaagataagccccctcgattccggcgcctccggcaagagcgggagtccctgggcctgtggggacccgaggaggagccccacctgctggcaggtcagtggccaggcaggcccaaactgtgttctggggacaagagtggcactgtgggccgcaggtcccctgagctctcctaccagaactcctccgatcacgccaatgaggagtgggagacggcctccgaaagcagcgacttcagcgagcggcgggagcggcgggaaggccctgggtccgagcccgactcccaggtggatggtggcctgtcgggggctagtttgggtgagaagaaggagctggccaagaggagcttctccagtcagagacccgtggttgacagacagagccgaaagctggagccgggagggtttggggagaagcccgttaggccaggtggtggtgacacctcccctcgctatgagagccaacagaatgggacgcctttgaaagtgaaaaggtaaaaccagacaccatctgggccctttttgttgttgtgttctgttctcagcagcactgagttcacgcatgcatgccgatgccgccgtgtgtcggggctgggggcctgcccccaggccgtctgtgcgcgtctccattgcctgcccccacattgcctgtctgcttctcgtggtggtgttattgtggctagagctcccacccccacccccaccccagtggtgctcttgaggccactgtccagcacctgacctgagagtccagtcatgtgtccctggagccccgccgaggggccgctgcagcgaggaacgttgcctgtgcacagtgccaggtgccggtcagtccaccagagtcctctgctccg

SEQ ID NO: 47790 - DNA, 1049 bp, Homo sapiens
atcactgttatgcagtggaagaaaccgagtcttgaagagggtgacttctctagggtgataacagtggaaacttgtccaaggcaagatgcagacctccgtcacctcccagcttctccttcctccccactcctcattcctgagtggaatgagatttgtctccctcaagtcaagtggatcgtgaacgctatactaaaatggagtcagggctggacctgcacacagattacagtccgttggcctttcaggtctttcttggggggtgctttgcttggcatcgcagttctgcttgaggttttgggagacgagcgttccacacatctctggagcattttcaggtggtgtgatttttggtacctgggatacttatcctggggagaatttgtcagtcttggtgcctttggctagactacagcatcctttcttcccctcaggtgcctgtcaaaggtcgaggcctttcctcccgtattcctcctcgatttgcaaaaaagcagaacaacttatgtctggagcaaggtgacgtgaccgtgcctggcagcagcctgggcactgagatctgggagagcagcagccagggtgagagttgggggtgtgaccccagctgtggcacccaaggtcacatcacacactgggtttgcttctggggaggatcctgcttttgagctacgaatatagatggaatacagatggagtacctgtttgctgtgttccgctgctgagctagtcgctgaatgccgtctgagtgatttgctgctgcaacccccaaacggatacacaattttccttgcctaaaattggtagaagagcagagcattcattagtctggtgatctggaaaaggatggccccttgggcttagatcacacagtagtgggaatggccttctttgttggtcgtcgttttctcccactaacttatggaagagaagcaaatgacagatagaccagccgcaagagttcaggagctctcttctgtgctgtgcacccttttcttaacatggggaaggctctggaaacccctccctgaatgctcttctggaaaggcaaactgaga

SEQ ID NO: 47791 - DNA, 1103 bp, Homo sapiens
ggtggcctggctgggggtggtggggaggagccagtgcagggcggaattggcttgctcatctatttctcattgtctgtctggttttccatccccctcacatgtggtgaccagcacctggcccgccacggcagccaggaggcatttgttaagcgaataatcgagacagggaagaggagtggagttggctgctccagactctgcttagttttcctttctcaaagttctccctcctgtgtcctagccggggaattagctaaaatggaattttctttggtgatcaggtatccttctgatgaagagaagaaaggcctaaactcccaggcatggatgcattagaaagaggtagtcttagaaatgagcaggcgttggttatttatgcaggactggcatactttctgtgctgccaaggggtgatttttggaagtctcccctctaatgctggtgctgggcctttgggatggtctagccgcccctcagacccatgtgcctccacagccacgacagtggacttccaggcagaatctgctccaagtgcaggcttgctgatggaggatgtggcctctgctgacctctttttaaaaacatgttcttaactgctgtattgtttggttaccaagattttggttcttgcataactgggtcagactgcatgtatctttctttttgtgcattgttaaattcagcgttatgtttttggaactcacctctgttgacgtatgtgctaggatccatttttgttgctgtgtagaattccagggtagggatatgctgtggtttggggttgctaccagtttttcattataggctttatcccaatagcaagggaagcccaggaatgacatgctggcatttgaattttgggcagtgttccagcagccatgtggagaggggcaggggaggtgggaggggaagaaccacctggatgggccttgcggttacctccccgaccccgttttcccgttcacaggccgccgctgcccagcagatcccgatctcccttcacacatctctgcaggcacaagctcagcttggactgaggggtgggcttcctgtgtcccagtcccaggagatcttcagctccttgcagcccttcaggtgagctc

SEQ ID NO: 47792 - DNA, 2009 bp, Homo sapiens
ctaagcactgcctgctcctgcagcccccagacgggggctccttcctttctccctgcccttgtgcagtagggtgtggaatgggttaagagtcctctttgtgtagttgttgatgcttctagactcctcttcttccttcctccctgaaacgccagctttgaagcccacaccatagactgtgcctgacaagcccttcactctgctatggtgccatcaccacatccagtgtctgctgagaaatcttcctctccgtcaacctgtgggcagtatttggcacctttgaaggtcaccctccttgtctggtctggcttgcagtctgtctccactctcctgttccagttcctagtggttttgatgtctgcagagatgaccccgggtctctgtgccatggaccctgtccatgcagtttgtgccctcctcgccactggtgcccttgttcacatgggcccctgctctgtgcactcctgtctaggcttggctgctcccagtagctgtggctctcgcataatctcaactctcagtgtccctctcagttgtcacctctggctttttcaattcactccctctagtgacccaactccaaaattcttttttttttttttttttgagatggagtttcgctctgttgcccaggctggagtgcagtggcgcaatctcggctcactgcaacctctctgtctcctgggttcaagcaattatcgtgcctcagcctcccgagtagctgggattacaggcgcccaccacccaccggctaatttttgtatttttagtagagatgggggtttcaccatgtcaggctgatctcgaactgctgacctcagtgagccacccaccttggcctcccaaagtgctgggattacaggtgttagccaccacacccagtctctgccacccatgtttttgtcatcctcccccttggcctggcttcttcctccccatcagcagatctgccgagccacatggcctttgcatttcatccaagctgtggctcccagtcaacccccaccctcctagcagcttttcagacttgcatcttgcccctcgctgcctcccacccatgacctccctttctgtgtcacccaggaaacaggagcagtgacagtctccaagcccctgtggccacatccctgcctaggtgctgcctgtgcccctggggggccctgccccagcacatctccctctctttcatgcatcagatatcccttcccgtcagtacacagacgagctgcagtgctgaccccgtaatcccgccccccacacccctcgaaccactttcttcacccagtttccaggccgtcgctcctggctttcctgctgcctcaggcctcctcctcagtctcctttgctgtcccctctccttcccagtctgtaatggtcagcatgcccgtgggccctgctttgggtgtgtttcaagagtcatggctctaaattccttcatcttctcctcactcccaaatggacatctttagctcagatctgtccctggaattgaatctcaaatccaatggactttccagcatgtctgctatggtgtcttatggcatctcaagactcatcatattcaaaactcgattttcctcccggtccttctgcttgtccagtccacatcctccttggctccctgctccccctcacctcacccccttacccttcagcaggcctgtcagctctggctttaaaaggattcagaatccagctgtgtctcatcccctccacacccctgcatgctgtccagctcctgtagggactcctacctggcctccctgcaagtcagatcataccccaagtcagcactctataaatggcagcatcttcccatcattttcatcctgcaccattttggtgctccaaggaggagcatggtgttttgcggctctggccaccacaagtctcagtgatgtaattccaatagatccttctgaccctccactgtggactcaatagcagggagatgaagaggacagtgactgagagaccaaaagtggcccagcccccctaccccatcctgttcc

SEQ ID NO: 47793 - DNA, 1008 bp, Homo sapiens
ctgtacaaaggaatgcagagatatacgtccgatgcagctttcatcttttgggacttggcttcgccattacttctgactttcctcactcgtcctctccttgcccaccccgccccgtgtgcacccataaatctggtgtgcacccacagatcctatgccgctctgcatcccgagtgtcctgcagctgtgtccagtgtgtgacacactatcctggcagtgtgcaggcccatgttggacagggccctgccgcttccttggcaccttgtatgctttcagtaagcacttgctggacaaaggcagaaagggctgaagatagacgcagcccttagcagagatgtggatgagacacacttaacgctgttagttcccatgcctgcagccagcttagtcttgcccgttttctcaccacctactctattccagcaagaagacgtgcctctgccatcgaaggtgtgaaatcctgggcgatctctcctgtgctgcagtagaaattagagcatgtcctgctttatgcaggctttgctttagttcttctgaagtgtatgaatctgaagtgcatgtgcggtcgctctttggtgcgtttggggtttctccatagcatcattccccctcctgactgtcattgtcgcccagcagctgaccatgccactgcctcggtacggctccgggcagcagccactgatcctgccccagtctattcagctgccacctgggcagagcctctccgttggggccccccgaaggattcctccgcccgggtcccagccgccagtcctgaacaccagcagagaggtaaggggaccccatctgcctctgaccctagggagggggccttgtgtcaccaactttttctagcaagctaagtacccctgtgtggtagaaagagccagtggcgtgggactgccagggcagaaaggaaggtgaccatgtgtggggccatcacagaggcaggtcctggggactctgaacatgtcgagggctgagggccaggaatcagcattcctccccagc

SEQ ID NO: 47794 - DNA, 1025 bp, Homo sapiens
agctgtactggtctgtgggaaaattgtcttccatgaaactgggccctggtgccaaaaaccactgctctataagatgcctccctgggaattcccatggccctcaccacctctgccctgggttgttcagtaagtgtgtggtccagctgtctccagggcctcaaatgacagcttgttcctgcttggtctctctagccctctcagatggagatgaaaggcttccactttgccgacagtaaacagaatgtcccttcaggaggccccgtgccatcgccacagacctacaggtaaagccactccctggggactgcgtgctgtgtagctgagcagttgccagagctgcggcccagtgactcagaagaatctgggcccagggagagccgccagagacctggtccctctatgggccatgtgtcactgtggtgtttcagcactgggatgcacttgtgttccagttaaatttgggggagtgaggagtcaggagagtggttttggttttaatcattataataagatgctctggattggggagctttctggaaaggtaggaaaaggaacggctgacatttagtaggcatcaggactgacgtgacttcccattagatcctaaaaacaggacccactggccacagggctgcatcctggcaaggggaggagcgtggcctttcccagcgtctctttcctcagacttgccctatgacccctgccaggggactttttattgctgggcttatggggccattccttccatgctacaaaccagcaccctctttttgcttcctttgtgtctgtctccacctccagcaactgtctcaggtccccttagctggatactcaggtggctctgtcggatgttggcgagagcctctggtccactgccttttctgcccgtgctggtgtgtgaaggcagcacgctctggccctgggctccgagggcttgtacagtccacccttgttacatgtgggagattcctgagacccctctgtgtttacaaatgagtgaaacagacctgcctgacccatggtgc

SEQ ID NO: 47795 - DNA, 3139 bp, Homo sapiens
gagctttccctgcaactcaggagcaggaagggagtggtgggaactatgtatccaaacacgtttcagcgtcagggtcactttgtttttcccattcatctgtccaaaggcaaaacaacgagtggatgagaaacccagcctgggagccgtgaagctgcaggaggccccctcggctgcctcccagatgaagcgaaccggagcgatcaagcctcgggctgtcaaagtggaggagagtaaggcctgacagtgcctggctgccacctcgcctctccctactgaggacggtgccgccatgcggcctcgacacagccgacactcgggagcctcaccagatccaccgtccaaatgcgtggcccagactgagagacctccctcctctccactcccgaaagctccgttgtcaaccagcttgcacccgtggatatatggcattgacccgcttgctttgatacgaaacaaaaaagcagacgactccttcatcccatctgctcctaccgtgactgtggagtgacgcctcctgtgcagtgcagatttgccctccctgcctcctccctgtcctgccgcgcagccagggcgccttctcagcagtgcttccggcccagccgcccatccctaggcacagtgatttggcagcagggtcattttactttgaggctttttgttttaaaatgtagccaaggtttttacaaaggggaaaggaaaagaaaacaaaaacgcaagctccatgtgtatagctgaacttttatatgtttcttgccagcccctccgctcccttccatctctagcctctgtcctgtttagtttgatacgtcactgcagtaccttaagaggtgactcttaagaatgcatcccctcctgattcctcagctggttcacccttgaggttatttgcaaaaagaaaaggaggttcttgagggcaccgattgcgagcattctggtgcctggctccccgcctgggaagcgatggggtgctcagagcagcaggcaggttgggggagggggggggtcatagttgggttccagctcctggcttgatgagcccagggcgcttacaggcagcccatgaagttgatgacagttttagcatgagaatcacacagggtccctgtcctgggctcctctaaagccagtggatgtgctgggcaccagagacaaatcatggagatggctgctggtggctcccaggttggcccagatggggtgagctgacataccacaggcccatcccaggccccgtgggctctgcttctggggctccataccctgccctgcaggggtgctgtgtttttcacacatttctttccctgaagccttctgtaacctgtcattttccttccttcctcttccggagcctgctgctttctctggacctgtctccacctcccacacagctcatcgtgaacaccacttggtgatggagggagtggacccgtgtgtggtccccaagtgaggccactgggagtttgtccttttcctcctttgcttcactcccagcagcagacccaggttgtcaggacaggagggcctgagctaagcagtaggcatcagtctcgtttgtcttcagacggcgggggcaggtccagggtgaggctgggtggagggctgaccaaggtccaaagggcctgcgcagcctccgggagggcagcttctccagccagaggcttgtgtgagccatcgtgtgctgggcttgtttttaagtaagaaacaaggaaatcactccagattctgtcattccaaggaaagggaaggggacagttcaggtttctcagctgttcttaggggtcactgagcgtctacctcctcctccagaggaggctggctcagaacacctagaggagggggccggggatgcaccccccaccagaggctgccttcagcgtctcacgggtgcaggacagcgctcaggcttgggctctaagctctgtgtctagtgtagaacatggggaaggagcatcttaggaactgctgaagtaacttcttactgctctcacaattctaaggaagcgggagaacggcctcctaccaacagcgcccaccccagagctgcctgggaaagggcagttttactgaaaggtgctttactgttcacctgcatctttcagcagctcccctcctgccctcacctggtcttttccctctttatcccaagcctttatgcttgagtcccttccccaggggctgcccacccgacagttccaggcattccctacctgagcttcttgtctgcttttccttctcccactgcaagcggctgcttgtggggcctgggatgagccctctctgtccccaccggccctccttgccaagccattcctgggtgagttcaggcctgcgggagccacacattcatctccacctggacacttgagccgcatggccagacccctcccacctgatgcggtggtgcgtgtgatttgtcaaaagaaagccttctggatgctgttaagatgtacccttcaggtgaacctggtatcagacccacagtacttgctgtttgagaaaaaataaaaacaaaaaggtcacctgttctccagcccttttctcttacctggtatttccttcctttctcctcccccaccccaaataaaaaaacaaaaaacactagaatttatttatatgtattgatgttgtaggtctaggtgaaaaaaaaagaagtaaatgtttcactgctctatttatatataatgtctgaattaattctgtgcaggaaaggccaggaaattgcatgtgaagttcggtgcagtcaccacctgtgtgtgacctgagctgcagtctcttcgctgagatgcaggttttaaatgagacttggggggctgagggcaggcctcaggcctcccagcgccccaacccctccttggtctaatgaaatgcagttcttagtgcagagatgttttaaggtgcaatatatctcttcctttcccgtggttttagagccaagctcaaggtagtaggacgtagggtcttattttgttttcaaacccccatcctcagagcgcagatacatgcagaggcttctgccaggataccacggggccttagtgggaacaggtggagaccagcacttccctttcctgctgctgaggtagggattggggggtcagaacccactcacttttgcctgttaaagttgccctcctgacgc

SEQ ID NO: 47796 - DNA, 1134 bp, Homo sapiens
gcctttgaagaccaaggataccaggatgtgtgcactctgtcgtgttctgtgatgaatgggaaacgtaggcttccagaaagccagctctcttctgaaatgtgacggacctaagcaggaagtcatccaggacaggagtggctcagtgttggggatggacgctgtcgcccagccatgctccaccagggccaccaatgtgtagttggctggtggtcttcgggcatgtgagacctgctcttcactgtttccaccccacttggtggcctccaggatggtagtggcaccctcagagccccatcttcagcatgttctgaagcctcagagtggaaattcctgctaaggctctgtgtggacgcctttctcccgtgatctaaaggggacactgtactcaagcttttgacctcatgccttgtgtagtaaaaaaggatttgggggttttgtttggttcctgagagggttgtgttttgtttttgtttccttttgtttatgttttggcctttcctctttgtctttccatgtagaccagatatttgaaagggcagacgatggctagaggtgtaatgtgcagcttgtttatacggtattttgggaaacttaccttggatgggaaatcgaatcgtggattcaccaggccggtgctggcacactcaccctcgccctttccctccggttcagtacctattgtttctcctttcaaatatgtgattgtactagctctttccatatgaaagaattctccttatttaaataaaaaaagtttaaaaagataaagctgaacgtgctttctcaggttgtacatccctcgtttcttggtcatttgaccagagagacctacagatcaaagaattctaattttacagagttcacacggaaattaggagtggcacggctgaaatgccttaacagaagctgtgtgggtagagaagggattgaaacccgtggctaagaagcatcttccaaatgcggcagcatcaagcactccaccctcttcccacggatggcatctggttgtgcacagtgcctgcctgtggccccgtcacttgccgtgagaaacgagctggtcagaggaggtaagcatttgatgtggcgtgttgtgttgtcacttctagcggtgcttttgcaggaagtggaggagga

SEQ ID NO: 47797 - DNA, 1030 bp, Homo sapiens
agcagtttcttggttatcttcacctctccctgattgaaaacatgttattgcagttgattcccacgttttcctttcatacttgcagccgtttcattgggtcatcgctagccacagacatgtgctgctggtgggggcgggggtgggggggttgggtaggtgggtaagcaggattagccttgcgtcccaggaggtctttcagcaggttggctcatagtatccacctaaatcaaacacaagggagagacagaatctgtatgggcaggcatgctgagtgccagctgtgcttggtgaattccccatgtctctgtgggtgggtgatgctgtatgcatcttaatatttggggatgggaaacaattggggcaaaagatccagcctttgctgatcactcactcaaagtcatttggaaacacatacacatttatcctcacagtttttgtttacagttaagattctaattgaatataatatgggttgttgtttttttttctagttttgacgaagtatattatgggcagtacatctctttttacatgaaacaaatcttcttcttggatgacagtgggccgccatttggccacatggtgctggccttgggaggtaggagtcatcaggagagtagcccctacccttcaggacctcaaatacatttaaaacttatcagtgcatttcttacaggcagaaaccaggtcttattattgatgcatcttgtttattgcttgccacagtactctagaaatatttgctgaatgggatagttactgattaatcttctgtttcaggttatttaggaggattcgatggcaattttttgtggaacagaattggagcaggtaaaagataattttcatttcccttttaatgtgcgcaggttagaatgaagagattgtgacttttgtaaggattaacaactgtggctttttttttcctttcatacctagtcccacagaaactgtgccttattaatctgagtccagaaaataataaattggttggatacaaatgaaagacttctggaaagtctggttaaaa

SEQ ID NO: 47798 - DNA, 1103 bp, Homo sapiens
agcctctgcgcctagtgctagatatcttttggtcctctaatattttgggggttggcccttggcttgtgacttcataaatacatcttcatttttctataatttaaactaacaggacaacattttctgggcaaaaagaaaaattctgctgggatggatactttgggagatgggaattctttcttactgcccctgtggctcagcatggccagccgacccagaaagatttctctgaagaatgtggagcttcactagccttttggaaatgtgtctgaactatttctgtctccatctgctttgtttttattccagccctttttctctgagctggtggttctggctaacactgacaggggtcgcttgttcctgtgcagtggggtgagtttgagcctctggtcttgggcagtgtcctcctccatctccttatgttttcctgtctcatgttaactccatttctgtcatgtctttgcagcatcaagtacatgggtgtgttcacgtacgtgctcgtgctgggtgttgcagctgtccatgcctggcacctgcttggagaccagactttgtccaatgtaggtgctgatgtccagtgctgcatgaggccggcctgtatggggcagatgcagatgtcacagggggtacttggtgaaaagactccaatcctcaatgttttagaagcaggcaggcctgggcagcctcgcctcttggcctctgcaggtgcctctgtatgggaggccagagtttctgtcactaactttttctaagctcacaatgtctagaggtgggtacgcttttccacgcagtggaacatgacttttctttgaatctctggcaggtctgtgtgttctgtcacttgctcgcccgagcagtggctttgctggtcatcccggtcgtcctgtacttactgttcttctacgtccacttgattctagtcttccgctctgggccccacgaccaaatcatgtccagtgccttccaggccagcttagaggtaagtaagcagtgggcatcgtggccactggagaaggaagatgatagtggacccagagttttcttacaaacacatcaagtgaacattagcacttgaatcaaaacatgaagaatccacatcc

SEQ ID NO: 47799 - DNA, 1865 bp, Homo sapiens
tggcttcaagcgattctcctacctcagcctcccaagtagctggtattacaagcacctgcaaccacacccagctaatttttttgttttgttggtagagatggggtttcaccatgttggtcagtctggtctggaactcctgacctcaagtgatccgcctgcctcggcctctcaaagtgctgggattataggcgtgagccaccgcgcctggcagctgggagcattttaaagtcaagtcttacaaaccctgggcagtttcacccgccttaaggaccacactcaactgtgaccttcattcctatgaacctcgcagcagtggtagaaggtatcagtagaggtggtcaggactgtggttcctgaagtcagccaagcctgccgacggccagtgctgtagtgctgtgtgtttcagcaagttgtttggctcaccctagtcttggttttctcatctcttagacagacatcatcattgctcttacctcattggatgcttgtaaggactgaatagggtgcgcgtggaaggctgaactgagtgcctggcccagaggcagcatttgatcagacttagtgctcattatggttctataatgtaacgtgatgtgattaaatgggagatcattaccactgttacaagaatggccaccagcctaaacatcaccccagagggaggagtggccatcgggaaggctggcttagggtcatttttctttctgtctctcactcatcaaccttctgcttctgtctcagggaggactagctcggatcactcagggtcagccactggaggtggcctttgggtcccaggtcactctgaggaacgtctttgggaaacctgtgccctgctggcttcattcccaccaggacacctaccccatgatgtaaggtgatggttttactttgaagataattaaatgctttatttgctcgtagatttgcttatcttagcaactttccctttctttgaggaagtttgtttgcaggacagaaagaagttgagcagcccgggtgctgattgccagtgagcttcgtggttcccgggtgttgctggagggacttggcgtgtggcagggcccagggtcggccccagctctgtggctgtggctgacctcagcactgcctgcctgaatcatctgatttcggctccttgtctgtggtatcttcattttccctgaaaccccttgctaggttgtatttgttgaaatctgcttccctttgcagaaactttaggagaaaggcgtgtgggcccgatcgatgacccacttccagatacgtttctttccctttcttttctttttctcataaatagacacagggtctcactatgttgcccaggctggtctcaaactcctgggctcaagcagttatcctacctcagcctcccaaagtgctctgattacaggcctgagccaccgcgcctggcccagatacatctctttgttgacttcacacagatatgagaacggccgaggcagctcccaccagcaacaggtgacctgttaccccttcaaagatgtcaataactggtggattgtaaaggatcccaggaggtgagtgcaggtcctgtgactccagagcagagctcacctcctggcctggccaggcgagaccctgggatgcagtcctgggcccccttctttccctccctcactgactctagtcaccgtcatggccttgaacaccagctcagtgctgagtccaaggtcagaggaatagatcatgagaccctcagtgagcagcctgctcagtagctgctctgagaagtttccaggcgagcctcaatgccccgacctgtgtccctctcccttcctcataaaaacaagaacccccctcctgcaaaagtagcatcatcttgcacacatcccagctagagg

SEQ ID NO: 47800 - DNA, 1040 bp, Homo sapiens
tttctggttctccctggaaagggcccagtagctgaggcatcacctgactccttcccctcccctcccattgcatgttgattccattgggagatcctgtttctcaaccttcagaaccagccctgggtaggggtccttccttctccctctactcccacctcctggggcctgacctctctacctcgcagcagcctgtccggcctgcggaccgtgcacaacccacttgcgttgttcctctgtgctcagtgactcccgtcacccgccaaggtccctggtgaccctgacacacttcacccccgccaccctggctccccccagccctgaaacaaccacctgcgggccccttgggggcttcacacttgctccctctgcgagaatgttcttggacttggctcccccatggcccctctatgtaggggtctgctgggatgtcactgcatccaaaagtgcctcctgggtgctgtcccccaccatttgttttattagtggcactcctacaggtgcacgctctgcccaccggcatgatggctgtttcccagagggctgtgagggccttgtcttgttcacagctgggtggctgctcctagacagtgccaggtgcatggtgcggtaccacatggttactgagtgtgtggattaagaggaagtgggtgttcctgaccgggcgtgctggctcacacctgtaatcccagcactttgggaggccaaggtgggcagatcatttgaggtcaggagttggagacaagctgggccaacatggtgaaaccccgtctctactaaaaatacaaaaattagccaggcatggtggcatgtgcctgtaatcccagctagacaggaggctgaggcaggagaatcgcttgaacccaggaggcagagattgcagtgagctgagatcgcgccatttgcactccagcctgggtgacagagtgagactccatctcaaaacaaaaaagaagtgggtgttcgttaacattgaggttgatagccttttctcccagcttatctgctgcgtccccaggccagctgggcgcaggggcgggcag

SEQ ID NO: 47801 - DNA, 1301 bp, Homo sapiens
gccggggacggcggcaccgggcgggtagggacaagactaccgcgcgtgcccccgcctggtggcagcccctctctgcgtccctcgcggcctggcaaaattacattcggccgagagttcacgctggggaagctctctgaatgcctctgagaagcgagatccggcgccatctcaccgacgagcctcccctttaccgccccgtgcgtttcctcagcactttaggaactaaagcctgtctgggtagctccctaacaggctctggagctcaatccctgggcagggaaaagggggtcctcggggctccccgctcgctgtcctttttctggacaggcagttccttggccacctggtagggccgcgttgcctggcaacggcggggtccttcttggctcggcggcgctcggggcctgaggggagaaaaccgccgcggagggcgctgggggtggcggcggcggtccgggaggtggtcgcgcgactgcgtggagcgccagggcgtccgacctctgcacctgagagaagatgaacacggccgaccaggcccgggtggggcccgcggacgacgggcctgcgccgtctggggaggaggagggagaggggggcggcgaggcgggcgggaaggagccagcagcggacgcggccccggggcccagcgctgcattccgcctcatggtgactcggcgggagccggccgtgaagctgcagtatgcggtgagcggcctggaaccgctggcttggtccgaggaccaccgcgtgtctgtgtccacggcccgcagcatcgctgtgctggagctcatctgcgacgtgcacaacccgggccaggacctggttatccaccgcacctcggtgcccgcaccgctcaacagctgtctcctcaaagtaagtcatcccccgccatccctggggtcttcccctgtccccctctcgcggccgcatcatccgtcccaggggaatccgatcccacactctgtccggggatttccctcttcgcaccgagcgctggggatttattaagcagccagggttaccacagcttaaaaaaaaaaaaagaaaagctctgcagctgtctgcaccctgtttccccaggtcacccgccgccgcaaacacaggtacacacccagggggcttcccggagttgagtcccaggaacccctccttcgcccctccgtcgggcccgcacatggagcgggttactcgatggtgctttctgagactccaccccctgtagatccaacccggggcctgcctctgtcgttgctgctattgtttggggccgactttccgaggttcttggctggctttgtcta

SEQ ID NO: 47802 - DNA, 1130 bp, Homo sapiens
ctcttcatgcaacacaattgagtcaggaatcacctctcccagtgtattgttttggtgggaatatgagcacaataatcgaaaaatgagtggccttattgtggggagtgcttttggacccataaaaattcttcctgtcaatctcaaagcagtcaaaggctatttcactttaaggcagcctgttatcttgtggaaagaaatggaccagttacctgtgcacagtatcaaatgtgtgccactttatcatccttaccagaagtgtagttgcagcttagtagtggctgcaagaggctcttatgtattttggtgtcttcttctgatctccaaagcagggctgaatgttcacaattcccatgtcacaggccttcactcactgccaattgtctccatgactgcagacaaacagaatggaacagtctatacttgctccagtgacggaaaggtgaggcagctgattcccattttcacagatgttgcattgaagtttgaacaccagttgattaaactctcagatgtgtttggctcagtgaggactcacgggatagcagtgagcccctgcggtgcatacctggccatcatcaccactgagggcatgatcaacggcctccaccctgttaacaaaaactaccaggtccaatttgttactctcaaaacctttgaagaggcagctgctcagctcctggaatcttcagttcaaaacctttttaagcaggtagatttaatagacctagtacgctggaagattttaaaagataaacatatccctcaatttttacaagaagctttggaaaaaaagattgaaagcagtggagtcacctatttttggcgttttaagcttttcctcctgaggattttatatcagtcaatgcagaaaaccccttcagaagccttgtggaaacccacccatgaggactcaaaaatcttactagtggattcgcctgggatgggcaatgctgacgatgaacagcaggaagaaggcacttcttccaaacaggtggtgaagcaaggcctgcaggagaggagcaaggaaggagatgtagaggagcccactgatgactcgctccccacgactggagatgctggaggccgtgagccaatggaagagaaactcctggaaatccaagggaaaatcg

SEQ ID NO: 47803 - DNA, 1026 bp, Homo sapiens
ggccgggcacagtggtcatgcctgtgaccccagcactttgggaggccagggtgtgaggatcgcttgagcccaggagttcaaggccagcctgagcaacatggtgagaccctgtctctacataaagtaaaaaaaaaaaaaaaaaaaaaaaattatcctggtgtggtggcacaggcctgtagtcctagctacttgggaggctgatgggggagccatgttctcaccactgcactctagccggggcaacagcgagaccctgtcttaaaaaggaaaaagaaaaaatagaggtatgtatgggaggaattctgagtagtttttgtcactgtatcattatcaggatgtttggcctgtctagaatagcagagtgagtttggtcatctttgctgttagggaccatatgttagaattcttaagactgaaaagaaaaaaggccaaaaattaatgggatttaaatttgtagaggatatacagaagaggtaagatagctggcttaccaacttctgagctagtaagacaccctttgaaacgtaagtgaactaattttagtgaattaatccaaaatcttgtggattcatccataagaggttaagcagaaatggattcgaaactagaagggcgctatcactagtaagagaagacaactcttgagggttgtgtatcccagcctccaaattacatatccagtgaagttttaaaaaaaaaaaaagaattggattcaagttttcttttcagacttttatttttaaacagtataatctttttttttttttttttttttttactgagatggagtctcactgtgtcaacccaggctgatgtgcagtggcgcaatctcggctcactgcaacctccactcacgggctcaggcagatccttctgcctcagcctcctgagtagctggaattacaggtatgtgccaccgtgcctggctactttttgtatttttagtagagacggggtttcaccatgttggccacctggtctcgaactcctgacctcaagtgatccacccgccttggcctcccaaag

SEQ ID NO: 47804 - DNA, 1133 bp, Homo sapiens
aaccgtgtctctactaaaaatacaaaaattagccaggcgtggtggtgcacacctgtaatcccagcactttgggaggccgaggcagacgggtcacttgaggccaggagttcgagaccagcctgggcaatatggcgagactccgtctctactacaaatacaaaagttagcctggcatggtggcgcatgcctgtaatctcagttactcaggaggctgaggcaggagcatcacttcaacccaggaggcagaagctgcagtcagccgaggtggcaccactgcacttcagcctgggcaagactggagactgcctcaaaaaaaaaagaaaaaaaatgttggtacttagatgataccatgacggcaacctccccacccccaccccgcattgataggtagtgcagaccagcccttggaggcacttctaaacagtctgctcagaaatgttttctgtttcctattcaaattgctgttttgtctcctatgtttaatcatgtatttgctattctgcttatttttctcatttggtggtaatttcaagaagagcgtttatccactattgattttcaagaaagaaaccaagcagcattgaaatcatgagtaacagaattcagaacattgtatggtggaagtcatttgtgtctgcagctgttttttcactttacaataaataagagtaaaaattgagatcatgtcaaaaaattattgcagttttaatcattatggcatagtttcacttcccctccccccattagaatcagtggagatttgttcttactagggaattttggactgctgccatttaaaacttaggtttttatttaaagcagttgtgcatttttgagaaaatgtattgggagtaactagagaggatctcccaaatttttttgtatgtctctctaggagtaaacatggcaacagtttttctagaacgtggactcactgcagggactggacccaatggcattgttaagaccctaaaatctagccaccacctgcctcccccaggtttccacacacccagttggaaggcctttccctgcccttgtccctgtctcacacccatggaggttaagctacagagctggggaaacaggagattttgagttaatggcagcctcacaaatagtgcttctgaatt

SEQ ID NO: 47805 - DNA, 1697 bp, Homo sapiens
ctaggtaagaaattgatagcttgttatgcttggtactcattctgaaatccctgtgtgtccaccaggcagacttcaagcaatctctacctactattatatctgccaaaactaccaattatttttcaatgtcagaagttattagagccactggcaaagctcatggttgaatatgacatttttctgcttttccctctaagaagtttttgagaatgttaatgttgaagtatgcaggctggacctaccagcaagtttaacacgttaattaggttaaaaagaatattaaaaggcaataattaaatatttcaattattttgtaattataatggtatcaaataagatgcaaaagaagttgatgcttattggtgcttaagagaattacaatactggttttatgagcatcttttctctgcaacagttaaactgcctcagagtttgtgaattgctgcaattcctggaatggaaacaggaattagggtcactggttgattggcacaggatctttccatcgtttctgctcctgacctctctctcttgcctttccttcccccagacaccctcttggtttccattcctttagttccctctgctttagaacacagattacatgttggaaagaaaaatggattaatggtaaaatttctaaaagctaaattgtacagtggggtctcacttcctagaagaaactattggtaatatttctttctaaaggtaatagtattaattgtatctggttttcttcaaaacttaactataatttccttgtcagggtgctcagtagctcttggtttgactttgggctaagggatgtgaaattttagctccttcccaccacctgtttcccctcactcccacccccagccaatattcttcataagcaaaaattatggttaagctaagctgaatgggttatattcaaagtaagtacagacggcaaataggcagacaaatacaggaatgtctttacaattagcccaccatggactgttttgagtctctgcatggtttccataattcattatgatgtatctttatgctctttcactgctcttctgtgcgttggagtttagcaattcagtgagactggggagtgtctcaagaatggaacctttgccttcaaggttgggtcatcaaaaatccctctaaaggatctaactgtaatgaactgtttttatttttgccattagtgcaagtatcaactggcagcctcaaacagctttagactatgtctcaggtctctcatagttatacttagaactgctctttcttgaagctaaaagaggtttttggagtaaagatctgcttcatgtctgctagcatggtatctgctgttcaacctagtatagagcatgtgaaatgcaactgtcctttaatggaattcagccaaactccaaaaatactgagttgcttctagttatctaaagtagtacagaatcactatcccgatgaagaagtggggtttttcagaagattgtaaactcatttccatggcacagatacaaatcatcgtcaggacttgttagccagtccatgtctcattgataggatgtagcctgccatctgcatagatggtttaacatggtgctgtttttgaaaacttgctgtggaaataaatttgacagacgagtagttatttgtaaagctgtcctagaaagaggttaattcttttggtatatgaatatttctcctccaatcctttt

SEQ ID NO: 47806 - DNA, 1054 bp, Homo sapiens
cctgagtggcggggtgagtagttttggtgggaaggatggttacagagcaggtgactcaggatgactaaggacagagcaggtgatagaagctaggaaggggttgtttactgaaactaggggcaaggaggcgtaaagaacgaggggttaaactttaaaatggagaacaaagaacagggaagctgaacatactgacatattggttctttgaaatggaactcataactcattgtatttattaattttccccctcttgaatttaaaggaaggtaaaaggctaaaatctttgaagtggaatttactgtgtcctataggctggtcttgaactcctgagctcaggtgatccacccgtcttggcctcccaaagtgctgggattataggcgtgagccaccgtgcccagcctggaatgggtttttatccctaaggcagtcagtccctgtttttgtgtcctgtccctgctggttggagttggaccacacaatctaagctaatctcaattggctattttaaatagaacaggggtgtgggttacagtgacgggacgagcgatttcggtgggaagactagtttcggcgggaagggcagttaaacagagcgggtaactaagggcaaggaggcacaaagaacaaggaagttagactttgaagatggagaacaaagaacaagggagttgaacaagctgaacctttgaagaagaattcactgtatagaacagtttccccctcttgattttcatacttctttctcttcaaacctttttagcatgtctcgactttgctgttcttggttttctaaaagtagaagtttgtctgaataaggcggggggaaattggaggttagtgagagctgtctccgtaagtctttgtattaaccctcaggcacagggtatgatacaacatcctacgagaataaacacgtttattacaatggcaagggacataaggatcgaggacataagtcctttccacctgccgaacaatcttcccgttagatcagtgaagagatcgtttatcccagaattttaagctagctcattggataaagcagtaagacctt

SEQ ID NO: 47807 - DNA, 1041 bp, Homo sapiens
aggggcagattcatgggtaagctcttggaagggcttaagctcactgcatcctgttaggtccccaaggaatgccaaattttccctgtcacaagagacacaaagtaaaattggcactgggagacagaagctggatagccctcaggggctgacccgcagggtgttgaacctcagggaacagcagagagagagctcggcacgatttatcaccccaggctgtggggtcctggaaaagagctaccgtacagcccatgcccactcgtctggaggaccatccaagtggaaaggggacagtctgggcttctggtctactgtgtgcacaagtgtaacaatcacttttgtttaaagtgcggacagaatatttaatccattccatccaggcgtttgcatctcagtaccctgtttcaattgctagagtttgctttaggtctcttacttctacagctgctactttggctgggtcgttgtggagaccggaggggaacactgggcctgatatgtttggggagagcgttgggtcccatacgttccctggactctgggtctgggtttcttcattgtttttaaccgccgatggtccagtcaaccttagagagggttcctatgggatcccgtcctgtaacatctgctcctaacccgtaccgtccgaatacagagggttcttgggccattgtttggggattatctataattagcaataaggggttacaccgcagtggcttacaatttggtggagtggagcgatggataagttagagtttttgtttgagtttccgcaacttatttaaaggaggggggttggctgtccgcctcccatattgactggtccaccaaacatttgcccagtcaccacaggggccctttaaggctccatacttatacttgtttgactgtctgcgatatggacatggatacttaactacatcggatagctgcctttgagcttgttcgtatctgcacggggtaagaacaagtgtcgaactgaagggtcaagggatggttagcctgagtcacattgatgacaagatgaccttatgttggaaa

SEQ ID NO: 47808 - DNA, 1026 bp, Homo sapiens
cctttgctgccttcccagtgaggggcgatcatgccacagcctgtgcggccttccttctcgaggcctctcctaggaggccgttatccttactctagaactacatggctgggtacggaaaggagagagcaaacactcactaagccctgcttttcccagaaaagatgtcagggcagcccatagggggacatagggtgacaaattagcagcagtgggtgagggataaggtcagagtgcaggagggcacagagagcagagcccggcacaaggctagtgccagccccatgccatgggcgccatggcctgctgcacgggcgggctcaccgtttccagtggccccaggagggcctgggtgctcctctgcctctcccagagcctcctggggagttggacattgttttttccccaactcctccgtggccttccagcctgtctgcccaacctgctcctggtgaccagccagctccctggagagaccccatgggagcctacatggagtctgcaacactggcagccccagggctctggctcaccttccctgtctctctccccctttgtcaccaggactctgtctacatcttccgggaaggggccttgccaccctatcggcagatgttctaccagttatgcgacttgaatgtggaagagtacgtatgggaggggccctgagacactgaggggggcccgtgggacccagggaccaaagcggtctctgaactcttccacttcacgtcggccttcatctccggcaagagcactcgcctgtctgggagtttggtgctgccgagagccctggcatgctggtggccctcgtagaggcggtgccctatagaaagccgtggctccaagctgcgcagagacagttcttactgttatgtccttgctcctcttccactgtccacataaaggccccatgaggtggttctcaatcccaggacccatcagatcccagaaaccttttatcgacttgttctcagtgatgtttaaagaattgcagggaaagggcactcactgggatgagaggagatg

SEQ ID NO: 47809 - DNA, 1025 bp, Homo sapiens
aggcaaaaagggaaacagttgagggcctataccttgtccaatctaattgaagaatgcacattcacttggagagcaaaatatttcttgatactgaattctagaaggaaggtgcctcacaatgttttgtggaggtgaagtataaattcagctgaaattgtggaacccatgaatccatgaatttggttctcagctttcccttccctgggtgtaagaagccccatctcttcatgtgaattccccagacacttccctgcccactgcccgggacctccctccaagtccggtctctgggctgatcggtccccagtgagcaccctgcctacttgggtggtctctcccctccaggagtgccaagacctacgcctacctgttttcccatccctctcggatgcccgtctaccccaaatgggtgggggccgaccatgcagatgacattcagtacgttttcgggaagcccttcgccacccccacgggctaccggccccaagacaggacagtctctaaggccatgatcgcctactggaccaactttgccaaaacagggtaagacgtgggttgagtgcagggcggagggccacagccgagaagggcctcccaccacgaggccttgttccctcatttgccagtggagggactttgggcaagtcacttaacctccccctgcatcggaatccatgtgtgtttgaggatgagagttactggcagagccccaagcccatgcacgtgcacagccagtgcccagtatgcagtgaggggcatggtgcccagggccagctcagagggcggggatggctcaggcgtgcaggtggagagcagggcttcagccccctgggagtccccagcccctgcacagcctcttctcactctgcagggaccccaacatgggcgactcggctgtgcccacacactgggaaccctacactacggaaaacagcggctacctggagatcaccaagaagatgggcagcagctccatgaagcggagcctgagaaccaacttcctgcgctactggaccctcacctat

SEQ ID NO: 47810 - DNA, 2938 bp, Homo sapiens
ccgaaaggaaagaaggccaagggaaagaaggtggctccggccccagctgtcgtgaagaagcaggaggctaagaaagtggtgaatcccctgtttgagaaaaggcctaagaattttggcattggtaagtaacaaacggcagaatgaaaacggtctatgtttttctcaagggaaggtggtaattgggttgtgttgtatcttgtaggttttagtgggtgtaaagtggtcgcagtccttaatttgtgtctcttagagacgggggcaatgatacatgcttcttgctttcattgggagttgctgagcgagcattcagctcaatatggtagtggccttgaattcagcttagccatctggaaacaagtacagtagcagtgtcgcagcgaggtactaggactgcaattctgctgtacttcgtggcaccttggcttcttgttagatgaggaaaagcatcgtgctctttgttctcaggtgtttgtgtgcagatgatgtaaaagaatatttgctatctgagagatggtgatgacattttaaaccaccaagatcgctgatgcaccaacacccttcctagtggccccagacatgaacttgacatggaatttgagcctcactcggtgtcaccctttacttctcaggacaggacatccagcccaaaagagacctcacccgctttgtgaaatggccccgctatatcaggttgcagcggcagagagccatcctctataagcggctgaaagtgcctcctgcgattaaccagttcacccaggccctggaccgccaaacaggtgaggttctgtggcgtggaaaggagtttctcaggcaaggattccttatttcatccagaacatgagggggatggtcttaggcttcttgaactgcagttgtcattaaattatagtcatatagcaggaccgcagtccagcatttgttattaagtgttaagtgacaaggattagaaccttgactccaagcctaaactgaagagtgtttttccagctactcagctgcttaagctggcccacaagtacagaccagagacaaagcaagagaagaagcagagactgttggcccgggccgagaagaaggctgctggcaaaggggacgtcccaacgaagagaccacctgtccttcgagcaggtgagtaggccccaccttagggtgaacactgggggcgggctgttgcagtgatgtaaaatttcttggcctgaaattactgtgaagagtaaaaccgagctttttaacactgagtcagcagctgagcccagcagcttcttgtgactagagcaggccctgtgagtgctcacaaagtggttgtgtgttctaggagttaacaccgtcaccaccttggtggagaacaagaaagctcagctggtggtgattgcacacgacgtggatcccatcgaggtgcgtttgcctgttgactgctaacccaagggcttctggcagtaccaggaagagagagtagacctaatgccaagtcagtgatgggaccgaagtgggtgagggcagtactgacacagatccaacacatgcgtggctcttgcaatgatgtgaatctctcactgaattcaaccttgaagtgcgaatccatgagctttttaaccctgagcaattgttacaagctaactgaaatttgctgcttttggtcaaaatacagtcttcagctaatgctttcttccagctggttgtcttcttgcctgccctgtgtcgtaaaatgggggtcccttactgcattatcaagggaaaggcaagactgggacgtctagtccacaggaagacctgcaccactgtcgccttcacacaggtgaactcgtaagtacacagcctggccccaaacttccccccagttcatttaatccatgcctcacagttgtttccttttgccttaaaggccaatcttttagtttaagaaatatatttatctgaacttttgccaatgatggttaagaatttcttcacctgaataaaccatgtggtcagcattgcatctgaggcaaaagactgtcttgagctaaaaggtatttttgcattctaaaagggaaactaaggcaaaaaacccacttttgtttcccctcctgccttttagggaagacaaaggcgctttggctaagctggtggaagctatcaggaccaattacaatgacagatacgatgaggtaagaggcagctttacaccaaaatactgtcattcacaaatctttctcccaaataactggctggcttaacctatgagaagttctatctgacgatcagcttggaacagccaaacagaattaacgcaactaataaccttgaaaatctcagaaaacagtaagccaagctaactgcctctttttgtcttttcagatccgccgtcactggggtggcaatgtcctgggtcctaagtctgtggctcgtatcgccaagctcgaaaaggcaaaggctaaagaacttgccactaaactgggttaaatgtacactgttgagttttctgtacataaaaataattgaaataatacaaattttccttcagccagtgtctgttgagtatctcgggttgaatcttacttggggttagcaagtatctttttgagacacagcctcactctgtcgcccaggctggagtgcagtggtgtgatgtcaaagcaaccttcgcctcccaggtttaggatattctggtgcctcagcatcccaactggctggcccatatttgtgtttttggtagagatggggtttcaccatgttagccaggctggtctgagctcctgaccgcacccggcccttcccacccttaaatacattcttaaaccaggcattttgttccctagagatgtaacttgcatatcaagttttgggaaagttctttggactgaaaccaagccaggattttatgatgaaccagtcatgagctcatttaaggtagaaggccagaactttataccagtagcacatgatccagcataaa

SEQ ID NO: 47811 - DNA, 1033 bp, Homo sapiens
gcccgatgtccaagccgcatggtagactgtccagggatgagtccaagacacagccaccagtctgaatccttgctgtgaactgtccctacaaatttggtctctctgctctgtaggcaccagttgttctgcaaactcaccctgcggcacatcaacaagtgcccagaacacgtgctgaggcacacccagggccggcggtaccagcgagctctgtgtaaatgtaagtcccagtggacccccatcagtgcatcgccatctgagtgcatgcccgccttgccccagatggagcgtgcttgaaggcaggtcgtccttcagcgatccgtgttgatgcatcaggcctgttttttggcacagtgaagagagggatgatggcccctgaccccacagcttttagtgcaggcaggcacagagccagaagcaggctcgggagtgagtgagtgtgcgtggcaatgcgaggtgtgaaagaaactgggcgagggatgtggggtgggcttgcggagacaggagggctggggagactcgctgagggattcgctcgaggctgaggctggagggatgtggtggcagtggggtcgggggaacagcaccccagggagaagccagggtccatggaagtctgaggcaaaaatgtgttggctgaggtaggctccaaaggactggctgggctagtgtgcacagcccggatgacccagagaccaggccaggagcactgcagtgggtgtgtggagagggttgggtgggggctgcatggacagtgtgcatggttgagaagggaggactccttgactgcggtcatccaggaaaagacggtgggttttggggggagaattcagagtccctttgaaggttttaagcttgagctgtattaggaaaggtgtgtattagggaagtatcgggcttttgaaacagggacacccgtgctggatgaaggagatggttgcaccgtggatctgggtgagcacccggcgagagtttagagaagggagagaggcctggtcctgagccccaggaagaggctggaagtcctcccgtggta

SEQ ID NO: 47812 - DNA, 1041 bp, Homo sapiens
gggcaacagagtgagacactgtctcaaaaaaaaaaaaaaaaaaagtatggacgttgtgcattctgtggcagctaccctcttctctcctgctcaagaaatcccactgagagggacacaagtgaatgagagggatggtagttacatttggaaaatctttgactttggtgtatatatgaggtcaaaaaccatttgcaaatgccagtgcttctatggagagcagagacttgagccctgcctccctctggcttgccccactgtgctggagaaccttggacccggtcccttctcccagccagggcagagccttggcaggtggtcctccagcctgcttttaattgcccccatgacaggggactcactgctgctggagccagccccatggcattgttcaatttttcccgaccagctaagatcagctccctttgtctgtggtgtggtggctgtgaggtccacgcatctctccttcttttcttctttctagaatatgtcacatttctgacagttacccccaacctgaccagtgtctacattgccaaccacaggcctctcttcacacacttgggtgagttgactggaggactcccacccagttagctagactgcaaaggtgcagagcactgttgccaagatgccctcacttctgacatcacccgcaagttcagggggttccccaaaccaccctcaggcttgatagttgactaggaagactcccagagctcactgagagctgtggcacatggctgcggctccttccagaagaacacaggttagaattgtccaagggaagagatgtaggcagagtctgggagggtccaaccaggaggcctgatgtctcagggatgtgacacccttctagcattggagcgtggccatacgcatggagtattgcccacacagaaagcccactgagtgggagttgagagtttttcctggggtttgagtgcaaagacatgattgactaattggccaggtggatactctcagtctcttggtgacccagcccctatcctaaatcacatagttggtctttctggtacagcc

SEQ ID NO: 47813 - DNA, 1049 bp, Homo sapiens
tccacctcagggactgagggactcaggaatcggcctgtggcatgcagtccaggagggcacactgaggtttggttgctcggcttcaggtggtcaggcttacctggatgaaaagcagtggctgctaggaggagccaggcagcatctggtctaggggccgccaattcatcaccgttcccgtaaccttggcccccgctttcctcaagatcaagtctccaaccttcctgttctctcaaaaggattgttccacagagacacctgagtgttcatgaaaatgccaagccttggcccggcgcggtggctcacgcctgtaatcctagcactttgggaggctgaggcgggcggattgcctgaggtcaggagttcgagactagcctgggcaacatggcgaaactccgtctctactaaaaatacaaaagattggccgggcgtagtggtacgcgcctgtaatcccggctaaactggaggctgaggcgcaagaattacttgaacccggaaggtggaggttgtagtgagcccagatcgtgcacctggactctttggactgtgtctcaaaaaaaaaacaaaaacaaaaaaaaaacacgccaagcctagaccccaccgacgtagaaacttggtgggtgtgttgggtcaagaaattgcattccccgccaccccccgacggagtttcactgtttggcccaggctggagtgcagtggcgcaatcttggttctgccttctggtttcaagtgattctcctgcctcagcctcccgagtagctgggattacagggaccgaccaccacacccggctaatttctgtatttttagtagggagggggtttctccatgctggtcaggctggtcttgaacttcctgacctcgtgatctgcccacctcagcctcccaaagtgctgagattacaggcgtcagccactgtgcccagccatcatattcttaaaagtcaagttaaggttgttttgtttgtttcttttacatgttcatgttttttgagcccaaaggttggggcaggttgggcttgagctgggaggggctggacaccttttttgtaa

SEQ ID NO: 47814 - DNA, 1039 bp, Homo sapiens
cagggcctgcccctcctctccccctctcttgtactgtactcggccctagatgcagcgtgatccatctttgcgcagggaatctttgctgcaggtgaaatggagcggtggccacacctgttctctgcaaagtgggtgttgtaatttctctgccttcctcttggatgaagactttgagacatgctttttaatgccttccatttcgcgttagtgttacaatcagcctgtgcaagatttcagttccaagctccaagctagaatttacagtgtgtaaactcattagattgatggtagtgctagcttctgggattccgatggccagtggtatttgcaagcatgtctcagtggctttcccttttaaaaatgctgtccctcctttccaagtaacctgttgtgcttttatgagatgtattgaagtaatgaatctattcccatggtagaggaaactagctgcttactgtacagatttgggataattttcattgtcaaggtgaaaccgattgaactgcagtcttttttcgttcccctgcagtgtgagtcctgctcgtagaatatcgttggtgtacttgaggctgcttttccagaaggcaggatgtggaaattccagcaggcagagctgcctctggcttgctctcatctctgtgttttgtggctcctcactgagtgcgcgagccctgtgagctgttagcatgctggaaggcagcctcgggccagcagcctgtgcatggaggcactggagcccccccatgaggcgtagaccactgggtgcccgtgcttgtgttttcaaacgtggctgtgaacgtgattgcgtcacttggggtgcattttaggatttggatgtgatcccaaatttctacaccctgaagctcagtcttctgtcatttggcgtgttagctttctgtcaggaaaccttttgctgttctttttttaatgtgtccagggctctttgaagaaaactgcattttgtttgcacaaactgctgcattcttacagacttctggataacaaaataagaagcacgcttgagggtggggtctttcat

SEQ ID NO: 47815 - DNA, 1059 bp, Homo sapiens
ggagtcggtccctctgtggtcttctactttgcttttttaggtgcatattttccagggtagctcactcctgtcctttaaataactggtaccacatcacagctgctgctccgtagctgtctccactccacagctgctgctctgtagctgtctccactgcagagaggtttgtggggctttgttttttttttttttttttttgaaacagaatctcactctgttgcccaggctggagtgcggtggtgcgatcttggcccactgcaagctctgcctcctgggttcaaggggttctcctgcctcagcctcccaagtacctgggattacaggtgcccactaccacgactggctaatttttgtatttttagtagagacagggtttcaccatgttggccaggctggtctcaatctcctaacctcaagtgatccgcccgcctggtcctcccaaagtgctgggattacaggcgtgagccgctgcgcctggcctggggcacctttgatgtctgcgcacatctatgcccttggattgctggtgtgggcctgctgtgtgagcaaggactctgccagtcgcctctcagtgagtgcttatgtgtaattctcactttgacaaaaaggagtgcagtgagcatcctgtttgcatctgtggccgtttgtgcgggatggctttggaggggaaatgcagtagtcaggatatgtgtttagctttttgacaggtacattttggagctttagagacttagaggcatgtggccccctgctcactgcctcccatccctgtcccctctctggccagggtttgccctctctggctagggctcctcggctgagggccgctgccgacccccatcatccacagccctcgcgccctccttgcacccgggacctgtgtttttcctgccctggagcttctgctactgcttgtctgcccaagtcgactccgcagagcacttggagtgctccttggctaggggccttgccatcccctgctgggttctggctgattaccttctctgtttctttctttcttttttttttttttgttttttaatatttatttatttattt

SEQ ID NO: 47816 - DNA, 1065 bp, Homo sapiens
gtggctgtgggactttaggtgggtgcagcccgtcccacgtcacggcgagctctgtttcctgggctggggacagtgaggtcatcgctgccccatcctggaggctctggctcctttcgggtacctgttccctctcccagagagaccccccagctgcatgcaggcctagtgggctccacggcggagctggttcccaggctacctggggttgccacctctgtgggtcccggctgccctctgcagccgccgctacttcctcaccctctggccctgcatttccacgtctcatggagccaacgagagcagggggttcgagcccttgtggaaatctggggaggcactgcttctccctccctgtgagcagcttcacccagcctggggtcagtgcttacgctccacggcgggcctgggccttcccctgggtcctcgccggcgttctggggttctttggtttacgtagaagctgtaaacactttgatgtggccgaccttgcaccaccagtctgttagttctgacctccctgcttgggtggtggacttgtccttgctgtgacagagccagccctgtggggtgctctggggcttagcattggggggaggcggtgggagtgggcggctcagggtccgaggagaagagggacattgtcgataaaggactgaggactgtgaggggtctgactgcagtccttgtgcgcgccagcctctgagccagtcctgctgccgcgctcctccttgtgggcgccgagctgctgttggtgggggcgtgtggggctcctggtctgcaggcagggctggcactccctgtggcctcctgcccctgtcccccaaccggctgtgtcgccctggtaccggctgctgtcccctcgctcccctcccctgggctccctgtgtcgaaggtgggcagtgggtgcttgtcctgtgacctcccaggtggcgggcaggcgctacccgcgtttctggagaaaggtggagctcagtctgggatggcgtccccgacccaggcgcagggatggctctggttctgactgtgtctttgttttcagatgtcgtgatctcaacagcttgtcac

SEQ ID NO: 47817 - DNA, 1050 bp, Homo sapiens
cagaccacaccagaccccatgcgcctgtggagagacccggtggcaaagctgtaggcccgctgaccactcttggagttggggcacttgggggcctgggtgagcttgcagcctgtgtgaggggcttctggtaacatcagagcccttgggacccaaaatagagcacattccggggcctcccgaaataacagggtcatgtgactctcaggaggctgggcttggagtcccgctcgggcctgacgagggcgtcttttagcgcgggcgctgcccgacggcagggtgtttgttttggtaaactctggaggggccctgtttgttgactggggaggtgtcagggagagaaaaatggcccagtccgatggtggccctggcttgctagcctccaaccttgcctagggctggctgctgggcctggacccgagcatgcagctgtgaccctctgcccagatgtggatgggacgagctgggcccctaggaagggctggtggggggcgggtgctctgagtcccttggggtgtggggtgcaggttgagccggcagccctggtcacgcgggcagctgctgtgactggctcccggctctgccagcacctggtggttcttccagctgtgcctgtccttcagggcctgtggggggctcacctccaccaggaggcccctctgactgccctctcttggcccctgccccatctcccccgtggctgtgtgggaggtcgctgtcagtggtctttgtttcctcccctgggaaagggtgcctgcaggatttgctgtggaattactgtgggaacagggggtactcaggggtgtgcccctctgcccctggggcctggtcgtgcatgtggcagggggctctggcatcaggagagggtgggacagacctcagctgcatggaaggtggtgtgggggcggggtgaaagctttacaggtccacccagtgccagtggaggctgcctggggagtttcctttcttgggtgacgtttggttttgccatgggtcaaatgtttcagggctgggacctcgagtggtgagcaatgcctgtcctctggagaagag

SEQ ID NO: 47818 - DNA, 1057 bp, Homo sapiens
ggactttatttttgggaccttgtggaggtgtcacagagacaagcccacttagtggatggggacactgaaccctgggtgaggtctgtgggccagcctttgtgtcccgctgtggggcctgctttttctccggcacttgactggcgggggccgccttgagctccagctgggaggacctgtccccagggtgggggctctgctgcccctggtcctcctgcctctcagcatcctcagaggctgctcaccgaccaggctgggtctatgccccatgctggttcccaggagccccattgctggtcttggcccgagtgagtgaggtttttgttcagtggggaccctggtggagggctgaggtctcaccatgccagctctgtgccctgggactgggcatcttggcctcttgtgctggttgaaggccctctaaggagtggcgaccccttgatcctcactccagggttgtccttggcttggggtggtggctaggagaagtccccactcccaggtggaaagctgtagttgggtgagcagcagaggcccagcctggaactgtggcttgcccacctcctcatgccaccagggcagcactgtctgcagcaaattcctgaggtacctgggggagtggacggagtgagattggacccccgggtcccagggcagggcagggtaggggcacagttctttctgaggtcctaacccagcacacgcggcccaccccatgcatgcaggcgtccgccgcagccttcccagggtgacctggcagagccttgacaaccctggctggggaggcggggattgctggtgggcttgtccacacgtggcttagggagcgcccgctgggtgctggcctggtcctgctgcctgtggaggaggggtgggggaggggtgcccagaggtagggacagcaaggtctggcctggagggggtgaagagggtgaggacgcaagggtggggttgcagggctggaaccaggagggggttcacgtgtgaggtgaggctgggtagggcctgtgtgccgggcgtaggtgcatgggtgcccggagactgggggatcccagtgtgg

SEQ ID NO: 47819 - DNA, 1005 bp, Homo sapiens
gtaagggccaggcccagggctgagaggggctggtggagatggtgggggctgggtggggcaggacaccatggtctatgtggcgcccgcccttctccctcctccatggccacaaggcccctctggtacagagggtggtgctggccttgagggatctggccggcaggtaggcaagtgaatgacagagcccctcaggtggacttgggggtggggcctcctggttctgcctattttcttcagcggccctggttagggctttgaaggggcttcactgcaaattagccccgacctccccggggtgcccagcaggggcgcactgcaccttaggtgctccgtcgtgaagtggccacaaggtgcctttggtgtgtggggcccacaggatgagttggatgcagcctcccggtgggggctgctcaggtggtgatgaaaactgtacctgtgggcaggtgaagccaccgctccctcggtgtagcagtcagtgtgccctccccacgtctcctcctctccttctgtccctggacccaggagtttgggagaggccagcgggccagctgggcactttggtctctgtaatgaggaccctcccaccccaccaagatgcacacatgccctgccaggatgtgggggggcgcagggcagtgggctgagccaaggtgtagatgctgggaggtaaggttaccctccccctgggctggcgtctgcctccccgcctgctgctgcccctgtggccggccgcatgtggggaggaaggaagaggtttgggtggtgtgtgtgtgtgtgtgtgtgtgtgcgcttttgactgggctcggagggctctggctgggacccaagctcaggcctttagcaccttggctgggaggagtgaggcctggggagacagtgggggccaggagctgggtgctgaggagaccagagctgggggctggggcggggccagggcagctggtaggaagtcctgcccttgcagccggtcctgcgagaaagcccctggctgctgtcttggctttg

SEQ ID NO: 47820 - DNA, 1040 bp, Homo sapiens
cctcctcggagagtcacatccgccacctggccggtcctgtcgtggacgccctcagctcgctcccgtcccctgcccctctggatggcacagactgcacgttgttgccatttcacggaacccgttttcccggatttgtcaggaggggagagaatggtggaaatgcagttttgctgggttccctgcacacgtgggcgctggctttggtcacccccggggggttgctcgtgggatccagagaagtggacgttggtgaggccaagcaggctgggaagggtgctggacagggacagcagaggcctggccccagggggttagggggccagggcttgggcgcctctgtcccgggctgggggctttggactttgggggtataatggggagccctgggacagcagagggctagccccagagggctagcggggccagggcttgggcatctctatcctaggcctggggctttggattttgggggtgtaatagggagccctgggaagttctgatggtgacagagtggacattctgccaagtgaccagtggaggggacagtggtggagagggtgtgctgagctggccttagcctggcctgggcaaggtctggacttggccatgtctggctctgcctgtacagagggggctggcagacgttcctgcgggaggcactctgtggatggggtcacccagagtctggacagagactccatagctgcagctggcctctccatccctccccttccttccgaggcccctgggggctgccggctaggctgggagttaccgtgcgtgctagctgcagccccgtctcaggttcttggggctgggcaccgaggagcagagaagctgcctgccacctgttcaccctcgcatctgcaggccagcggctcgtcccctcctgctgccacagtaccctgatatgtgccgattggtgggattgggaggggacacagcgaggccttgggtcagagccttgatgaggatgggggtggccgtcctgggggcagcaggccggagcctgcgcttgcctgcattccccggcaggattt

SEQ ID NO: 47821 - DNA, 1050 bp, Homo sapiens
gactccgcttctttccacggggactctgccaggactggggcttgactcccgccctcccaccctcctagcctctgccccaggcagcagatgggtggtctgctcacgatgccccggggggaatggccgtacaggggcacaggtcagcttaccgagtgtctccggccttgtggctggaaagcagctctcaggactctccggggccccttggcatctttctaggtgggtggccctgagcccacctcctccctgtacccccatggcaggagctcctttttgggaaccagtggagcgagcgtggctggacaggcctggccccagagctgcgcgatttccatcacggctctcctctggcttcctccttggcgctggctgggccaagccctcctgacttctgggtccctgggatgggtgggtgactccgtccatgaggctacctgaattctcgcttaccctagccatctttaggctgggggatgtgggtgcttcctggtaaaatcagatgccctgtagctctcctaaaagggccagcctcagatttgcggtccctggtcctggcccctgggttcaggacttcattttggccgtgcgggttgcaccttggggatgggcgtcccttgaggtttgtgccagtcgtgggagtggaggagtagcggctgcgttgggaacccgtccctgggcaggcactctgggatggggctccgagtcccacagtcactggccggtcattgccagcccctcagccctctagggacagaccctgcctgctcgtccctgttaggggccagttctgcaggtggttacttggcttcttcttaaaaaaaaaaaacccatcctgccctgggaaacccgggaatcatggggaagcgggaaatgacagtagggaattgacatttcctgagccagcgtctggggcatcggaccaagtgcagggcgagctgggcagggaggggtgcagccggctctgccgtcagcctaaagccatgagcgacctgggcgctcttctccctgtagcactggggcacacacagggtggtgaagggggcatgacac

SEQ ID NO: 47822 - DNA, 1045 bp, Homo sapiens
cgagccctggagggctgggcagggccttgtcccctggtgcctcccggagcccagcacggggcagggccagctgggcacttagtttggacgagctctgtccctccaggggcttcactttcgccttctgcagcgtgggggatcatgtgtgaccttggccagcccctgacctccctgagccgcagcctctgcatctgggacacccagggtttcccatgcagggagtgtcaagtgtgggtgcaaagcccaggcaccgcacccctctgcagacgtctggggctttctcttgccccttcagttccctcccttctctgagaagcgcacctgctgcctgtggacatgaacactgggcatttggtgagtcacacagtggccacccgcttctccagtgggagcttcatggcacccccactgtgctgagttgtcacgggggacctcctggcctctcgcagcccacctgagtcctgcagggaccaagcatccttgtaaagcctcacagcccacctgggcagatcgaggaagaacctagaagccagaacaagctggggctggaagactcattccaggcaccgaggtccatgtgaaaggaggctttgcggtggtttctgctttgcttgcattgagcctcaaactcttcctgtcccgtgagaaggggggatgggatttggaggcctgaggaaggaaggaggggagcttcctgcgcacaagcggcggcaggggtttgcagaagtggaggctgggggctgcctggccaagcgcttaccgccctgcgcagccaggctggctggcaggctgcagcgggaagcgcctgtgggtcctcggcgctgactgcagagctgggtggaggcagcggaaccaaaactgctgtgtcactgcacgctgcagctgttgccagggtgaccgggtgagtttcccacgcttgcccgggcggcagcgtgcgggccggcgggtggggcggaggggtgtgcagagaggccagtggtgtcgtgccacccgatgcccgggggtgtccactcccctctcctgggtcacgtgaccagggcccctg

SEQ ID NO: 47823 - DNA, 1023 bp, Homo sapiens
tgggcagctccgcccactggccttggtgtcaagtggtccctcggcccggtttgtgatcagacccctagaaacaggctggagctgaggcgtcgcatcccagtgcagtgctgcgagggagtcgcctggggttggtcccagggctggctgaaggcaggatggcccaggtgcccccatgcggtgactctgcccccggcaaaggcccactctggctctggggcagatgggttcccacccctatgcggtaggataccacaggctgatagcatctcaggttgggcaatggggcctgcacgcgcaggcagccaccaggagggactcgttccgcagcattcccgggaccaggggtgggcagaggtggggggacgtgcagtggtgggtgttggccctctgccaagctgagcctgggcctgtttgctgaagccggggagggggcaggggttgggggtcccgcagggacacgtgctctgatggggaagacaggcctcacccttgggggttcccagtccgatggaaaagacctagcttccacccagggtcgtcgggggagacattggtctagagggggcagtggctgtcccccattctgcttcctcctcctccctcaggaaggctgcttcccatttccttcctgcctgcctttgcttcctgtgcccaccctccagctctgaaggactgggtgtggaaacagcagggtctggcgtgtgtgcacctatgtgtgcacgtgtgtgcatgtgcgtgcactgcagggatgtggctgacccacaggtctctgctgtgggaagggagccccggctgggctcgagtgtggccctcttgccttctggcctgtgaactgggcaagtgaccttgcctcgcccagtcctcaggttcctcatctgtgatgggctgggggcatcaggaagacccctgcgagcttgggggtggatgagagtgctgtgcgtggctggtggtggggttggagagcagtggtcacgtgtgggtgtgggtgtggtatgtctgtgtggtgtatgggtgtgcgtgtgg

SEQ ID NO: 47824 - DNA, 1050 bp, Homo sapiens
cggagcacgagtgttcccacctgtccctccccaggctgcctaagcatccacgcctctgcagccacgctggcccagatgggcaggaggtgcacccagagggccaaggaacacacgatgtcacccagctgccccaataacaacaagttaatgatgccccatctgcattgtctcctgtgataaacgccctctgtctccatgctgtctggggctgggctgctcccggcctggtttggtcttcgtgcccggagccctctcatgcacctgtgtccagccaggcaccctccccgagaggcaccagacacactgaagatggggagtggggctctgaaggtccaggtcctgccctgtggtggtgggcagaggacagtgtggcctgtgcccagagctagggtggctcccgggtgagacttaaaatggaacggcctgccacctgaaaggcagggacttcctgatggcactcccctcatgagcacacacacattcacacacgtgcatactcaaacacgggcacggacacgctcacatggaccctcgcacccattcatacgcatgcacacaccacgtgctcacacagatgctttggcatgcacacccatgcagaactgctcccgtgcacacacccatcgctgcccttgcacacacccatgcatgctcccatgcacacacacccatacaggctcagttgcacacacccatacacgctcccgtgcacacacccatacacgctttcatatgcacatacatccatattcccatgcacacacacccatacacactcccatgcacacacacccatacatgctcccgtgcacacacacactcatgaacatacacacttgcactcagccctggaaggatcgacagaacagtgggggtcttgggtgcggggctgagccagcctcccttggtggagtcaggaccccacaccaacattctccctcttcctgggaacggcggctgtgcggctgtgctctgaaactctgggccactccctgggcccccaaccatggctgaatggtgggtgccacaggagtctcgactcactttgcc

SEQ ID NO: 47825 - DNA, 1059 bp, Homo sapiens
gtacagtttgtggagagagaggtgaagggagcaaaggcctcgggacatttctagagtgaagggacagctggcaggagctgcatgaatggcgccaagtgcactatgctgtaggaccccatgcagggtctgccagggtgttcatcacggtcagttagtggcaatggctgggtgagtccaggagtctttctcacgtgggccccttaaggccgcaggtcttacccagagccccgattattggtggcctatggataaagagcccctcctgtggattttctggttgttagttctggttgaggggtgcggtctgaggcatcaggcttcttgatagggccccgcttccagtcttttagatgggccctagggctcctggaagagtgtctgtctagctcttggaaggggctcagtaggaaccctctcaatgaacgaacgaatggtgggttcatttctttgggatcctcggacaattgatgaccaacttggggtttaaagcaacaggaatgtcttctctcttagttctggaggccagaaatctgaaatcaaggtgtaggcagggccgcaccccctctggaggctccaggtgagggtcttcctcacctcttctggctcctggtggccactggccgtcctctgcccttgtagcttgccggcgcatctctgcagtctctgcctctgtcttcacccagccctcccctgtgtctctgtcactgcctcccctcctcttcccttacaaggactcatcattggatttaggacccaagatctcatctcaagatcctcactcccatcctcaaagaccccaagtaagggcacagtcacgtgtttcaggacctggatgtacctttgatgagagacccttcagcccaccgcgcgtggtcatgcacgtacgtgttctgcacagccaggagatgtccagcaggaagtgaccactgagagcttctcccagccactcccgagctgggcctgcccagggtcgggcctggacagaaccacatgcacacaaaggttctggagagacgcctgcacactgccctcctgctccagctctttccgagagtggaa

SEQ ID NO: 47826 - DNA, 2031 bp, Homo sapiens
tctggctggccacctgagaccacaaggcggggaggtgccagaaagacctgagcaacccgctgggcccctctctttttctcctctgtcttccaagtaagaccaagggacggggttgaccaggttcgaccaggcttacccaggagcaaggtcgggatcagaacctggctccagccctctgtttcctgaaaaggtccctgtgcttccaggtctttcctggggctgctgggctcccggctccccacctcggtgtcacagaaggcacttgggagcaggggtgggcgggaactgcgctctgcctgtctctgctgccaccggtgggagacgcagcgtcgctcctcctccctgccgtagatttcaacgacaagattttgaatgagcccctcaagcactctgacttcttcaatgtcaaggaactgttttccgtgagaagcctcttcgatgcccgagtccatctgggacacaaagctggctgtcggcacaggtaggtgacacccccatctgagcccggggcggttcccaggaggaacctgggacctgctctggttctagggccacttttgaactggcctatgtcagttttaggtgattacagccccatcctcctccacatgggaatacagagccccacagagaagcaggagtttattcctcagcttggcggacgctcttgtgtgccttggtgtggcgctcacagcccttgatagggcaggcctgctgggggttgcaggactccacgggttcagaaatggaaaggctgagggcagaacctgtaaggttggtccccccggatcgggctgggccttctgggctgcggggaggaggaatgactggtcctgtattctcacatggtcattttgactgctgtggggggaggggatgggaggggcaggtgggaggccagggaggaggttggtgtgggcgttcagggtgaaggtggcggggcttaaatcgcagtagcggaagagctggagcagcaggtggacatgaggcagcagggcagagccagtgggccttgggctggggtgggaggtggctggggccgaagggatcaaacacctgctcttcgggtggagcctggtactggttactgagatggtgaaaaccaggggagacctgggggacatcacaagcttggttcctaccaggtatgaaccctttgctgccccagtggagaggtcacacggttaccaggagggatgggcctgggcccagggagccatcagcatcgggggctggcaggtgtttccagagcatcggaaaaggaggtccaaggtggagccctgggtgctccagtgtttggagtcagtgaagagggacagccgggggtaggggagatgtggttctctgttgatgctgctgagaagtgaattcaaggctgtgaccttggcaagatggaggtcgccagtgccttgatgggcagggttgcttgagaggaagggacagaacccagtgggagtagactggaggtgaggacctgggaaccgcaaatgtggatgactcgcctgtcacgcaccgagaggcgggggtgtctcccatgccccgcttttctcagcccaggccagcagtggtccagtgctttggatcagggttccccgcccaggcttggccactcctgccctgatcccttaatgcttttggcccagagcaccccgctaagtccaaccccagaggggcctcatccgcaaagcctcgggaagaggacagtgacggaggcggctgccctgtgagctgcacggggcagaatgtccttttggcgtcatgttggatgtccacacatccatatggggtcagttctattaggattccttcgggaagaggtagagggtaggaggggttaagccacgagacgaggcatgcagaggggtggcctggatgggtctgcactgctgtccatgcacacggggagcgttgcaaattgtgcttcccagcccatagtgcccccacagaggagcccgggagtccctggtgggcgtctgtgttcctgcaaggagccagtggagatggccccgtgaactctcatcccccttgcct

SEQ ID NO: 47827 - DNA, 1013 bp, Homo sapiens
actgaaggagggctgggctgggctgggatgggagcctggctggttttcccctggtggccctatgactggttaagggcagggcagaggcacggcaggttggaggcacagaaggcccaagatagttatctgggctggatgtggggcggtattctcgcctctctggggacatcccttaagtggacaggaagactgggtggttcaggtgtatgtccactcaccaagaacacaggatgaaggtggggcctagacagtggctgttttgaccagggcagaacagttgagggcatgtgagagggcccatgctgacgccagacctcagtggggagaggggagagtccagggaccagaggtccccctaggcttaaaggacaaaccacaaggagaagaggaagaagtctctatgtcattaaagtttcattatcagggctgctataatgcttctcattgcttattataaaacccaattctgcaagaccagcctagccaacatggtgaaactctgtctactaaaaatacaaaaattagctgggcgtggtggcatgtgcctgtaatctcagctactcaggaggctgaggcaggagaattgcttaaacctgggaggcagaggttgcagtgagccaagatcgtgccactgtactccagcctgggagacagagggagactccatctcaaaaacgaaacaaaacaaaaaaaaaaactaattctggcccagcgtggtagttcacacctgtaatctcagcactttgggaggccaaggcagaaggatcgcttgagcgcaggagttcaagaccattctgggcaacaaaataagaccccacctctacaaaaaataaaaaaaatagaaggaagcaatagtgtgcacctggggtcccagctactcaggaggctgaggtaggaggatcacttgagcccagaaggtcgaggctacagtgagccgggattgtgccactgtacttcagcctgggtgacaaaacaagaccctctgactcaaaaaaaagaaaaagagaaaaata

SEQ ID NO: 47828 - DNA, 1056 bp, Homo sapiens
gaaaccccatctctacaaaaaaacacaaaaattagccaggcatggtggctcattcctatagtcccagctgcttgcagagctgaggcaagaggatcgcttgagcccaggaggcagaggttgcagtgagccgagattgtgctactgcactccagcctgggtgacagagtgagactgtctcaaaaaaaaaacaaaacaaaagagtagaaagacaacctacaaaatgggagaaaatatttgcaaatattgtatctgaaaagggattaatatccaagactcctaaaactcaaaaatagaaaaccaaacaacgtggttaaaaaatgagcaacagacttgcatagacgcttctccaaaaaagatacacagatggccaagaagcacatgaaaagatgctcaacatcactagtcagtagggaaatgcaaaccaaaaaccacgagagaccccctcccagccactggaatggctgctaccaaaaaactagaaaatagcaagtaccagggaggatgtagagaaacgagaagccctgtgcactgttgctgggaatgtaaaatggtgcagccactgtgaaaaacagcatggaagttcctcagacaattaaacagaattaccatgggaccctgtaattgaaagcagggtctccaaggggtgtttggacaccccagttcacggcagcttattccacttgggtggaaacagctgaagtgtctgtggacagatggataaggaaaatgcggcctcaccacacaagaaaatactactcagccctaaaaaggaagaaaactctgacccacactacaatacggatgagccttgagaacattatgcagagtgaaatgagccagtcatgaaaggacacatcctgtagtcccactcattggcagtccccagagtcatcagattcatagagacaagaagtagaaaggtggctgccgggctggggaggggacggaagtgagtgtttcatggggacagagtgggcagatggagagttctgtggagggagggaggtgatggtcccgcattgctgtgactgcttaatgccagtgacctgcgcacct

SEQ ID NO: 47829 - DNA, 1088 bp, Homo sapiens
ctttacaatctctgcaggatctctcagtgagcatagctaccccaagcccctgagaatcgtgaatcccagagacagatgcctggagctgcttccagccctggggcaggcctcaaggggctacccactaggacccgtggccctccagggatgggaatgattgttttaatcacttttattttctaaatattaaagacattcttccttagtgaaggatatttggaaagcattgaaaagtgtttagaagatagcggataagcagaaatcaattccccaatttctgtgtgcctatacgtatgtacaccaacatatatttgcaccttttaaagcaaaccctgcatccctactgaattccaggcccgtgctactgagtatgtacaccttaccgcatttaacgttcacaacagtaccatgaggtgagctctgtttattcctttttttttttttttttttgagtccgagtctcacactgttgcccaggctggggtgcagtggcgcgatctcagctcactgtaacctctgcctcccgggttcaagcgattctcctgcctcagcctcccgagtagctggcattatcggcacgtgccaccacgcccagctaatttttgtatttttagtagagacggggtttcaccatgttaggcaggctggtcttgaactcctgacctcaggtgatccacctgcctcaacctcccgaagtgctgggatcacaggtgtgagccactgcgcccagccttattcccgttttacagcttagcctggggctcactcaggggtccccagcagggcctgggctgagtggggctcaccccgggtgcatcctccgcatctcctccctgcatttgatcttgttgattcctggctgctacaagggcctgggggccacagtctcaactgagcatagcagcaccgctgctatgggtctccagctcagggaggccccatccgggatccaggcctgagttctcacggccttgcaacttgatttttccccttccatccagaaagcattgggcagggggtaaggggaggtcacaagccacatctgcagacactgcagagcccctgggtgcgctcaggagtcatacaca

SEQ ID NO: 47830 - DNA, 1803 bp, Homo sapiens
aggcaggggcttgcgaatgggtggcagccgtcagaggcaggcctggctccccagagcgagggacactattgtcctctggacatccctaaaacctggtgacctccctgataggggtcccagcagctgatcccggggggcgcctagcctggcccccaaggattctctggccccagccaagcagcaagcctctgcctggggcacccgaaatgaggtactggtggcggcacggcggacagaggccttgctgcctccggtctgctctctgctttggtcccagacacagccccattgtgccgtcctggatggagcgctgagcccctagcctggctcctgggccccacgcaggggaggggcgtgagggtgattttgctggcagctgctgccaggggcctgccctaaaggattttcaagggtttcctccgctgatctgatcggctgtgcagggccgcatgtgctccagggcggccgtgctgtgagggggatggatagcagccctggctggagtgagtttgagtgtgagtgtgtggagctgtgagagagtgtgtgtgtggagctgtgagagacgggtgtccaagaccttagccttgggtgaggcctgcacagctgaccatagagttgggcattctccaggctacagctagaagcctggggtcccctggggacacgccaggcaggagccagcccctggcaggggcagtgctcagggggaccactcagagagaccccagacccagccttgcatccccctaagcagggagtccagttgagctccagggtggagtcaggcccagacttgggggaagcgcgccaagccctccagcagggcctgtgacgaggtccccccgggagtctgcaccccaccgtgtagccacagcccggtttgggcaggcggttcctggtcggagctggcttcagagcatggatgcctagacgtgttctgggccagtggaagctgcgggccagacgggagggccctttgctgtcatgctggggctggagagcaagacacggaaaagtctcctgtctcctgaaacccgagtgctgggggcggcccacctgctggcgtgggcggtgggcatgtggatgccctggaggtgggcggaatccgtgtgggcactcctcacgtggctgtactggggtccctcaatgtggatggggctccaggttggcccaaggtctcctctgccccgtctactgccttcccacactgacattccttcctggagagaggagtttcagcttttaaaatggggaactgtgcctggaaaacacactgacagcgaggcccatgaatgtgcccatgagcccactgggtaccctgaggggccctgggtgctgggtcggtggggacgggcccctgggttctgggtcggtggggacggggccctgggtgctgggtcggtggggacgggcccctgggtgctgggtcggtggggacggggccctgggtgctgggtcggtggggacgggcccctgggtgctgggtcggtggggacgggcccttgggttctgggtcagtggggatgggccctgggtgctgggtcggtggggacagggccctgggtgctacagttaatgctcagaattctggcccacttgccaggggctccctggcccagagcagggctttggggtgaagaggcctggcggggacaggccagtggctgagaaggccccggaaagtggggaaaccctgggtggtcgtctcctggcctcccacctgctttaaggccagctgagtgctccccggggctggggccgggaaggggcagcagagccacccaccttggggtgaccctgtta

SEQ ID NO: 47831 - DNA, 1050 bp, Homo sapiens
ccctggtgggtcgctgggcagcgacgggccctaggaattcctggcaagcctgaccccaggtgcttcctacagctgggtgaccttcagtcccctctccagtgattccagctcccgctgtgctcccagcccggtcctgcgcctcactctctcccctcccctggccactgaaggggagtcggtgtggttttccctgggggtgtctggctgggggatggggcagatagagccagctgtgagcagagtctcttcagcatctgctcaggggccagcatgtaggtgacggccttggggaggggcaggtgccaattctgttagcagggctgggactgagggacacggctttcgggtggccggaggtagtaggagttgcagtgctggcttgggaactggccttggtgatggcaccccagccaccacggagggtctgagggttcagtctgttgacgaggactgggcaagggagaggcattctaggtcctgccccgcctttggccaagctgtcctgaaggtggacaaatggtctggcctgagtaggacccctgagcccacaaggcctcaaggtaaggaggagagagcccagggcctgaagacccccacctgtccttggattcctgcctctgctcagaccccgtggccgtctcagggataagacctgcccccccagtcccccgcctctgtcaggttccagcctcctcatgggccacaggtggctggagaagctgggagcccagctgagaaggacgccgggggcttgggaagtttgaggaaaggagccaggctaggggaacgtggtccatgcctcccaagccccacgacctggggagcggcatcccccaggccccacgtggccctgaccccgtcagacctggggccctgttcgcaccttggccagtcaggtgagggagagcacagagggcccggcagacgtggggctggcatggtgaggactctgagcccccccccccccgctgccccatgctggcaccgtgggctggtgccagggaggctggggagggggccaggtggggtcgggtggagcagaggaggcac

SEQ ID NO: 47832 - DNA, 1066 bp, Homo sapiens
tcaggaggatggctagggtgcctggcccctgcagcccgtacctctgggatttgggtgaaggcagggtatgggggccacaccccctgcaacaccggcccctgggcctgagggtcttgccggggtcacaaactcacacctttgccccagtggcgttcctgaccttggccgcacaaggggtggacaggaggtgctggcagaggtgtgctggctggggcgcccttgggccgcacacgtgcttccaggcctgtatcccaaagagacacttaggtctgtgagcacagatgtggtgtgtgccctagcccacccaggggcgtcgtctgtagtgaagccacggaggtgctccggccccggggcgactttgccagggctgggccatgacgccaagttcctctgcacaggatggaggcgtcctgcctagagctggcgctggagggcgagcgtctgtgcaaggcgggcgacttcaagacaggcgtggccttctttgaggctgctgtgcaggtgggcaccgaggacctgaagacactgagtgccatctacagccagctgggcaacgcctacttctacctgaaggagcacggccgggcgctggaataccacaagcatgacctcctgctggcgcggtgagtggggacggtcctgctggcgggtgagtggggcggccctgctggcgcggtgagtggggacggccctgctggtgggtgagtggggcggccctgctggcgcggtgagtggggacagccctgctggtgggtgagtggggatggccctgctggcgggtgagtggggacggccctgctggagcagtgagtggggcggccctgctggcgggtgagtgggggtggccctgctggcaggtggacgcttcctgtcctcagcagttacagtttgaggagggggacagggcaagcagggtctaagggaacgcagtggggaagccctcacctggagggcagccagggctctgggaccccggcagggagctgggtttcagctgacaggcgtgagtgggtctgtgtgtctgcgtgtgagagcctgggctgtgacccgcgtgctgtgcgtgagcact

SEQ ID NO: 47833 - DNA, 1057 bp, Homo sapiens
gcccccaccacccatgtatgtatgtaaatatcactctctggagagagacaggctggcaaaccacaggcccctaagtactgtcttgtgtgcaggtctggggtgggtggtggccggaacaaggggctcagagccacaggcctgtggcctttcacaggcagcagagaggagaggtcttttgaaaggctgccctgcctggaggcttaaaagtggcccaaggttttcctttgtggcgtggtgaggagaatgttctggaatagacagaggtgccggttgcacagcatgaatgtacaaaatgccagtggatcgtccacgtgaaaatgatcaaattcctgttagacgcatttccctccaatataaaaacaaccccctcacccagtgacttggagggtgcccgtaagggtggagggagtgcaagggaggaggcttgccggccgccagggggcgagcgaggccaagggcccagaaactgcccgcaaaggcagagccggccacaggccaggttgcttggactctgcgctaatccttttaatgggaaggaaaaaggcagagctgattggggcttatgcttgaaggtggcagaatttgtgggaggtccagctgggggcattatcctgtcatccggccaatgccccttgggcctgggggcccctgatgaccctcgaagccagggtcatgctggggccgtgaccaccaggggaggggctggggctgggggctggcctggagagggcgggtatgaatctggtctccctctctggcagagtgggcgagggccgggcgtgctggagcctgggaaatgcctacgtgtccatggggcgcccagcgcaggccctgaccttcgccaagaagcacctgcagatctcccaggaggtgagccaggcctgcccccagaagtcccgggcactgcccagcccactccagacgggccgggtcccctctgccccgagcgagcgtgtgcgtgcctgggcccccctcatcctttcagggccattgcagctgcctggtccttccgaggcctggtgatgacatgtctaccatgcccgggggtttttcctgc

SEQ ID NO: 47834 - DNA, 1064 bp, Homo sapiens
atgtttttatagagatagggcctcactatgttgcccaggccagtgtcaaactcccagcctcaagcgatcctcccatctcggcttccagaagtgctgggattataggcgtgagccaccgtgcccagccatcccctgggtttttgtgccacagtgctcatgggtttctgacgatgacctctcctgggaaattgggggtgcatgtcagccaccgcagaggctgaagacagaggaaggagcagaggctctggggccctcagcgagtccgtgggacaaggtgctgtgaccgatggcagtgggtgggtaggggatgggctggaatgtgccccccaggatgtccaggcctatttctacccatggccggggtttcctaagggtggggagctctgccgagagctcctgcggcacccctagtaccctcctgtgtccctggctcggcactgccaccatctgggaccccagcagcaactggcagcagggctgggagcagctctggaaaggctccgcggaggctgcggctctgggtcctcccgacgttttctttcttggagccaaggaaaaggggggccggagtgggaggacgctggaacaatgcagcttctgtccctctctggctcctctgtgccgccccgagtgcgggaccccttccagccggccggacgcctcctcccccagggctggggaagggtcctcctccccgcccagggcagcccggcagcctggctggggccgccgcccggctgccgctgtgggaggcaggctgcacacctagagcctgggcggccctgggtgagaccccggctcagctgagcctggcagggacagggccttgaggccgggagtctggacccggcgttgcgggttgggggcgccacggaaggacccacgcagcctccccattcggcaggtgcggagggcggggtggatctgcgagctgcgggaggggaggggggtgcagagccgcgctagagcctggccgtgcggagggggcgccagggctgggggcacaggagggcgctgcccagcggggtgtgggcagggaggaggaagtcgtctggaggtggggc

SEQ ID NO: 47835 - DNA, 1268 bp, Homo sapiens
tctgaagcccccagtgcatcctcatcactgccattcactaggtggcagcaggacccccttcccaattgggggtggaggcttggactccatttggtggcacaatgctcagacagcagccccccagcaagacccaggcctgttctcatccgcagcatgggcctgtaagggagaccctgagagaccctgacactcgggcccatttcctccctccctcatggtcggggccaggctcatatttaaatcagggccctgctgaggctggggtcagggggatgttggctgagtgacagctgtgcaggtgaggctgggaggggctgtgtgtggggcccagtgcctgaaatgaccgagtgactgcccgcctgagccggctctctccctctgtggatgttgtgttccccggcagggcccagaacccagggctaacggtggggtccgggtgcacctgaggccccggcaccctgcctggccattcatgctgctaactttgacgagtgccccaaccctggtggctgtgctccctgatgcagtggggcctggacagggtaagggggtgtctgggcctgccccccgacatctgcctgatgcaggcagccaccaagcagcttcactttaggagctgagcctctcggcgggatgagtgcggaggggaactgcccggcccggcccatccatgccggcgcagtctgatgaggagggcgctgagctccgaggcgtagtaatggggccaagtctgatggtctggaggtgccaggactggattctcagagtgcccactgatgccagggctggttctggccccgccctcggactcacactgggtgtgcgcagggctcctgggcacagcccgtgtccagtgtgtccatgggtggagggacgcttggttcccaggaagactgggtaagggtgggcataggggggtgggagctgtgggtgagcagggaggaggatgagggtcctcccagctgcgagagtctccctggagatgtgccaggcgtagggacagcagagacagggtcctcagtgtcagcctcgttccgccgtcgtcccctctgcctagaacgttctgctgccctttccacagtggctgtgcccctgtccgtcccgccgcctcctcagggaagcgcccgcagaccctggctctcagccacagcatcgggcccttcccacagggcttcctgcctggttgaggacattccccacttcccggattccatcccatttttccgttcgccaactgatttctgatctgccaggtctgttgtgccctg

SEQ ID NO: 47836 - DNA, 1051 bp, Homo sapiens
gctccgctgagtctgcagctggccagtgttgggtcaggcagctgtgccccaccaccccactgcggctagaggggatgggggtcccttgggtggagacacggccagtagggtgagccccgggccaggagggatggacaggagcccggggaaggtcccacggcagagctggtctgggggattcatctgaggcctctgcgtccccgaccctggcctgggctgcccgcagtgagctgggagtggacccacaggcccgccccacctgcctccggggcacagcatgatgcaccctcaggaggggggattgggtggcctcacagaggtgaccaggggccacaggaagggtgatccaggcagagggaacagcaggactgacgggggaggccctgtgtgcggcaggggagaggcctgtccagagccgggcccttccagcacagggagccaaagccagaccccacctggccccagccaggacgcgctctgtctcgacacctgtcccctttgactctgacagtacagtcggggagacgcagaggacactcagacatggcgctcgcctccacaaggggggctggctgtcagaaagccatggccgggctggtccttggccccccagagactctggcctggcccacccaatgcgaggtgccagggtggtgctgggctgaccgggtccctctgtcttcaggggccagacccaagaggacgcagaggctgagcgcggagacctgggacctgctgagactccccctggagcgggtgagccagggacacgggaccgatgtcagcacagccgctgccagagcatgggcagcggggttaatgaggcagagccaccgccacccacctcagcccctgtctgctgggagataattgtgccctcctcggcctgatgccctgcatggcccatctgccacctgctcacccatgtccctcagcgtctggccagctgtgccccaggcgaggcatggtcctcacacatttcaggcccccatactccacccagctgctatgccaccacaccctcgggagcccacagacaggggcacccact

SEQ ID NO: 47837 - DNA, 1011 bp, Homo sapiens
agccctccagtgtgcccgcccacaggcacggggagggggaggttcactgctgcacttgctgggggagtgtttacggagtgcgcctgtgtgtgagtgcgagcccacgtgcgtgtgtgtgagcctgtgtgtgtgcacgcactcaagtgagcaggggcgggcgctaggagggccgagcccttgcccagggtcctatttaagcctcaggcatcccagcattgaggcagcacttggcactttgggcagggcggtggtggccctgggcaccttgtgtcctgcctgcgctctgtgtggccaagcacccagcgtggctccctgctgctgtggagacagcctgtgatccgcgtgagtctggggtccctggggtcctaacaggtggaggctgagggagcacacgggcctctgtgaagccgggtggggtggtcttgggccgggtgcattcccctcctccgcaggagaaactgggcttgtgccaaagcaagagagactagagtcagactgcaggagggactctgaggcctccgggaaggagggagccagggcttggggcaagggagaggttagagcagggaggcggaaccccgagtcccactggatatgttctactgggacataaatgcaggggaaggtggccttggggcccagggtcctgcttctgaggggctccaggagccccaaactatccagagcctttccccgtaccaggcactgagccacggttttgcacctgcagtcgtgggcccctgcccccatgtgagggaggcatcagcccctcaacagctggccccagcctcagggaaggggagggctgcccgacataggaccctgagaggggctctgccatggggcctgggacatggcccctgacgggtcctgcctttcccaggagggaccttgctcagtccacctgggccccgggtcacctgggggagtccagattgggccagaggcagaggccccccgcggctgtgccctaggtcatcatagcccaggagccagttccttttagaccag

SEQ ID NO: 47838 - DNA, 1026 bp, Homo sapiens
ccctccccacagactgggccaattctcccctccctcctggctggggaatccgggggagtgggggtgttgccttaggcctgagccaggctgcaggaggagagccctgcggggagaagggggtgctagaactctccctcctcaggtctgcctcagggacaggaggtacctcaggcttccgtgacagctggggactgactccaggggccagagccaggtggggtctctcctaaaacagggctgtccacagggccctcggctcagctcaagggtctgaatcccagctcttttttgctccagcatgaccttgggtaggtcacacatgtctctaggccccactctcctgtgccctgggccgagtccagcagaaaactggaagcaggacgggagccctagtcctgggctgtgggggtcaggtgtcgggaattccagttgtctgtcagacagctgtccgtctcctgggctgtgggggtcaggtattgggaattccaggcagcatcggggacccgggaggtgccatctccaccaacattgcgtctcttgttaactcgttcagctgtgagcccagcatttgcagacctggaagaggccaccagccgtgagatggacaggctggggccgggcaggggctgccagcgccggtcgggaggtggacggggcttggaaccatcacaaacacccttcagccctggggcccggaccaggccctgtgaggctgggtcacggggtggacctgcttcagctgggccccttggggggccacaggagaccacgccctccagcctcccttgtttgggtgtgtggactgaggcccagggcggggttcattccttcgagttcattcacacagcagacaccggtgagggctgtgtagggcatggacacagggagctcatggcagggctgacacagggtgtggtgggcacagggacaggaggcacgggaggcttcccgggatgtctgggaagtgttccaggccaaggctggggaggctggcccagggcaggtgacggacagaggcctggactg

SEQ ID NO: 47839 - DNA, 1062 bp, Homo sapiens
gctgcccgccacctgacgtactgccccggggccctaccatgccggacgaggacttcttcagcctcattcagagggtgcaggctaagcgcatggacgagcagcgggtggacctcgccgggggcccggagcagggggcaggcggcccgcccgagccccagcagcagtgccagcctggtgcgagctaaggccctgtgcccaccgccaggcccaccctgcccccactcctggacgccggtctcacagtcacagccacgtcctcccgaggccattgccgaggacaggcactgggcatgcagccccacggcctccccgacccagggcgacaggctcaggccaagctgcccgtggtgggagggcgtgcttccatcccgggctggcccccatggccctcagcttcctcccttctgcccctgccgcaggccggacggggccttcggcatgtcggccccgacctggtgctgtcagactcccgcatcctctcccccaagcccttcccgttctgccctgccctgccaaatgtgaaaccctgctgtctcccccaccctccccaaaggtgtctctgagccgcctcttggggccaccaaggacagggccatgttctgtccccccagagctggtcttgggatggccgtgtgacaggcatgctccacccctccagcttcgtcctggggcagggctccctccaagcctgtctccccactccccggccagaggtcagcaaccacagaaggccccccagaccacgcatggcagaccaggctgcagtggcagccctgaggtgccccccgccgagtcccagggccctgcaggggcctcgacaggagccgggcctatctctaaagcagagggaatggctgggcatgaacttcgacattccaaaaccccaagccaggaaaaagggcagggcctggtcctagggatgcttactggcagcaagagcagtgcccagtcagggtgggaggtagcaccaggctctgtgaccctcacccaagtgggggggtggtcagtggaagctggggaggcttcactcagctcaaccctgcagaccccccatatgagaac

SEQ ID NO: 47840 - DNA, 1082 bp, Homo sapiens
atgtgaggcccaggtcccctagctcctgctccctgtagcagtccccctcactcacacaagcacccagtctgcccctagatgaaggcagaggtgactgccaacagccaccaacaggcgacactcaggccagcacacaagctgtgggtcactgctgtgttcctcatctctgcctgtgcagactcagccctggcctttgggttctcttgcagatgaagaagtcgagatgacgcggatggcggtccagtttgagctggaggacctgaacctgcggcctgacccagagccacttctcaccgagatgattcatgaagtaaaatgtcaaactcgagaatgcccccgcatctcgaacagtggtcctcgggacaccaggggtggtggggagggtgcctccgtgatgttgtccttgcaggttatggatatatacagaacatttttttgttttttgagatgaggtttctccacattgcctacgctggtcttgcactcctgggctcagctcaggtgatcctcctgcctctgcctcccaagtagctgggattacaggcgtgagtcaccgcactcagcttagaacattcttgatttctgagtctgctgtttatacaatgttcgtattttccagtttttatagtaactaggtctttactactaaacacaattaatcttaggctttttgtgaatttgtattctggagaggcagattttactctttataaatacgcacgcagctgctattgccagagtgcaagtaaaatatcagcttgcgtcggattttcccagggctggctgcagatgggcgctggtgctgcttgttggaggaagcctggtcatgctgtcttcagtcacctgtgtctgtggctcttccccattaggcggcttacagggagaacacagttggcctccaccgtttctgccccacagaaaacgtagcaaagatcaaccgagaggtgctgcattcctacctgaggaactactacactcccgaccgcatggtgctggccggcgtgggcgtggagcacgagcatctggtggactgtgcccggaagtacctcctgggggtccagccggcctgggggagcgcagag

SEQ ID NO: 47841 - DNA, 1071 bp, Homo sapiens
gggagggctgggaggaaaagtccagcctcggcctaagccagcttcacctcctgacacctcacaattcaagacaattcccgtgctgttgaagggagaggaccgggactgaggcgacaactcaaaccccctgcacccctcctggagctcccaaacagttttgttaaaacaagtgcaattttttttcccccaggaacaccaccttcgaggtgctcttgtttctaaactgcctcttcctacccagtaccgcccctccataaaggaagaggcgcctggacagtgagctgctggggaggcctgggctgcggggggccctggcgtcggcactccttacctctcctccctgggaaccctcaggcctggaggaggggagttcagagccagggagtgacgctgcagagcttaaaacctgccgaggaaaagaagaattgcagcaaccaaatcccagggaatttaagtctctcacaccaggccaaaaaatatgaaactgttctggcctgggttacaaacgccctcttccacgtaaagtgctcctcagagagaagtgaaaagtgcctcacacgtgggtccagccgcacaaccctgttgactctagacccctgcagctctctaccaggtgcctgtgtgtgcccatgacaggcttgcaatctggggctactgttattcccattttacagaggggaaaactgaggcttagacaggtgagtgactgccccatgctttacacagctgatgaatggagaacaggattaggcccaggcctgtcccaccgtacagagtgcagtctgagctggtttttttttttttttttttgagatggagtctggctctgttgcccgggatggagtgcaatggcgcaatctcagctcactgcaacctctgcctcctgggtccaagcgattcttctgcctcagccttctgagtagctgggattacaggcacccgccaccacacccaggtaaattttgttttttttttagtagagatggggtttcaccatgttggccaggctggtctcgaactcctgacctcaggtgacccgcccagctcagcctcccaaagagctgggattac

SEQ ID NO: 47842 - DNA, 1035 bp, Homo sapiens
tcgagagctgcaggactggccatggggcagacctggcattgtcattctagagctgggcctggggggtggctggtgcagtgcagatctcaggtggaggccacctgcccgtcctttccacgtggctcagggctcagacccacctgcctgtccctggaagcccctagactgctcagagcacagacctcagtgggaaagacagtagataggcctgggtatggtctcccagccctgagaagtggggagcccactcagacctttccaggaccccaggtcccctcagcagcccacagagcgtgggtggagcctgggctggggttgggtcacttgggagccaaaggcccatttctgctgcttccagggagtcccagggagacggcagaggcagtgcctggctggggccctggttggcgtgccgtttgaggggtgcatgcactgggaagttggccaggcctgcccaaatcagggggcttccaggaggagagacatcaggaggatgggcacagaggcggcttagcaccagggctggcacctccaggtaggggctgtggggggctggaccagacagggaggctgtcacgatgcctggctgttggatgggggcacagaggctctgagtggggtggcagagcttggccaccaggtccatctgcaccccccatgccccctcactacccccagacccccatgatcccaaactactcagtcccagggacccctgcagagcctgtggtgggggtgatcttccaccctgcctggcccctgcccacctcacctcagaactttctccaaaaagtaagagccccgggggacgaaacttcgaggctccaccccttgggctctggtacaaaccccgagcctcctccgagggctgagtcactgggaaagccgggatgggctggcccctccccctccctctccttccttcctccttccccctttctcggtctccctctttttctctttgctttacttctctttcttgcctccctctctccctctcttctttcgttcctttcatcttcttcccttcctccg

SEQ ID NO: 47843 - DNA, 1050 bp, Homo sapiens
cccggtgttaggagggcgactgttccccaatcttccagcaacgctcctgctgcttttcttgaaccccgagcaaagcaccaccttgccgcagagcacccactccctagcagctgcccccacagggtgctggggacccaactgagctggtgaccagcctcccccgcccacagcaatatgccagccgccatgccggaacggagggagctgtgtccagcctggccgctgccgctgccctgcaggatggcggggtgacacttgccagtcaggtgaggctggctctaccctggggggccctggaagggtcctgggcacctccttgcatgtcctggggttactgctggcccatgagtgggtggttgtgaagggagctgtgtgggcaggacccctcccgcaggcatggccgcctgacaccccgtttcctgcagatgtggatgaatgcagtgctaggaggggcggctgtccccagcgctgcgtcaacaccgccggcagttactggtgccagtgttgggaggggcacagcctgtctgcagacggtacactctgtgtgcccaagggagggccccccagggtggcccccaacccgacaggtaaacagccctggctgtgcctggcctggggaggcgggcaggcagtggacattgccgtgtggctgttaggcatggtggggggcactggaatctgggcggaaggcggtggggactccctctccagggagggaggatggggagggaggataggtgggttcccgagaactgggggcaggttgcccggagcctcatatcagccaagaaggcagaagtgccccgtcccggggtcctgtctgcatccagcgcagcattctggaagacgccacgcctccgctggcgacgggacattattacttttggtacgcgctgtgacacttcaaactcgtaccgtgagtaataatgcgccgtccacggcaccgcatcgaaaacgccgctgagacctcagccttgacctccctcagcgtggccgggaccctgagcctctgcgcagagccacccgccccgacgtacttaggcggcatag

SEQ ID NO: 47844 - DNA, 1013 bp, Homo sapiens
ggccgctgcgggccgggccgggccggggctgaggccgagcgagccgcggggcccgcgcagccccggccggagcccaccatgcggcggctgcggcgcctggcgcacctggtgctcttctgccccttctccaagcgcctgcaggtaagcgcggtgcgcgcccgccgcccccggccgcctctgcctggggaggccgagctccagccccggagtgggccgagtacggagcggggccccgggttcggacacgaagggttcatgagcccggggtgggcagcggggagggggcgagtggctccggaaggacgggacgctgggggaggggcggtggcggcgacaggagggtccgggcgcggggatgctgcggcctggaggccctcgccccgacctgcaggcggtccctgccccccaggcccagaaaccacaccgaagtcctttcttcttttctccacttaaaaaatgaggtgtgttattctgcggtagaaaacttgggacgcacagaaacgccctggcaaggacatgacctccccgccccctgccccttcatcccatcagccagccgtagcgcggggaccctgccctgaccccgggatgaccttgaaccaccgtcccctccaggggcctggccgggtccgcaggggaggcccgggccgccttgggttccagctgccaggagccctttcaccttctgctttggggagatgcaggccaggcccatcaggctccaatcatccggggcccggcctcggatgggatgccctcccagaccctccaggaccccagccatctgccggaggcgccagtcctggtcagatttgcctgtatctccccggcccccgcagggtggtcctgggtcagcaggaggaaccctgcctgcgtcctgcctgagctcagggcctggctggcctcagctccccttctgggaagagcgtatggaacctggcaacccacagattgcagcgagaccctctgtgcccacttggggcttcaggttgtggtggtcccggctcagcctt

SEQ ID NO: 47845 - DNA, 1059 bp, Homo sapiens
tggctcggggccagagccctggtgggagcccagcctgcccctctagtggcgagggcctcagtttcctggccttgtgaactgcttttctgggttagtgctgtggggctcctggcccacggtctgagcctgctgggctgaggaccactgtgctgttcccatcccctgggtgaccttccctatcctccaagtggctacaccgggagctggtccccacctgcccctgcaaagccccagcccaggtcctggatggtggggccacctccacactcaagctttgcccgtccatctgtgccaggcccgggagccagggtgggccagggagcactgtgggggccttgcagagcagctgcttgggaccccaggatccacagcagggtcagggatggcagctggggaagatcaagacctaggggagagctgggcaaggtggctcctgcctgtaatgccaggccttaatgggagggtcacttgaagctgggagttcgaggctgcagtgagctgtgactggaccactgcactccagcctgggcaacacagcaagaccctgtctcaaaagaacaacaacaacgaaagagctgggggatgaaccagagctggccaggcggaaataggccctggcccaagcccagtcggggctctggggagcagaactgggtaagtccctagcttggtgtcactgtccccagctggggtcagccctaggcccgaggccagctgcagcctccctcctcctggctgtcctccgaggccccgcccatgctgggcctccctgcatggccctgccttgggcacgttcaccccagacggagccatccgaccttatcctgccagaacaacacccaccccccattgtttctctgctttcctgtttttcatcttgagcaagtctgccggaaacagattcagtgcccaggacaagtggtctgagggggcggagaccaacctgggcctggagggctccccacaccggagccacgccctctgctccaggacccccaggaccccactgctactggaggtctgggcccttccccagctgctgggggtcctccctctgta

SEQ ID NO: 47846 - DNA, 1033 bp, Homo sapiens
ctgttggtcaggctggtctccaactcccgacctcaggtgatctgcctgcctcggcctcccaaagttctgggattacaggggtgagccaccacgcccgaccttaatttttaactgcggtaagatacacatggcataaagtgtatcatcttaaccctgtttaagggcacagtttagtggtcacctccctctgtccgcagagctctccgccttcccaaactgaagctctgtctgcatcaaacgcacactcccagtcccttcccagcccgcggctccctctactctccttcctgtctctatggttttggcgactctggggacctcgtgtaagtgggtcctgcaggatttgtgctttggtgacgggctcgtttcactgagcctcttgtcctggggctcctcccttctgggtggacatcagatctccttccttctcaggacacagtcactccgcagtgtggataggatagacgcagctgctcttccatcccccggctgtgaacttaaggactgcccacccctgggctgttgtgaacatcggtgtctgagtctgtgtcttttttttttttttttttttttgagacagggtctcgctttctcacccaggctggagtgtagcgtggggtcacagctcactgcagcttcaacctcccgggttcaatcaatcctccagcctcagcctcccaagtagctgggactacaggcgtgagtcaccatgtccagctaatttttgtatttttagtagagatggggttttgccatgttgcccaggctggtctcgaactcctgagctcaagcaagccacccacctcagcctcccaaagagctgggatcacagggtgagccaccgcacccagctaatttttgtatttttgtagaggcggggtttccctatgttgcccaggatggtctcaaactcctgggctcaagcaatctgcccgcctcagcctccccgagtgctgggtttacagggtgagccaccatgcccggcccgcctgcgtctcttaaaggcttccaggatgtggctgcgttgggctcc

SEQ ID NO: 47847 - DNA, 2138 bp, Homo sapiens
cagtgagccgagatcgcgccactgcactccagcctgggctacagagtaagactccctctcaaaaaaaaaaaaaaaatttcattcagcagaggaaagaatcggccaccctgtagtcccctggttttgacatttatttgtacctgcccataacactgaaaagtctgggcagcgcctgcccccacctccggcccctgcagcccctggtatgtgaccctggagaggcagagccaggagtgggtgtcgctgagctgggggtgattctagaagacgggggtgccagggggccaaggggatggcaggggaaggctggggtggatccggaggcccttcctgtgggaagtggggttgagagcaccctgagcctgggtgccccgagggcacctcctcacgcagccccttcccccacagggccggctcccaggcctcagggtccgctgcatcttcctggcctggctgggcgtctttgcaggcagctggctggtgtacgtgcactactcgtcctactcggagcgctgtcgcggccatgtctgccaggtggtcattgtaagtgttgcttgtgcgggctggggactgggccgtgccccctgctgcccaagatgctggggcaccaggccctggagacaccttcctccccagacccagggcccacgaggcacgtgggtttctaggtggaatctgcaaagctgcctcaggctgggtgtggaggacaggggtccaggggaggacgggggagacgtgcggggctgcctcaggctgggtgtggaggatgggggtccagaggaggatgggggagacgtgggggctgggggcagaaggcagggcagactccagaaatctttgggagggaggatgtttagcaggaagcctggggtgggcagctggcctcactgctccgggatagagacccccgtgtggtgtcctcactggatgggatagagacccccgtgtgctggcctcactggtccaggatagcgacccccgtgtgctggcctcactggcctgggatagagaccaccgtgtgctggcctcactggtccaggatagagaccactgtgtgctggcctcactggtccgggatagagacccccgtgtgctggcctcactggtccgggatagagacccccgtgtgctggccttagtggcctcgctagcccccctgggaccaggggtcccctgaggcaggtggcagggcaaggtcctccacagcctccacctcagggagatagggctaagtcccctggcgtatgtgagcatgtgtgtgtctgggagcaaacgtgtccacatgagtgcacaccaaggtgaccccctgcccctctccacaccctgtgactagctcagaggggaggtcatcccagctctgtcttcctggcaaaccctagactcgcccagaactgggcaggtcccccactgaattttgaccccaggctgcccgatgaccagggttccgatgcctccactccccttggggtcaggcctgggcatagaaggatctggcctgtagcagcggccactgtgggttgtcatagggtgattgggtgcagggagaccccaggttcggtgtctcctccgtcagatggggagagcacctctcctggcaactgggtggtggatgaagctagccgggtgggcctgggcaggcctgtgtcccacagagccatgtctgacgggggccacatgtggaaaggcccagatgtggcagtggaggactggggtgtggggtccggagctaggagagcttctgtgcccaggacttgtttggagcccatgccagcccaggggaggcctccgggcccctggaccaggccttgctcacccttgaagtccagggggcctctgagcccagcagggccggagggtggcacatggggctcgtcctggggccatgggtggggaaggctgtgccccgatcagatgcacccctggagctcctagaaggaccaaggaggtggaggggccggacctccgggccgggatgttgtgggtgggggcgggtgggggtgagcagaggattcacgtggccaggcaggttctgagcacctactgggtgccgggccgcaaagcaggaggaggtgcccccacaaacaagaggaagctgcagcgtcggtttcccagggtgccctggccctttgcccagtggg

SEQ ID NO: 47848 - DNA, 1029 bp, Homo sapiens
aggggaccgatgtgcggcaagggccctgaggaggccaagcacacgcccgcctcagcctctgaggaagcctctccacactctgctaggtgctggtaggtgcccaggaccatggaggcagctccatctccccacccctgggggaccctggagccccagccccagccccagcctggcagacagcagtgtggcccacaggctccttccccagcaccactgtgtgccaggagcagggcagcctcctgcggtcctggggctccgggcacaggggctggtctggggctccgggcgcaggggctgtgtgatctggggctccgagtgcagggggctgtgtggtctggggctccgggtgcagggggctgtgtgggctggggctccgggtgcaggggctggtctggggctctgggttcagggggctgtgtggtctggggttccaggcgcaggggctggtctggggctccgggtgcagggggctggtctggggttccgggtgcaggggctgtgtggtctggggctctgggtgcagggagctggctggtctggggacgggagtggactccggtggcaaagggcctgcctgcaaggtggagggttggacaagtgtgcagttttccttcattttccttttctgtcttgacgaagagccggcgttttcttgctgccgggacagacgctgccttcatgactcacgtggcggggtcctcggcctccagttggcccatctcacttctgtccccatccttggtgtgtggggggcggggaccctccctcctccccaaccctggagggcggggtgttccgcagctcccttccccagctccctccaagcctgcttggccaggctccatggcaactgaggctgtacatccaggaattctcccccccccagaggggcgggccagctccatccctccatcacctcccgtggggcgctgggattgaggggctgccaggcccctggagctagggtgggggctgaggaggggcggcagccagccccaggcctgatgtaattactgctaacaaagtctc

SEQ ID NO: 47849 - DNA, 1082 bp, Homo sapiens
gtgaggccgcagcctgtcctcctgcctcagcctggggaaggctgggccgggccaaagagggaggccaagtccttgggacaggaggagacccacacctgagattagtggaaacccagccagaagctgccatgcaggtgtggctctgggcatcaggatctgtcgtgagagcccccatgagtgcccagtgcagaatggctggcagcccgccctgacggggagcagaggggctggacgcggtgcccttcacgggatgacacccagctgtttgccctgtgtccagggggttgcttctctgacagaggccctatggctcgtgtctgactcctgtccaggttctgccagcctgaccatccatcgctctggcaccaagagcccacccttttgttcttcctggcgtcccagggaaagccctgcctgggtggggcagctcctggcccttcagatggaagacgcagtccagtcagcaccatcataggaaacaagttcagaaatgtctcacttactattccgggcagggagggcgccatgagtcagggggtgcatcctccctcctggcgtcacccgaggcaggaatgaagagtcaggcagagagcgcgcgtgtggcagctggtggtgtagatattagggactagtgtgaattctagttcaccggccaatgcctggatggtccagagctgggtcggctgggcggagagctgcctccaggttcctgcctctggccctggcgtggggtcgacactgggtgtggtgtgtgtctcatgtccaggcagtggcctttgctgtgccgtcctgttacaggagccaggatggtggggacgggaccggaccggagggttggcggggctgcccctgcagccgacagccccatcctgcagccaccaatggcatgacccagggccccggcactgcctgtgtgaggggctggcagctttccaactgcagcaagtggaggcccctgccagcttcgggcctgtgggcaggggctcagtggggcaggggtgtggctgccccgcccggcacgcctgcacctgtctcctcagtgtgaccagtaccgcaaggggatcatctcgggctccgtctgc

SEQ ID NO: 47850 - DNA, 1013 bp, Homo sapiens
cagggccgccgctgcgagcacagcaccgactgcacctacgggcgcgactgcagggccccgtgtgacaggctcatgaggcagtgcaagggcgacctcatccagcccaacctggccaaggtgtgcgcactgctacggggctacctgctgcctggcgcgcccgccgacctccgcgaggagctgggcacacagctgcgcacctgtaccacgctgagcgggctggccagccaggtggaggcccatcactcgctggtgctcagccacctcaagactctgctctggaagaagatctccaacaccaagtactcttgatggggcagtgaggggcctggccacccttcctggagctggccaggtgccagggtccaaccctccctcaaggaatcctgtcagaagatgtgaaatgcaactgtgttgcaaaatcactcccctaccgtcagggctctggattccagcaccacagacatgagaccccagctcggagcaaaggcggacatggacatcccggcaggagagtcctccaagggggtttgttactctgaagaacgtaatgtcaataaacagcttttatgtaatgcccagggctgagcaccctgagcccccatcgatgctgtgtgtgggacccttcgccccgctgtggatccacccagcccaggcactcaggctggggttgagcccctgaatccttcctggcgaggcagccctcaggtgttagtccaaggtgaggtctattgcagagctgcctgcccttcaacccacacacacctctgaagccgccagggcagttccccaaacacagcggcttctgaaacagtcaatgaccagtaccccccaaacctgggctgtgcacaacagaccaagaaaaaggtgttccagtaagaaaacagatatatgcggtattttaaaaactgattttacaaaatccagccatgagatgtacaactcattccctaggaaacagcccaggaatggccatcttctccagccccgtacgctctccccagtagcccagggca

SEQ ID NO: 47851 - DNA, 1066 bp, Homo sapiens
aagaaccaagaggggctggggtgcccctgagattgagaggaagggtgcagagtgaagggtgtggcaaggccacagcagccacgtgggcacccgagaggagtgaggctggactgagaagccccgcattggacccaggcctggcctccactgcccgttgtccttgttacggaacccagtttctgccatgataaaatgggcacagggatgcccagccacgatggatgtggttcgagcttgtctctctttgccttttacagatcagagaagctaggagagctccagcaggggcacagaggattgggggcaggaggagtctggaacacagccttcatgccccctgaccccaggccgaccctccccacaccctagggtaccccagtcgtatcctctgtccgcatgtgtggccaggcctgacaaacacctgcagatggctgctgccccaacctgggacctgcccaggaggttggagcagaaagggctctccctggggtggtgtttctcctctagggtattgggatgcatgttctgcactgccagcagagagggtgtgtctgggggccaccacctatgggacacggggtcgaaggggcctgtacactctgtcatttcctttctagcccctgcatctccaacaagtccaaggtgacagctggtgctaggggcgtggggttaataaatggcttatccttctctccacccaagtttccacctgaccaggtgaaaaacaaatcagaagggtaagatgatgacaggtcacatgaaacctttattaccctacagttgatatatgaggatcacatgcaagttacatactgaggatgtacagggaagttcccagcgctgaaccccagaattagacgttcgcatcagccccgtaggccacgtgacaccaccacagcctctctgtatgggggtctgcctctgtagcacttggcatgtaggggcagagcaaaaggggccaggctggccagagcctggctgctgggagaggagggacttgtgggccacgcccacctgcctatcattccccactcatctattagccaaagtcactccccagaggcag

SEQ ID NO: 47852 - DNA, 1849 bp, Homo sapiens
agtcaaaacaaacaaggaaggtattacccttgaaatgttgtctatacgaatttccaaggagaccacaggactgtagactgtcttggaatgtcctcagagagctctgtcattgatcaggtaacggaataaaaaccccagcgtcctttctttcaaatgggagagggaaagacaaagggacagaagccgttcaaactttgtcttctttccttgtggcttgtggtcacctctgcctccccagaagctgcctcgcccaccaaagccttcctggcttctgccaccacctcatcctccaaagcttcctctacctccatcacaaccccaaagccaccttcgcccttaggtttggcccagtccaagttacctttgtttccctcaatttcaccatcttccgcggcctccttggcgcttttggcatcctcctcactgttgccatctacagagccaaagcctttggggcacccggtttcctggttggtgactacccttgcccaacaaagctgtcgaatgactaaagcctcttcagtggtgtcctcagacaggcctttgacagacagttttagatggctggctcctggcatcaggtggtccttgcaactccagcctgattgccctgcccccagtttcccttttattacaggaatttaaagctgctttatcatcttcaaatgaagcgaactgtaagtgcatgcacaccctttagatttgccattttggttctggggcactttgataaaagttgccttgtctcagattctttctgaagagtttcttctgttgcactgtaggagaggttgcttaaaccagagtttttgattcacccctccaagtggtctctctagtcttgatttagacctttctctccatgatagtgcagggaaatagatcggccatccatctctgttccctgcgtttcttcagaagttttctctgcattagcttctgtcttaacctcaatataagcagtccctttactcttcccatccttgctgactaatccaatctccacagcatcttcaaacacttttttgttttttgagccagagtctcgctctgttgcccaggctggagtgcagtggccgtgatctcagctcactgcaagctccacctcccaagtttgcgccattttcctgcctcagcctcccgagtagctgggactacaggcacccgtcaccacacccagctaattttttgtatttttagtagagacagggtttcaccgtgttagccaggatggtcttgatctcctgacctcgtgatctgcctgccttggcctcccaaagtgctgggattacaggtgtgagccactgcgccactgcgcccagccaaaacacttgtaattcatcctgagtgactttgtaagggagatttgtagccaaaagtattctcacatcttgctctttcttactgtcttttccttttggtttctctagtttaatttcattgccaaagtctttcaaaccagcgagttccaaggctctttccaggtcttcagcagcttgaaaatccacatagtcagatttccttgtcatacccattctgacatccacaacagcaagatcatttttagcaaaaatatcatggatactagtttttgtttttctttctttttcgagacagggtcttgctctgttacccaggctggagtgcaatggtgctcactgcagcttccacctcccgggttcaagtgattctcctgcctcagcctccccagtagctgggactacaggcacgcaccactacgcccggctaatttttgtatttttagtagagacagggtttcattatgttggccaggctggtctcaaactcctgaccttgtgatctgtccacctcagcctcccaaagtgct

SEQ ID NO: 47853 - DNA, 1185 bp, Homo sapiens
catcctcctcctcatcgctgtcttccttcttggcgttcttgccgttctttgcccccttggctggggtgtcccttcttgccaggagctgctgccagtgctttgcctgctatggctcccttcttggcaggtgtggcgactgctttgcctggagtgacagttgctttcttggtgggtgtggcacctgcagccttttttgttcgggaaactgtcaccttcttggctggggttgcagcagccttcttgcctttctcctgaggtgtgacagtctcttctccacagctgtcatcttcttcatcttctgacatttcctcatcttcacttcctccttctgcctcctttgggggagcagccattttcttggggtcaccttggtttttacctgcctcgacaccaagtagtctgaagctgctgaggatgggaaatctttgcagggtgcagagtgggagaggagcaaggtgtggctgacaccagctgcagcacaggctgtcagggtggggaggtggctgggcccttgtaatgggcccaggagatgctgctggcactgtgagagggcctggttaggagttaaaccttcatgcatctgagataaatcataagctcttcttggtatgaaaatgtaagaaaattattccatattttgcaggaaagctgcaggaatgtgaaggagttaaattgaatcagggtaagaaaggctcagggcctcaaatagagctctgtgttttctgcattgtatcttctaaaacaagcttagaacagaggtcgtgttcacatcccgtttagtaaaagagcaggtttaccatgaggttaagtacaggtaagtacagggcttcttagcgtttcttggatgaatcctaaaggttttccaggagaatcacttagcttattgcagccaacatttaagattctgaagttaagcagaaaaaaagaaaacccaagatcaagggaccagcaggagaaaaaaaagattctgaaattgattttatttatttagggtcttgctctttcgcctgaactggagtgcagtggcgcaatcttgactcactgcagccttcacctccctggctcaagcaatcttcccacctcagcctcctgagtagctgggactacaggtgcacgccaccatgcctggctgagttttgtaatttttgtagagacagtgtttcaccatgttgcccaggctggtct

SEQ ID NO: 47854 - DNA, 1045 bp, Homo sapiens
ttattattaagaagaagtgttaacttcagacttcactgcagcagatgtgagtgttgaaaacttaagggttcccaaagtgtagaaacaggttgcaaatcttccaaataaataccaggtagaaagaatactttctgaaaaccaccttgtccaggccgggcgcggtggctcacgcctgtaatcccagcactttgggaggccaaggcgagtggatcacgaggtcaggagatcgagaccatcctggctaacatggtgaaaccccgtctctaataaaaatacaaaaaattagccgggcgtggtggcgggcgcctgtagtcccagctactcgggaggctgaggcaggagaatggcgtgaacccgggaggcggagcttgcagtgagccgagatggtgccactgcactccagcctgggcagcagaacgagactccgtctcaagaaaaaaaaaaaaaaaaaaagaaaaccaccttgtccagctttaatcaaaggcatagaaggctgggggaggggcaagggaaccagagctgtaactaaaaatcataaaataacatggcagcagcagttgtcagtaaacagaactcaccagctcgaaagaatgtgagattcgaggaatttttttttctttaatttggctatgtggtgtataagagacacatccaaaacataatggtgtcgaaaggttgaaagttaggagttggaaacaagacactaggtaaacattaaccataagaaagctgctctagctatagtcctagtgctacagcgacagtgatgccatatgcagaatatacttcaaaatgaaagagagcgggtagaaatgtgaagggttaccgcaggctcagagaaagtctctggacctgaaggctcaaggaacattgattaaagtggaccatcctcactggtgccgtggcttatacctgtaatcccagcactttgggaggccaaggcaggaggattgcttgagcccaggaggtcgagaccagcttgggcaaaaagcaagaccctgtctctaagaaaaaaatagtaaaaaaactaggcatggggtggtgg

SEQ ID NO: 47855 - DNA, 1048 bp, Homo sapiens
cctgttcttccagcacctccgcaggctgggtgttcttagtccagtcgggtgccaggtccatccccatctccacccgttctgagccacctcccgcctttgctaagtccgtgctcccctcccagctgccctccctcccccatcacattttcaaaacaagctgggcagtggcctctccaacccagccccggagcaagcaggcccaggcccggggctacccggcacacacgcgttgtgcgtgagctgggatgcaggccccgcgttctgcagaattgtgcactgaagacgccagggctcgcagtggctcacgtctgtaatcccagcactttgggaggccaaggcgggcggatcacgaggtcaggagatcgagaccaccctggctaacacggtgaaaccccgtctctactaaaaatacaaaaaattagctggacatggtggcgggcgcctgtagtcccagctactcgggaggctgagacaggagaatggcgtgaacccgggaggtggagcttgcagtgagccgagatagcaccactgcagtacggcctgggcaaaaaagcgagactccgtctcaaaaaaaaaaaaaaaaagactccagggctgcagaaaacctggttaggagcaatccgcagaagcctggggtgctgtggagagctcctcaggtggtgggccctgaccctgagggtcaccaggggtcccaggggtgggctctagggcagaaccacgtcctccaagtagaaagcctgacctggctccaagtagaaagctgccccctgggcccggttcgccgttgatgctctgtgtgctgccaggtgtcctcctgatgggagaggttgccatggtacccacccatcgtcttcctcccctgcctgccggtcacctggtctgattctagcaagaaagatgaaacaggtggcagcagaaccggctctccttgtagttgctcttaaagctgcagcttgggttcggttcgtttaatttgccttttctttttctcttcccgtccccagtgaagatagtgatccggggagacaggaacacgggcaagacagcg

SEQ ID NO: 47856 - DNA, 1049 bp, Homo sapiens
gccaggagggtccccttccagtatgctgaggccaggaggggccgtgcccaggatcggggcccgggagggaggggccgtgcccaggatcggggccggggagggaggggccgtgcccaggatcggggccctggagggaggggccgtgcccaggatcggggcccgggagggaggggccgtgcccaggattggggctgcggagggagataccgtgcattcagtttgtcactgaagctgtgtctgagcgaaggcctgaaggagccgccatgtggtcgtctggggaggacacatcccctgcttctggacactcggaagtcctggtgggagccggtggctgcggggcacagacaaccacaccagctggaccgctttgtgccaccttgggaacttcatgttgggcactaattttaggattctccctgtttcagccacggatgacatcgtgaaggttgaagtctgggatgtagtagacaaaggtgaggcgtctctgttctgtgtctgcttctctctgggactgtgtgctctgcgcagagaggcttcctttctttcccccggcgcccatgcatcacccaccatcctcgtggacggtgcccagggtcttgctgctctgctcccctccacatccagtggcgaccccgcagcgtggcgcagcccctcctgtggcactgcatgctttgctgctttagcatactccccgtctctgagtgaccgcgtgcacggtggcggcaggtgcagccggggggtgtgctttgagccccaaggcccagggtgctattttgggagccctcctcctgcactgcctggcggagtagcccagcaccaggcggccccctgcccatagctgaggacccagctcctgcgctcctgtccctgccagggatccccagccacacagacctgcactctggggaccgtgggagggcagcaccagcccccggggtgtcctcgacatcgttggtctcctcctcagccacaaggtcatgagttcctctaagtcctcagggtggagctcatggccctccccggggcccatggtccgtgtgcatgtgtgg

SEQ ID NO: 47857 - DNA, 1664 bp, Homo sapiens
gaccaggcgcaagcccccagagtccactgtggagtcgcatgggatccactcagctcctcaggagtgcagtgtcccccaggacgcaccggagccccagcgggggggtgctgcggacgcacacttggcacaaggctcctagaagaacgagggccgcgtgaagaccagtgtcctggtgcagggcccctcctagccacagccagtgcccggagcaccaggagcagcatgcccgacacgtccaggcatctgctcttcccagcagtgggtctggcctgggggcctagtcagcagcttctcttacttgggaagacccccacaccagggttaagcgtaccgcctgtcacggggccgcacactcagcacgcatcagcagcccaggcctgagggcggcttgaagcacctgaccagccatgctctgggcctctgccaacctttgccaatgctgggaaccatgcctgccctcccagccttcagcaccaccaccaaggactgaccgcaggcaccctcaggagagccctcggtgggggtgtggcacacggatggcaggagaaccacacacggggctggcggccccaccccagggcacgagttcagctcgggcgcacacgctggcctcacctgggcgagcagtggtgctcctctccctccggcctctcctgtctaggcagcaggccagcctggtgggtgggaagtggcttttcccaagcgaagttgagtgtggacacagtgtggcctccacggcacctcccactgctgccacaggaacggcctggagggagctgcagccgcctgggctgccgtgcgaggagtgggcgggagtgacagcgagacttgagccagcctgagaagacgcggcaaaggcgcttacctgtgggcccggagaccctgttggcagcaccagcctgggcaggcgatgcctatggtagcaatgctctgtctggagcccctggtgcccagcaggaaggatggaaaacactggctcagacagcggcttcaagcaccacgcaggcccttcacagccacgagaggcaggagacaccagaaggccacctgcttaggaggccagaggtgcccctgggccggccttggtgaggggcccgtttaaatgactgcgtgtaaatgaaagaaaatgaagttagaaacaggatgttgcattttttactcccttatgttggctttcagtcgtggggaagttttgtcacttgaagcgctggttatttcttcacaagccatttggaaaaccacgcagctgggaaactggcagttccacgccaggcagactctggagacttgccgtccgtgccaggagatgtctgcttaagacaaggctctccaaacagcccgcttcaccggcagccgcagaggcaccccagggtgtcctcggctgccccggtgggcagggagcctggaggaccagccacagggtcgacaccaaggggcacagaggacagtgcggaatgagggtggacacagatgaagccagaggtggttttgtagggatgcggacatggggtgctctgagggaaggcagggacaggcaggggcgttccagtgtggggtgcggtcaagtacctgccgtcagggagagggacgggcgggggctgcaggctgaggggtgcgaaggccctcgaggcacttccctctagctctgcatgcacgaggcatgc

SEQ ID NO: 47858 - DNA, 1729 bp, Homo sapiens
cctgtggcctcaggagcctgcaggaggagggagggcagtgcggacccacagctgtgggcccaggggtgatccttggcaccagggcaagggtctttctcttgcatcttttttcctttctgaaagcagacctccaggttcctcctacttccgctatgctgagtcttccatgaagaacagcttcggcctaaagtaccttcataagttcttcaatatcccatttttgcagcttcaggtaagcactcaccacgtggggtggagtggctgctggtctctcacctccttccaggtgtctcctgtgtagcaacgggtctccctcctaacccctgagaaagctgtggacctgctcggagattggctgctggcaagggcccagcgttctactgcacctgcctgctctgggtggcagagggtacagggtcctgagggctagacccagtcccaggagcccctccacctctgcggggaccccttgctcagtttcccccagtgtttttggttgtttttgtttgttgagataaggtcttgctgtgtggcccaggctggagtgcagtggcgcaatcatggctcactgcggcctcaaactccggggctcaggcaatcctcccacctgtctcccaaagtgctgggatgccaggcgtgagtcaccgaggtactcgctgttcacatctcacatttccctggtgcttgtgtcaaaaccaaggaaccaactttggcctacggactaaactcactttcctttgtagaaacaagggccaggccagctgtggctgcaaagtagcccagcaaatgatgaggcttgaacctcctcgccctgggctgccctgattgggtctgggggacctgaacctcctcgccctgggctgccctgactgggtctgggggacctgaacctcctcgccctgggctgccccagctgggtctggggacctgaacctcctcgccctgggctgccccgcctgggtctggggacctgaacctcctcgccctgggctgccccgcctgggtctggggacctgaacctcctcgccctgggctgccccacctgggtctggggacctgaacctcctcgccctgggctgccccagctgggtctgggggacctgaacctcctcgccctgggctgccccagctgggtctgggggacctgaacctcctcgccctgggctgccccagctggatctgggggacctgaacctcctcgccctgggctgccccgcctgggtctgggggacctgaacctccttgcctgggctgccccgcctgggtctgggggacctgaacctcctcgccctgggctgccccagctgggtctgggggacctgtacctcctcgccctgggctgccccgcctgggtctgggggacctgaacctcctcgccctgggctgccccgactgggtctgggggacctgaatctcctcaccctgggctgccccagctgggtctggggacctgaacctcctcgccctgggctgccccagctgggtctgggggacctgaacctcctcgccctgggctgccccgactgggtctgggggacctggggcccagctgcagctgcagcagccttggtctttctccagaaggatgtcaggcttgcccaggaaaggggctgtgctgtcgtcctggtgtcagaagaagtgaggatgcctgcaggctgggactgctgctggggacgtttgggttggaaggaaggcggcagtcagacttgtcctgtgccggcactgctgg

SEQ ID NO: 47859 - DNA, 1045 bp, Homo sapiens
gagcaggtgagggagagagctagttggtaagcgtggaagcccacccgagggggcttgacctgtcccgagaggtccccgcacacccgctctggccgcacgccgtactgcgggcgtggaggcgcaagcccggcggcccggcctccacctgtcccccaagtgcaccctggtccgcgcccagagctctctggagggtggggtatgcgggagaggggtggaggccaaacgcaagggccctcctggagtccccagccctacttcggagccaggggagggggcaccaagtgagagaaattgggcacccccgcctccgctcctgctttcgcacccggcacgcccatctcgtccccgcgcgtctgcaccggccaggcgtcccgcttgcccacccgccgccgcgccccgcgccccctaccccagggcctctgcattcggccccacccctgagggccggccgggaacgcccctggaccggaataatttccagggggcaagagctttcgaaccaagtaaaatagaacttgaatgtagcggctgccgttgcctccttgtaccggtagcggggttggggacggaagccttcggtcggtggagaggagaaagggagaggccttcgggcggtggacggggaagagagggagtccttcgggcggtggagggggtggagagcgaggccttcgggcggtggagagcggggaggggggaggccttcgggcggtgggagggggagagagggaggcctttgggcggtgggggccacggggagggtggtcttcggactacgtgcgggacaggaggtcagggctggcaagtccctcaggcctccctcgttgccccagcctcgcgggccgcctaactgccccgttccaagggtgccaccggaccccgctggagaggaacttctccgttggctggatttcatcaccacccattcccgattccacgtttcctttaagcggggctggcggagccgcaaggcggcaaggaactggattgcgattggtcagcacgtgcctcggtcggcggtacaattggctgaggcgctgggcct

SEQ ID NO: 47860 - DNA, 1041 bp, Homo sapiens
ccgtcctgctgcggaggcgccgaggggagctggggaccgcctgggtccgagaccgtgttgacatccagagcgcctaccccttccaggtagggaacagcaagagggtggggtctggggagccgcactgtgggcaggggaggggaacccacaaggtacccactgcgggtggacagggaccagaccccagggggaaataggctgggcaccccctgagcccctctgccctcagatcctcctggccgggcagacaggcccggggggcgtcgtgggtctggacgacctcatcctgtctgaccactgcagaccagtctcgggtgagcctgctgactctgccctaccctgccttgccctggagaggcacagcactccccatccctgcctcctgacaccagttctgcccccacagaggtgtccaccctgcagccgctgcctcctgggccccgggccccagccccccagcccctgccgcccagctcgcggctccaggattcctgcaagcaggggcatcttgcctgcggggacctgtgtgtgcccccggaacaactgtgtgacttcgaggagcagtgcgcagggggcgaggacgagcaggcctgtggtaaaggggctcaacctcctgcagacctcctgctgcggagccaagggggtaggcgccggggcaggctgaggactctgaggactctgccattcagtgccggctgctgttccaggcaccacagactttgagtcccccgaggctgggggctgggaggacgccagcgtggggcggctgcagtggcggcgtgtctcagcccaggagagccaggggtccagtgcagctgctgctggtgaggcccaaggcccaaggctcaagcccccgcccgggtgtgagcagcgtcctcagaggggtctctgctctgcctctgcactacagagggtctctggactggggatccctgagggacagagtggggccctggaagggatgaggctctgagcaccatgctcttcccctagggcacttcctgtctctgcagcgggcctgggggcagctaggcgctgagg

SEQ ID NO: 47861 - DNA, 1060 bp, Homo sapiens
atcagcctcctcttgttcccaggccactttgccttctttgaaactggcgtgctgggccccgggggccgggccgcctggctgcgcagcgagcctctgccggccaccccagcctcctgcctccgcttctggtaccacatgggttttcctgagcacttctgtgagtccggctgggccaatgggtgcctgggcaacgggggcagcaggggtccaggagcagaggtggggaggtggcctccccagcccgcccctggttaggcgtgcaggagccccaggaccccaggcctgacacgccctggccctgctctcagacaagggggagctgaaggtactgctgcacagtgctcagggccagctggctgtgtggggcgcaggcgggcatcggcggcaccagtggctggaggcccaggtggaggtagccagtgccaaggagttccaggtgaggctggctgtgggcaaggagcctcctcctcctccacccagggcccacacaaactcctttccttctccatcagatcgtgtttgaagccactctgggcggccagccagccctggggcccattgccctggatgacgtggagtatctggctgggcagcattgccagcagcctgcccccagcccgggtgagccctgggctgcagtggaggcacggaggagggcccaaggggccagcctggctcggggtttgccaggcttaccagtgtgtggtcccaggagctgcgagcatgctgcacccagacaggacaagagagctgccaggcccaggccctgtgccctcctcactctgccctgctcacccctggggccgctgcctgggctgggctgtccctggggtgcagcctctggggcctgccctgcctggctgtggcctctgtgctccctgtgcccacacccagggcaaggtccatcctggaggaaccgccagccgggtcagggcagccactgactgctctcacttggtgagggaaagaatctcgcctggggccatgagccccaccaagtctgcagacagcagctgcctgtctgccaggccccatccttgtggtagcagaaccaataccc

SEQ ID NO: 47862 - DNA, 1031 bp, Homo sapiens
agcgcggggtcgggtgcggggtcgggcgcgggcgcggggtcgggtgcggggtcgggcgcggggtcgggcgcaggcgcgggcacctctcagggagactccgggccggagcgggagcgggggcgggagaggccgcggggcgggggcggggccagcccgaggggatttctctgagccgctgggccggaaaccaagtccgagcgtggctggcgcgggaaagttcgggaacgcgcgcggccgtgctcggagcagcgccagggcacggtccggggttttgcgcggggtcgcggctcccagtaccgcctgaggcccgtgggcggcccacccggccctgccccgtcccgggtccgtcgctcccccgcaccctgtcgcccctccacgctcagctgtgggcccctcgtgtccccgaagccccgcaccctcagccggctgcgtgctcgggagggtcaggggcgcctccgacccctgagtttgccagcgccccccagccaggggtcggggaagaccagtgaggctgggggcggagccgactctgctgccttcctgcccagtggctggggagacccaggctgagcctgggtgaaaagtccctctggctgctgggagggtcgggggcagcaaggagccagtgcggggatgggctgcggtggaccgggccgggatcggggccggggcctggtcctggcagtagcaggggatgtttgtggaaggtagagccgagaaaaagaggagttgcaatgtctgcaagaatctggcgtgagcagctgaaggctggtgcttcctaggccaagatgaaggagtcacagcgcccatggcctctcgggaggcggccagatgggcagcctggggtcaggggaacggtcagggccagagctgggtattttggagttgtcattttgaggccccgagggctgagggtcagtgcagaagagcaccaagcctccactcggtgtagggccgacagggggtggggtgtctggcagccggtgaagacggggctcggaggaggagggagtctggtctgggtcaagtca

SEQ ID NO: 47863 - DNA, 1025 bp, Homo sapiens
tcagctcactgcaacctccgcctctcaggtttgagcgattcttctgcctcagcctctggagtagctgggcttacaggcttgcaccaccatgcctggctaattttttgtatttttagtggagacggggtctcaccatgttggccagcctggtcttgaactcctgacctcatgatccgcccgcctcggcctcccaaagtgctgggattacaagtgtgagccaccgcgcccagccatttttttgtgtttttggtagagacagggtttcatcatgttccccaggctggtcttgaactcctgagctcaagcaatctgcctacctcggcctcccaaagtgctgggattataggtgtgagccaccatgcctggcccatttttgtggttcttttatgtctgacaggcatgcctagggcagggagggcacacctctgtctccaccttcaagagcgcatttaggaggaatgtcgatatgaaaagaatcaagctttgtctgaaagatgcaccaggacactcttcagtgacattgggaaaaaagaacgctcaccctgaatcttttttttttttttgagacgaagtttcgctctttgtgcccaagctggagagcagtggtgcgatcttgactctctgcaacctctgcctcccaggttcaagcgattctcctgcctcagcctcccaagtagctggaattacaggcgtgagccactgcactcggctaattttgtgtttttagtagaaatgggtttctccatgttggtcaagctggtctcgatcaccacctcaggtgatccacccgcctcagcctcccaaagtgctgggattacaggcatgagccaccgtgcccggcccattctgaatctgtctaccctagcaaaacgatcctttattttactttcttgccccattcgtacactggcatgactgcactcatagggttcttcacattttatatcctatttaacatcttataataagtataaaataggattttgtcctaaagaatgtggtttaaggccaggcgcggtggctca

SEQ ID NO: 47864 - DNA, 1114 bp, Homo sapiens
tcgcgccactgcactcccgcctgggcgacagagcgagactccgtctcaaaaaaataaataaataaaaagaatgtggcttaaaaaccaatgatacttaaaaatagaaaatttctttgtccaaagtggattagaagccactttgttctaaaaccattaaacctttttaaactgttagtggctcagccaggcacagtggctcatgcctataatctcagcactttgggagattgaggtgggcagattatctgaggtcaggagttcgagaccagcctggccaacatggtgaaaccctgtctctactaaaaatacaaaaattagccaggcgtggtgacaggcgtctgtaatcccagctactcgggaggctgaggcaggagaatcgcttgaacctgggaggcggaggttgcaccttagatcacaccgttgcactcccgcctgagcgacagagcaagactctgtctcacatgaataaataaataaaccattagtggctcatgaaatcaatgtaatagcttctgaccagaacaaaagaaagaaaatagaacactcagaatgcctcttatgaagactaagtgtagttctgtgaaccttttagtgacgtacatgtatgtagcacgtctccacatgtcatgatgaatgtgcgctgagggtgcagtcctggtgagcaggctaccacctcagtttgccacggctggtatgcatctgtgagctccggaacatccacatagctctgccgcccacaggagcaggtgcacccaccttcgagaaagtgggagaaacaggtgtggcgtccccaccgagggaccttgagcactgggcaggcagagccccagcgtcccttctgttgggtggttggaggagtaagtttaggttataagcatgttttctgaactctgaagtgccacacgaatgtaaggtctcactaaattacagattcagaagctgggattgaaagcacaccactgctggctttggggggcagacaggtgactgacagtctcgtcacagtttctcaagagtcagccctattcaggtcagtgagcgcaggtcagggatgaggtcgctgcactctgcgttccccagtcctgtatgcggcgtcagttttggcagtccacgt

SEQ ID NO: 47865 - DNA, 1030 bp, Homo sapiens
atgtttgctgtccggttgtgtttcgagtctgttctcttgggcgtctgtgccgtggaagttccttgtgcttgatagggccagcacgtgtgaacaatcttcacttcagctagaagctttgaagtctttggactcaagctttacccaaaccgcttataaggttggggggaaccgagtgcctgtctctccccgcttttttttttgagtggagtctcgctctgtcacccaggctggagcacagtggcgcgatcttggctcactgcaacctcagcctcctgagtagctgggactacaggcgcccgccgccacgcccggctaattttttgtatttttaatagagacggggtttcaccgtgttagccaggatggtcccgaactcctgatctcatgatctgcccacctcggcctcccaaagtgctgagattacaggcgtgagagttgtagttcgttgagagggagacagacctcgaggaaatgcttggtgtgcctgccgggtgactgctcgctctccttgtctgctcactctgcccagtgaatgggtctaggcatcctcattgttcccttcctctgtcctcaacatcagcccaaccctgaccaggccccttcctgaggttcccacacaacaggggctccatgttcagaaggggagagagaaacccacctggggatgctctgtaaggagagcagagcccagtggagtctctgcccgggacgctgagggaggaagagctgcggttaattcaaaaggaagggtgaggtgcaggtattggctggatgatgctcagagaagcaggaagagtgggcatggcactgagtggctgaggccatcactggtggccttggtgcttaggcagaaggagagggcatggtgcagggcgctgaggccgtctgtggctgccttggtggggcttactgagttctagtggacagcaaggtgccagggcagggctggcacatggagggctctgaaggccatgtgtatcgtctgaagtgagggaaacccgtggtagctaaagggaatgcactagccagc

SEQ ID NO: 47866 - DNA, 2058 bp, Homo sapiens
cttaggggccacccttagagtcatcagatccatgggtacaggaagtagaatggaggagacaggggtcattgttcagtgagtaccgagtcatacattggaatgaggcagtaccttgatgccatccaatccagccccaggttggtgaggctgtgagggctgtttgctcagaatcctggctttctgcacttaggggagcttcctgcccgggccagagctgggatctcctgctcagccggaccctggggtgttaccggctgggttggaattggacctgcattactgtgtgtttctcctctcctgctccccgccctgtgagcctggccacgcctccctcttctcctcgcccactccccaccctgtgagcctggccacacctcccacgatcttttgacagactctgctttgtggtctttgggctccaagtttcgttttttcagaagaactgccccagctgtgtctggggtgaacaagatgtgctttcctccctagcacggggattgcgtcctggacacggagcggtagctccagggcactgccctagagtgagactcctacctctgtgggcagagatgccagaccgccctcagccacgacgtgcgatgcaaagctttctaggctcctgtgtggctctgccgcacaaacggctgtggcgcatggcattgtaccccccactccctgctccttgaaagagatgcagcttggtcattgcccagtgctgtctgcaagggagatggctccctggggaggtggcccagggtcagggtctccctgggagggttggggtaccagctggctgcagggagtaggggtgctatgcgccatgccaccctttgagaggactgaggagtgtctgggggacaggtgggataatagtttccagctctgcactggaccctgagtcctctggggtctctgccacctccaggctcatgggatgccacattgacaattatgagggcctccggctgagggccaaggactatagccagcccctggcctggggcgccacgcggtcctgcaggcacgcagggtggaaagtccctggctgcacctttgagagctctggaaagtccctgagaggagccgggtttggtcatgtgggaggggcgggcactgctctggaataacttggctgtggcctttgattttgttgataaaacctctcactggctgtaaatgtcacacatggggacggaaatcaacccgtctatacagttgggagccgctctgcccctcggagccgcctctctttgctctccgggtgctcggagtgtgctgctagttggggccttattgtaaacacagtacggaggctaaggctgcctttcctccttgatggtcggaactttattggaaaaggggaaaatcctgcttagcttttgaatgtttgtcctttgcaatgatgcctttctaggaactgaatgattttatttatttatttttatttttttgagacggtcttgctctgttgtccaggctagagtgcagtggcgtgacctcggctcactgcagcctccacctcccaggttcaagtgattcttctgcctcagcctacaggcgcctgccaccacatccggctaattttttatatttctagtagagatggggttttaccacgttggccaggctggtcttgaactccttacctcaagtgatccatccaccttggcctcccaaagtgctgagattcctggcataagccactgcacctggccaaatcgaataattttaaaactttaggtaaatgttgatggagtgcttgctgagtgccaatagcagaactgaattccccagtgggcccctgagctactcgttctggcagctggatgcgggggtgcggggagactttccagagaggacataggctggctgcacgagcagcggaaaggccaggaaaagccaagtatgctcggcctcatggacattctagtgacattcagagggatgacgactgtatttgcgtcaaatgtgtagtttgaattctggctgaataaatattgatttttttttttttaaactgtgtctgctgtgggtggggagaagactgagacagatggt

SEQ ID NO: 47867 - DNA, 1120 bp, Homo sapiens
gaggaggacagtgtaaagggggatagtgttcgtgccccagcaggttctagcaggtcctggagctttagagcccggacaatgtagaactccatctgcaaaccccagtccagtgtggtttaggggaggctctggcccccttcatttctgagtcctgtcatctaaggggcccaaaccctggaaggtcctagaggccaggccgtgggcaggagcctcttctctctgatgggagggcagagtcagccatggatggggatgtgcatggcctggtgtggcttctgagcacgcttgctggcccggagcttctgtgtggacttggagccaccacctcttggcgagggtggggttgggttcttgtgtgcagggagtggacatgagaaacatggagcccaggggtgcccaagagcactgtcctgctggagatcggtgggtgtgggaggcaggggctcgtgcccgcacccctcctgtaagagggaaggtggtcttggcacccggcaggtgcagcagctggagaggagcattggcctcaaggacctggcgatggctgacttggagcagaaggtcttggagatggaggcatccacctacgatggggtcttcatctggaagatctcagacttcgccaggaagcgccaggaagctgtggctggccgcatacccgccatcttctccccaggtgtggttctaggacccccacctcactgcagctgctgtttacttggcacctgggtcccctcacccctgtgaccacataggatggctcccaagggtggggctgggatacgacccccagtgataccgggagcagctacacctccctgagtggcaagtggggtagctgaatatgggctggccggtgggtgccctcgggcaggggtcggggtaggggggttgggccggctgccctcctgccgtgccagccctcgaggtgtgcccctcgtcacccacagcctggtcctctggcacacagccctaaagcagacattacatcaacaggctctcctgcctgatcacagctcccaggaagacagggcgggtgggggtggctgtgggggtgggacatggctctcagggccttggagctgagctagtctgatccctcccaggttcattttccacacgg

SEQ ID NO: 47868 - DNA, 1086 bp, Homo sapiens
ctgatagaatcttaggttctaggatcaaggccgagatgctgtaggcacctttcctgtttgaatttagcctggcactgctcgtgaaactcagcactgggggccatggcagtcctgtgctctggcgccctcgaggcggaaagagacccaagcgtcatctggaggggccgccacattgtgtggtgcctgctgccaaggccttcagcagggaccagaaacaaaactcacactctttcttctctgagttgagactggaaaaatgaaagattgttttaggggaaacttgagggaacagtctgggcagcctgcagggcatggccctgttcctccagggctgggaaagtcagcactgctttctggtggcgaccttccctctgcagctgctggctcagccgattgtatatgctgggagctctgcactaagcgttgggtgaagggtcagcattgtggaggccctgccacggaggtggtcttcttgggagctgcactcaggcaagaggacctgtttgtgtggaacatctgctttaagcaatgctggtgaacacagcttgtgtgcggcacgcgtgcaggctgaggacaggcagaatgggcctgggggcacggtggaggacgaggatggggaggatgggcctgggggcacggtggaggacgaggatggggaggatgggcctgggggcgtgtggaggacagggatggggaggatgggcctgggcacgtggtggaggacggggacggggaggatgggcctgggcatgtggtggaggactaggacggggggaggatgggcctgggggcatgtggaggacgaggatggggaggatgggtctgggggcacgtggtggaggacgaggatggggaggatgggcctgggggcacgaggtggagaggactaggacagggaggatgggcttgggggcacgcggtggaggacgaggatggggaggatgggcctgggggcacgcggtggaggacgaggacggaagggtggtcctggtgctgccacagtggggtccctgcgtgcagacctttgcacacagtgttctgtcatgtgacttggaaagcagcctctgccgggttctggctgtcact

SEQ ID NO: 47869 - DNA, 1047 bp, Homo sapiens
ccatctcctctcctgggcctccccagggactcctgtgagagcagaatgaggatgagccagccctggtcctgcctttctgtgcacaggctccaccgagcatcctggctgcacccggggggtcctggccacaccgagggtcctggctgcaccgcccctgtggtgtgtttttgggacagtgcaggcaggcgtaggcacggcttcacactcggtgtcagggcagccgtgctgggacctactgggcatctgtatcggggtccaggataaagtgctgtcccctctcgacgtcttcacgcactgctgtagtttgagaagttgaccacagaaaagtacagaaaataactcaggcacggagctgaccgacgggcattgtctgtgttccgtgagtgtgtactgggcctaaagagcaagcattgcagagccctgctgttccctttcccggcctcacctcagctccccaggccacgtggcgggaattgaggcgttccggttctctttgggctttagaattttgcatctgtacgtttctgtattcacaaataagaatattgcattaaaaatgcagaaaccatccactgggtcagctgcaggtagctgggcttttgactcagcctggctacttttaatgcatcttgtgctgggcactctacatggtggattctgactgccgtgtgtgagttccctagagagcaccttccagtctcttcccgtgtcttcagggtttggtgactggagatagccagacctgctctcgtgggtctcctgtcaacctggaaggagggttggtggtttctaggcctcccctttttagcagttgccagcttgctttgcagaggggctgcatccggtccttccaccagcaccagggggagggttcccatcactcccatccctcccatccctgcccgtgcttcgtgttgttggaattgagatgctgcagcgtgctgtgtgtgaagtgaagtggcatcgctgtcacgtgcgtttctctgatgactcggcggagtcaggcgtctttaccacgcttacctctcccttggattctctcccgtg

SEQ ID NO: 47870 - DNA, 1044 bp, Homo sapiens
ggctcccacgaagcagaccaaggcccttgagggacaaaatgctctggagcagccccgtgggcaggcctggcccagccgcctcatggccttctggggaagtgacaggctctgtgcaaacccacagaggtaccatcgtcactacctaattttgggacatttcatcaccctgcagagaaaccttcccttagcagtcactgttccctcccgctcagcccctgacagccagccataaacctaccttctgtctctatagatttgcctactcaggacattcatgtgaatgtggcctttgcttttactcagcaagatattttcatggttcctgtgtgttgcagcatgcattggagtttcattccttctaatggctgaataatctcttgtatggatgcaccacaccttatttatccattcatccgttgctggacatttgggtggtttctactttttggctactctgaaaatgctgctgtgaacatttgtgaacaagtttttatggggacgtgtatttgttttcatttctcttgaatatttataccgaggagtagagctgctgggccgcttgttcagctcttggaggaattgccgaacttttgtgtcaccttacatctccctcaggaagtgttttttttttttttttttttttttgagacggaatctcgttctgtcttcctggctggaatacaatggcacaatctcggctcactgcagcctccgcctcccaggttcaagcaattctcctgcctcagcttcctgagtagctgggattacagctgtgagccaccacgcctggctaatttttgtatttttagtagagacagggctttaccatgttggccaggctggtctcgaactgctgacctcaggtgatctgcccacctcagcctcccaaagtgctgggattgcaggtgttgcacctggcccctaataacatttttaaatttcacgtagtaaaattgatttgttcttttgttttgttcatggaacattcaattccatggatgttcacacctgtgcagatgtgggtaagcaccatacctgggagac

SEQ ID NO: 47871 - DNA, 1032 bp, Homo sapiens
accacgcccggctaatttttgtattttttgtagagatagggttttgccatgttgcctgggctggtgtcctggactcaagtgattcacccacctctgccttccaaagtgctgggattatgggcataaaagtcaccacacccagccagtatacatatcttgtacatgttttagtaggtttatgcttcagtgtttcttttacttatttattgcttcctatcccacagcttactttgtttcttgagctgttgtaagaggttgttttttgaattttggtttctgactgtatatttccagtgtttaaaaacaaaactgatttttatgtgttgttcttatacctcataaccttgatgaattcacttactggttgtaggagattaggattttgtttgtttttatagatttggggggattttatgtgtgaacaatatgtcatccattaataaggacagttttatttctttttattcaatctctatgccttttatttcttttgcttgccttgttccattggctgacttcccgtttataaggttgaatagtaatggtaagagtctatagcctttcctcattcccactcttggggaaagctttcttgctttcacaattatgtatcatgttacccacggggatttttggtgatgctgttttatcaggttgagcaagttcccttctacttctagtttgcttctagggttttttttttttttttttatcatgactagacattttatcaagatgtttttcaatggctgggtttggtggctcatgcctataatcccagcactttgggaggccgaggcaggcggatcaccttaggtcaggagtttgagaccagcttggccaacatggtgaaaacccatctctattaaaaacaaaaattagctgggcatggtggtgcactcctgtaatcccagctacttgggaggctgaggcaggagaattgcttgaactgggagacggaggtgacagtgagctgagatcgtgccattgcactctaacctgggcaacaaggaaactgtcttccaaaaaaaa

SEQ ID NO: 47872 - DNA, 1028 bp, Homo sapiens
accagttctgcgaaacttgggatcttgctgctgctccctgacccagctctctggcagctgctccaggccccgtgcacaagtttcatagctgcagtttcacagagttcactctgtcgcccaggctggagtgcagtggcgcaatctcagctcattcccgggttcaatgaattctcctgcctcagtcccctgagtagctgggattagaggtgtgtgccaccacgctcggctaattttttttttttttttttttaagtacaaaaggggtttcaccgtgttggccaggctggtcttgatctcctgacctcaagtgatccgcctcggcctcccaaagtgctaggattacaggcatgaaccaccacgcccggcctgacctcagcatatgttttctgaggacttctgttcttttgctaattcagtcactttctctttaaacactgggtctccacccctgccccgtagatggggtgggggcatgcatgccgctccattcccctcccagggctgtgtttctttcgtctcctctgtgccatcttctgctgcctggtcctctcgtcgagtctgtctggtccagcactttccacatatcaagatttttttttttttcttttccttttttgagacagagtcttgttctgtcgcccaggctggagtgcagtggtgcaatctcggctcactgcaagctccgcctcccaggttcacgccattctcctacctcagtctctcgagtagctgagactacaggcgtccgccaccgcgcccggctaattttttgtatttttagtagagacagggtttcaccttgttagccaggatggcctcgatctgacctcgtgatctgcccacctcggcctcccaaagtactgggattacaggcgtgagccaccgcgcccggcctacgtatcaagcttttgatgcagtcactcgccctgtcattttccagtgtctaattggctccctttttattttgaaatgtccaagtcctcttgatttctgtccccacttttgttttatggtgcataggaatgttt

SEQ ID NO: 47873 - DNA, 1794 bp, Homo sapiens
acacacagaccccgcccccaaccagactccgccccgcgcaagctccctaagcccgcgactggcctgcacccggctccggaagtcgttcttccgcgcaggagccctgagcccgcacagccccgcccctcccggcgcccaagccccgccccgccgggttcccgctcgcccggcgccatggatccgctgtcgccgccgctctgcacgctgccgccgggccccgagccgccccgcttcgtgtgctactgcgaaggggaggaaagcggggagggggaccgcggcggcttcaacctctagtgagtgggggtccgcggggaggtaggggtgcagggagctccgcgggcggccccgcctgacaggccttctcccccagcgtgaccgacgccgcggagctttggagcacctgcttcacgccggacagcctggcggccctcgtgggtaactgggcgggtctgggagccgccacacccctccttgcagtgcagatcgtctatggggcgacagacatctgggattccccagaaggctctgacaccctctgcccgccctgtagctgtagtcctcccattggctagggctctggggtcgggcaggtttcgggtgcccccagtgggcctcgggttccaggcagctcgtgacaagcccctgtgctctctagaaagcccgttttggcctgagtgcggctgaggacatcaccccccggttcaggtgagacccaagcagggaggaaggacgggtggggaggaggagggtctgccacagctctccgcacctctcctctcccagggcagcctgtgagcagcaagctgtggctctgactctgcaggaggacagagcatccctgacgctttcaggggggccctcggcactggcctttgacctctccaaggtaccaggcccagaggcagcccccaggctgcgggcgctgacactgggcctggcaaaacgcgtgtggagcctggagcggcgactggcaggtaggattgggggtgggcacctcataccttcactggggtcccctgctcttgcccccactcctggcactgagtggggttcccatgggctttcctccccagctgcagaagagacagctgtcagcccgaggaagagcccccggcctgcagggcctcagctcttcttaccaggtaaggcatgtccgcctgtgactcaagtagggctgtgctctttaacctggaactcagtttccccccaaacaagactcacgctccagagagaatgcctatctattcggagaaggttgtggttgggatgctgccaggttcaggagctgcccctgtcctgttttcccccagacccagatccccagagaggtggccctggacctggagtcaggaggcggtgtccaggagagtcgctcatcaaccccgggttcaagaggtaccctcccacagcccccttcctgcgcccagggtccaatcctggaccccacccctttctccacaccatagtgccatagtgacacccctcttccctcccagtaagaaaccagctggtggcgtggacttcgatgagacctgaaggtgcagcacaagcgtggccccgcggggagtccgcctatgaggggagaggcagtctttgaggcccccatcagagaccccccgccaccacctccacctgcctgtcctgggccaggactaacacggctcctcaaattccttccctgtcaaataaacagctcccttggttggaggctctggtggggctctgactcctggcactggcctgggaagggatcagggaacacccctgggcctgtgttctgggtgtagggccaca

SEQ ID NO: 47874 - DNA, 1057 bp, Homo sapiens
agcctttctgtccccacccctccctgactccaggcagacctgggatcgcacctggggactgtggctcttggtgtggccagaggggctgtgacccgccaaaaggtgggtacttggccattgtcccctgctcgtctccagggtttagaagtgtacctgcaaggccgggagttccagtccccgctcatcctggatgaagaccaggccagggagccgcagctgcaggagtcctgacccgcccagactgtccccagactcccccgagacctgccagccccggcatcctggaagtcccgactccccccagacctgccagccccggcgtcctggagctgggggctacagcccagcctgagctctgggtgggaaagcagcctgccccatgcttccagcctgcagaacacagaatgaaacatgctggtagactccacgagggcagggcctctcctgtcgcctctggacacaagtggcgacagcctgctgggggctctgtggctccattcctggctgtggggtctagtcaagaggcagagggacttgggacctgggagaatggggctgagaggaggcttcgggttggggcccaagggaggtgtggtgtcatctggggagaacaggagggcatgtccctttgggagcccgccttgtggatccaccacaccccaccgagcactagaagctgcataagctacacaggatgtgcttctgcagcctacagatgcagaaccagaatgagggggacaattccacccactcgagggctgccccctcttccttagcagacgaaccagtaatgggggcaaggctggggcatcccagcccacacaccctggatgcccagcaaggccacagaaagagcctgatgtccatgatccaggtggctctgagaagcttggcctggacacctgagcctgcggccggtactcctgccttctccccatctatccccaaggcctctgcctctcagcctcttccatggtcggtttaggctgctgagttttctgtgcttccccaagaaccagtgggatcaatgccggcggcctctgtgatggttgctgac

SEQ ID NO: 47875 - DNA, 1062 bp, Homo sapiens
gatttagaggcactgggaggacagtggctgagtggaggcgcccagacctgggcaggcagcaggctcaggcccacaccttgtgatttttgaaaccaaagcccagaagatgatgtttacttctctctccctggctctgcccttcttactgcaaaccatgctgtgccttagggcccttctcatagctgttcctcatggccatgactggaacagggatgcaacctctttctacacaagcacagttagttgggtgaagtctttttttttgtttgttttagacggagtttcactcttgttgcccaggctggagtgaagtggcgtgaccttggctcactgcaacctccaggccagcctcagcctccctagtagctgggactacaggcacccactaccacgcctggctaattctttgtatttttagtagagatggggtttgaccgtgttagccaggatggtctcgatctcctgacctcgtgatccacccacctcggcctcccaaagtgctgggattataggtgtgagccaccgcgccgggccggttgctggcatcttaatgttctgtaggtggaatatttccaataaacacaaggtgccgtaattgactgctactctggcaagtgcagtttttgggcagtgcacgggtgttgggaacaaggatcaggtgttcacagctgtgtcccagggctggagctcactgggggcccccttagggacaggagttcacacatgaaggccaagactacttggggtgccaaggaatccccccgcggtcccatcccactcttcaccagggtctcaggagggcctgagacaacctgcggtcaggaacctcggggcgctctccagggcaggcttctgcatgctcagctctgacagcctggagactcgctctcctgcacctgcatccttgagatgccaaggtttccctgctaaccacgtgaggatgcttggggtactccagggactgacaagagtgagtggtgtcaacctaaagagaaactcaggctctccagaataaatgaatttaatcaagaataacacataattgcaatgcagagtatgcaa

SEQ ID NO: 47876 - DNA, 1061 bp, Homo sapiens
tagacgaggcctctgggtgacctgaacgttggttctctactctgctcatataccaggaggattttggaaatcggctaatgcctgccttcagaacaccatccaagattccttactcggatgtgaacatcggtactggagttgcccacccgccacggtggacctccgacagcactgtggccgaggtgaccagcattcagctggagttccgggagctctcccgtctcacaggggataagaagtttcaggtaagggggcaggctttctggctggatgcgcctcccctggagctaccttttgctcatcacagcaggtactgtgtgtgtgtgtgtatgtgcatgtgtgttttcaggttttttactgtgataaaacacacaaaacgcaccaccttaaccatttccaggcgtggtcggtggtgttacattcacgctgttgcaggcgtgcaggtcggtggtgttacacacattcacactgttgcaggcgtgcaggtcggtggtgttacacacatttgggctgttgcaggcgtacaggtcagtggtgttacacacatgctgttgcaggagtacaggtcggtggtgttacacacattcatgctgttgcaggcgtgcaggttggtgctgttacacacatgctgttgcaggagtacaggtcggtggtgttacatgctgttgcaggcgtgcaggtcggtggtgttacattcacgctgttgcaggcgtgcaggtcggtgctgttacacacattcctgctgttgcaggagtacaggtcggtggtgttacacgtgctgttgcaggtgtgcaggtcggtggtggtacacacattcatgctgttgcaggagtataggtcggtggtgttacacacattcactgttgcaggcgtgcaggtcggtggtgttacacattcacgctgttgcaggcgtgcaggtcggtggtgttacattcacgctgttgcagacgtgcaggtcagtgctgttacacacgctgttgcaggcgtgcaggttggtggtgttacattcacactgttgcaggcgtgcaggtcggtggtgttacacacattcattctgttgc

SEQ ID NO: 47877 - DNA, 1046 bp, Homo sapiens
aggtcggtggtacattcatgctgttgcaggcgtgcaggtcggtggtgttacacattttcacgctgttgcagacgtgcaggtcagtggtgttacattcatgctgttgcaggcgtgcaggtcggtggtgttacattcacgctggtgcaggcatgcaggtcggtggtgttacacacaacgctgttgcaggcgtgcaggtcagtggtacacacattcacgctattgcaggcgtgcaggccggtggtgttacattcacgctgttgcaggcgtgcaggttggtgttacacacattcacacttgcaggcgtgcgggtcggtggtgttacacacattcatgctgttgcaggcgtgcaggtcggtgttacacacattcacacttgcaggcgtgcaggtcggtggtgttacacacattcacactgttgcaggcgtgcaggtccgtggtgttacacacatgctgttgcaggcgtgcaggtcggtggtgttacattcacactgttgcaggtgtgcaggttggtgttacacacattcacactgttgcaggcttgcaggtcggtggtgttacacacattcacacttgcaggcgtgcaggtcagtggtgttacacacattcatgctgttgcaggcatgcaggtcggtagtgttacacattcatgctgttgcaggcgtgcaggtcggtggtgttgcacattcatgctgttgcaggcatgcaggtcggtggtgttacattcacgctgttgcaggagtacaggtcagtggtgttacacacattcatgctgttgtgcagctatcacttccatctccagagcccttttcatcttaaaactgaagctctcccatcacacagtgacccttcatgtccctccccagtccctgaaaaacactgttcaggtttttcttcctggacctcattgtgtggagttcctcgtgtgagtgcagtcacacacgatttgtcctttttttgttttcgtttgttgagacagagtctcattctgtcactcaggctggagtgcagtggcgtgatctcagctcactgcaacctccactcccagg

SEQ ID NO: 47878 - DNA, 1054 bp, Homo sapiens
agattgtcattttcatgaagcacagctggtcagtttattgttgctcatgtatttggcctcatgttcgagtccctgtttttaatcatgagctggacacagccctctttagagcaactgtgaccacttgtggtgagaagtgcagcccacaccatccacgtgaggctcccacacgccatccacgtgaggctcccatgcagacatttagaaggcgttttcactgcagctcagaaaatggccccaggcccccatgggcacccccatgtcaccagggcctctggttgctgccggtacacagggataggcagccaggcctcgaaggtgctgggcatgggtttgggtgtctgcgttgggtagagacccggagcgcccttgctgggcgtgccctaacatcccggtaccctgtgcccctctgtgggccaggacgcctggtgctgccagctgggcgtaagccctgaggagctgagggtggctgtgacttggaggatgagtaggagctcaccaggagggcgtggagccgaggcgtttaatatcatcaggagcaacactgggctcagaaggcaggcacacttgccgtccctccagagccatggctgacggccaggcctggtgggctctcgtgaggacagtgcctgtggttgtcagatgctgtcccttcgagtaagggatgagagccatcctgaagatgggtcagctctgtggtgaccacccgttgggagcagtgacattcaggtgcgttgcactggtggctgtgtggctgtgtggtacggccaccaggagccatgtgggcaaggacagctgtgggctgggcacagagctctctctgctgggagtcagtcggtgctggggcgaggggaggcagagctcacagagcccctctacagctcaccctgcagctcggccctggccagtaaacccaccatccccctttctgccgcaggaggcagtggagaaggtgacacagcacatccacggcctgtctgggaagaaggatgggctggtgcccatgttcatcaatacccacagtggcctcttcacccacctgggcgtattcacg

SEQ ID NO: 47879 - DNA, 1024 bp, Homo sapiens
aagtgaggccgtcagtcttggtgtgatgcggggtgggctgggccgctggagcctccgcctgcttcctccagaagacacgaatcatgactcacgattgctgaagcctgagcaggtctctgtgggccgaccagaggggggcttcgaggtggtccctggtactggggtgaccgagtggacagcccagggtgcagctctgcccgggctcgtgaagcctcagatgtccccaatccaagggtctggaggggctgccgtgactccagaggcctgaggctccagggctggctctggtgtttacaagctggactcagggatcctcctggccgccccgcagggggcttggagggctggacggcaagtccgtctagctcacgggcccctccagtggaatgggtcttttcggtggagataaaagttgatttgctctaaccgcgatgtcgcctgtgtctttagggatctccatgactggaaagtctgggcggacgttggggagaaggtattcttcaagtcacgtctcagaattcggtttgctgagactggactctagctgtcccctgctggtgggcagggagaggccacggggaagctccgtgtccctggccccacggggcagatgcttggcgggaggcatccttgcgcctgcgtttcacacagggcctgtttccctgcagggctggcactgaggcgcacagctgagggatacacgggccctcaggtcaggcagctcccagcagcctggcatggctatggccccgagccctgggctgtggtggcagagttgtcctcatcatcactctactgctgtccctatcccagggctgaccctgggccttggctgggttccccccgaccctgaaccaggtgacctcttaggaccacgccccctcgctctcccctgtgaaaaatccatcaccttcacttccggaagactccccttccctgggaagccagagccggtggcggcacagggcagggctacccggacccagcccaggattgccagctccgcccctcgggacgtccgggc

SEQ ID NO: 47880 - DNA, 1099 bp, Homo sapiens
cccacagacaggaaggacgggacatacatggccaggcctccaggcgtttattcagccccttccctctgccgccagctgcttgagtgaagcccccactccatgaggagccttgagacccctccagtcctgtgctcagaggctgagtctgggccccccacgcagagctggctgctgctcacgcctggctgcctttacccactcgccgatgatggtggcctccagcttccgcgcctcaaccacggaagcaggatcttctgggtgggaggctctggggagcgggcacagagggggcccgtcagccccagccctcggtgagcctgtcccgcccgacccgcgaccaccgccaggccacctccctccgcacctgaggtcgaggtggtgcgctcccccctggatggtgacggcgatgactgaggcactcaggttcctccgaatctgtggtcagtggaaagaactccatcaggtgaggaacgaggcaactgcccagcctccgtgggcccattggagaggagacgtgagagggcgagccgagactcagtgcccatcaagcaaccagagagaaccagccagagacggaggtgggaagtgacgagatgatgggggcaaaaccgggtgagacaggagcagggaaggggcaggtgtgaggcctgtgatcccagcactctgggagtaagacaggagcagggtaggggcaggtgaggggcctgtgatcccagcactctgagggtgagacgggagcagggtaggggcaggcgaggggcctgtgatcccagcactctgggggtgagacgggagcagggtaggggcaggcgaggggcctgtgatcccagcactctgggggtgagacgggagcagggtaggggcaggcgaggggcctgtgatcccagcactctgggaggccatgcggggaagatcgtttgagcccaagagttcgagaccagcctgggcgatatggtgagactgtgtctctacaaaaaaatatttttttaaattagctgggcatgttggtgagcgcctgtagtcccagttactgggaggcttgagcctcagaggtcaaggctgcagtgaaccctgatctcgccactgtattccagcctgg

SEQ ID NO: 47881 - DNA, 1053 bp, Homo sapiens
cagccctccgtctacccaggatgcaaactgggcactgagaggctgaccaacctggggccactggcagacagacctgcagggccacttggcaggggacatccagtttggtgccagcgctgaggagccagagggctgggctgtgcagccaggcttctgggtcccccaccttctccaaattcctcctgcccagagtccacagtccttggtaacactgccttaaagcacaggggtcgccccagccaggcccaggctcttctgggaggatggaaggccccagaggcaggaactgagacagaggctggaacagccaccttcctgaggctctgaaagccctggcgtgccccctcggcacccaaactgctcctcccaggtgacttcacctctggccatgggaaggtgggggtctcattcctgtgccctcaggcacgacctccttcgcctctctgggcaccagtttcctcacatgtgaaggagagaagatggccttacccaggaaagcagccagtggtcaaatgaaaggcgggggaaacggatgcccctggcccagagcaggccaaagggagggggcacagctcacagctgcaccctggccttaccacagtctctacactacaaccaacctgtgcccaaaacatgaaccggcaaggccaggtcagagctagtccaagacctcaagcacagcctgccttgccaccacgtcaccaggtggatagacagaagcaggggacatttttgcaccccaaggcactgccccaggccacaaagagggagcaggtgaaaaataacctggaagcctcagaggaccacaagatcagcaagagtccacagggacactgaaggaaccagggcttacctggacagacacagagaactgaggcagaggggggcagagcctgctccactcccggccatgccacggcactccgtggcagcttgaagccaggaaaagcaagccagggcaagcaagcaccacgctctcgcctggggagatgaggcctttagccccaagagtgaattcttcttcatacatagagttgtttaaatttgggagga

SEQ ID NO: 47882 - DNA, 1050 bp, Homo sapiens
acctggaggaggttggaacctgaaagagaagacggtctggctgctcacataaatccctctgccctgtcagcctgagtaaaggagaagggggtcaagttttgggaaggacgcccggtccttacagccggaggtcttacgtgtgtgtgtctttttgttgaggtgaatctgattaacgagcccctggtgatatttgtttgtgcaactacaggccaaggagacccccctgacaacatgaaggtaaggctggcctgatgtggctcctcagatccctgccctcgaccctcaccccgttttcattgcctggcgtctaggtgcagtaaatagctctcctttatctcatgcaccttcagaggtggatttgagagaacgtccgtgagtggggctgggggctccggttgccctctctaataaactcgtcgtagccaccaaatagccttattatccgttttaacctttcttatttttccagggctatctatatgtgcatctagtctgggtcttgtgtgtatttctagactgtatgaccctcagggaacgttgctgaattctctgaccatcttttaagcacatattctattcttggcacagtctggtgctggggatccagctgtgaacccagcagccatatttccatcctggcagagttcacactgtagcagaagcagctaacgggcaatgacagtgccagcaaacacctgctgctggggaaagtagcatatgtcacaggagcactgataaggggcatcgagccttatctcacccaaccttggggcccaggcagaggtttctggaagaaaagagtgtaagctgagtcacggaaggatgcgtgagggctagtcaggcaccgaggaagaaggagcagtcagcgcagaggaaaaagatgatttggtttgtgtgaaaagtggaaagcagctcagggtggccaagctgaggagtacactggggcaagaggggaggagaagagaggcaggaagccaggcccagtccaaagagcctgagtaaccacagcaaggcagatgggcttgaaatgaagggttgtcggaactgtag

SEQ ID NO: 47883 - DNA, 1046 bp, Homo sapiens
gagggcacagaggggagcaggcagggtggcaaagggctgggctccagccacgctgacgtcacacaggcctacctggcgccggtccccacttttacaaaaaggcgtgctgtgaagtgttgacgactttgagcctggaggaggaccccgtatgctcctgccaccccagaggccacctctgccttttctcctgggcattttcacagtgctcctctgcaccctaagcaaggagtggcatgttcagtgtgcaaatggcatctttagaccccacaacggtgaaaaccccgactgtccacgtagggcccaggtccgctgagcaccgagcatcaaaagccgtttgcatagccaggtgtcagtcatttcagatgaaaaagaacgggaagatcggagacagctccccccggttctgccgggaggttttgttccgtgcgtgacgtaggtccgtgcatgacgttgtttcctgcgtgacgttgttctgtgtgggacacagtgttcgttcaagagagggagggaggccgctgccgacagcgttcccagggaggagcgtgacccagagccagtcatgcctcggaaccagagtgagaagagaaactgacccccgggaagatgcctggctctctccccagcacagagtttctcagctgaggagtgacccacatcttggctgggggcctggaggcctcagctgcctcaagtccctgcccagggatgagggcccatcagtgggacgaggccgcctgctcccacccacacaggctcattctctgcgagcagaggacctgctgcttggcaccctggcagctgccctggtctcggcagcccctggcgtgtggaggccctgccccctcctagggtgcggccagcgtggagtgtgttttccacccgagggaggccctccccaggctccactcttcgcccgggctccactctcccgggttccactctgcctgggcaccactctccgcccgggctccagcccaggaccagcctcactgtctccacaggttcaacttcgtggccaagaagctgcaccgacggctactgcagct

SEQ ID NO: 47884 - DNA, 1032 bp, Homo sapiens
gcgtggtacccgcctccacagtctggtctggccacacgcagggtccgctcaggccagcgcacgtgctccctcccaggcccgacgctgctgtggacccctggctgcgagacttgtgggacagggttctggggctgtacccgccgcctccgggcctcactgagatccctcccggagtcccgtgagtgtgggccccgggtcacccacaggcgcagcagacccaacctggcctggggacctcgccctgggtccctcccgtgtgggtgggcggcccctggggagtgggtcctggtctgaccagcgtgccctcccacagcctgccctccaagttcaccctgctgttcctccaagaggcacccagcacgggctctgaggggcagcgggtagctcaccccggctctcaggagcccccgtcagagtcgaagcccttcctagcacccatgatctccaaccagagagtcaccggcccctcccacttccaggacgttcggctgattgagtttgacatcttgggctctggcatcaggtggggactgctggggaccgaggagggcaaggtgaggtgggccgtgggtctggggttcggaggaggctgggccgggctgcaggggatgacttctatccggggccccgacatcctccctgcggcgtccccacagccctggtggcttcttccacacagctttgctgctggtgatgtggtgctgattcagccctccaactcggctgcccatgtccagcggttctgccaggtgctgggcctggaccctgaccagctcttcatgctgcagccgcgggagccaggtgagcccagcctcggccaccctgactctctgccctctcccgtgccctgggcccccaccccaagggctccgccgcagcccacggaggcctcccactcaccctgcagatgtctcctcccccacgaggctgccccagccctgctccatgcggcacctcgtgtcccactacctggacatcgccagcgtgcctcgccgctccttcttcgaactcctggcctgtctatccctccat

SEQ ID NO: 47885 - DNA, 1057 bp, Homo sapiens
cctctgccctggggccacctcggctgctgcagcctgcccagcagcacattccagtcactgcccccgcactcccacagggctcaggctgggctcagaggccactgagatgccagctccttgagagcagtgggggtgtcccaggccagagcagcctcttcctctcctggtcccagaaaaacccttgcagtaaatggtggcctctgggtggttacttctagcgcaggcttccttccttcctctagctcctcccggtgccctgggtgctgggtgctggatggatgggcgtcctctagctcctcccggtgccctgggtgctgggtgctggatgggtgggcgtcctctagctcctcccggtgccctgggtgctgggtgctggatgggtgggcgccacggtgcacccttgttgggctgcctgtgcccgagtggcctctgcagctcttatgtctgcctctaatgggatgtgcgccctgactgcctcgttcttaagggcatagtgggtcggctaagatctgatcgccaggactgcgttctgggcaggtgctgggaaggcggaaccaagccgtccgtgccgctagggagccgagactgccggaaagaggagcggcaggagggggcgtggttgtgcagccccacccccgggaggggctttaggcactgggaaggaaagtcctgttggaggagttcggtggctgttcacacccgcctcgctgtcttggagtcttgatctgtcgtcggcgggtcgctggcacaggactaaacatggctgaggctgggctccagccagatctggctggggacagcaccgcgtgggcccaggatccacccagagcaggcaggccttgctggggccccagtcaagtccacttccagtgaggagagccagccgggaggtcagtgccagagctctggtggagcccagaccctgccttccctgagggccgcccctgtcgccgccctggggtccctgtcctcctatcctgactcctgccccagggccaccacccctgaactgtgccctggggcccccaccctccacctggccgactccagctctggg

SEQ ID NO: 47886 - DNA, 1647 bp, Homo sapiens
gtctacctggctgacaaatgattagctgtgttctctcacaggtcagagtggtgctgggaacaactgggccaaggggcactacacagaaggcgcggagctggtggactcggtgctggatgttgtgagaaaggaggctgagagctgtgactgcctgcagggtttccagctgacccactccctgggtggggggactgggtctgggatgggtaccctcctcatcagcaagatccgggaggagtacccagacaggatcatgaacacgtttagtgtggtgccttcgcccaaagtgtcagacacagtggtggagccctacaacgccaccctctcagtccaccagctcgtagaaaacacagacgagacctactgcattgataacgaagctctctacgacatttgcttcagaaccctaaagctgaccacgcccacctatggtgacctgaaccacctggtgtctgctaccatgagtggggtcaccacctgcctgcgcttcccaggccagctcaatgctgacctgcggaagctggctgtgaacatggtcccgtttccccggctgcacttcttcatgcccggctttgccccactgaccagccggggcagccagcagtaccgggcgctgaccgtgcccgagctcacccagcagatgtttgatgccaagaacatgatggctgcctgcgacccccgccatggccgctacctgacggttgccgccgtgttcaggggccgcatgtccatgaaggaggtggatgagcaaatgcttaatgtccaaaacaaaaacagcagctattttgttgagtggatccccaacaatgtgaaaacggctgtctgtgacatcccacctcgggggctaaaaatgtccgccaccttcattggcaacagcacggccatccaggagctgttcaagcgcatctccgagcagttcacggccatgttccggcgcaaggccttcctgcactggtacacgggcgagggcatggacgagatggagttcaccgaggccgagagcaacatgaatgacctggtgtccgagtaccagcagtaccaggatgccacagccgaggaggagggcgagttcgaggaggaggctgaggaggaggtggcctagagccttcagtcactggggaaagcagggaagcagtgtgaactctttattcactcccagcctgtcctgtggcctgtcccactgtgtgcacttgctgttttccctgtccacatccatgctgtacagacaccaccattaaagcattttcatagtgtgtggtttcgctttgcccattccttccagtaggccctccgggtgctgttgccgaatgtcagggcgtagttgtcctgcatggctgcggggagccaggctgcagctgagctgggcttatgtgcccaggaccagcatgggctggacacccaggcttcagagaagtgtggggctgccctgggccctgggtatctgcttggtggggaacttgcttgttgaaggcaggcctgtcctgttccaggtacccaaccttggggctcggcctgtgtctgggacttaggtgggtccagtgaccccccttccaaaaggggtagggaggatggcagacaatcctaccccaaccaaggtgggaccctggtaatggtcagacaggtggtcctgaaccagcaatgaagggt

SEQ ID NO: 47887 - DNA, 1376 bp, Homo sapiens
ttccacgcttatgtacacgaaattcactcggctgcgacgacgtccgttcccggagcagacggaccctgagtccgccccccacgccctcacccgccctcttctgccagaaagcccgggcgcgggcgggaccgggtgggcgcatgcgcgctgggctggctgggcggggtctctcgcgccgggtgagggcgctgctcccaggaacctgcgcgcggccccggcggcgtttcccgggggccggttggcgggcggacctgggcggtgcggggcggaagtgggcggctgcgggacgcgcgcggagtcgcgcggcgggcgggacctggccgagctggagggcgccggggagcggggctcgggcggtccccgaggcccggcggagcgggcttctggggtgtctgcggcggcgccgggggaacgggctggggatggggcgcctagccgggcggtggccggggcctcggccatgttcgcggggctgcaggacctgggcgtggccaacggcgaggacctgaaggagaccctgaccaactgcacggagccgctcaaggccatcgagcagttccaggtggggcggcccccggggcggggggagcccagttggagggccgggccgcctgctcgggagtcgggcctggcggaggcgccggaagttttccggctttctgctggtggctgagtcctgttctgggggtggagtccggagccagcacccctttgctggacggctgggtggctttcggtggctgcggttaccgccagcacggctgggaacacctgggtgcgtgcctccctgtgctctcaggacctcggggtgcccgggcgcactgggctgcgtttgaggtttctcttggcttcctcagacagagaatggtgtgctgctgccatctcttcagtcagccctccccttcttggacctgcacgggacgccgcggctggagttccaccagtcggtattcgatgagctgcgggacaagctgctggagcgagtgtcagccatcgcttcggaggggaaggctgaggaaaggtgggtcagcgggaggggtgggcaggtgagatgtgcagccggcctctcagccttggatcgactcaggggcatttattgtccttttggctccacatccttgctcccagaggtggcctgggcctgtgtctgagtgaccccttgacccatgtgtcctgggcgtggaggcttgtcctggtagctgttatctgtgtagggacaggcaggtagctgctgcgatttggcgcatcgctgcaccatcaatcctgtgagttgttccaggtacaagaagctggaagaccttctggagaagagcttttctctggtgaagatgccgtccctgcagcccgtggtgatgtgcgtcatgaagcacctgccc

SEQ ID NO: 47888 - DNA, 1052 bp, Homo sapiens
tgttggtatttagcatgtctgtctgacatgctggggccggggaaccagtcataggtgccctgtggggtggagcttagctcgaggtggtctctgcggggctgaggcctcttggcttgtcttgaaggagacccagggacacaggtgccactcacaggcagcctgtggtgtcatgtaggttccggagaaaaaactgaagctggttatggctgacaaggagctgtatcgagcctgcgccgtggaggtgaagcggcagatctggcaagacaaccaggccctcttcggggacgaggtttccccactcctgaagcagtacatcctggagaaggagagcgctctcttcagtacagagctctctgtcctgcacaactttttcagtccttcccccaagaccaggcgccagggcgaggtgaggggacaggccgtgtgcggggtggggcacctcttggggatgccacggctagcgccttcagctgcctggggatcagcactctgctgccctgtgaatgatcgggtggttctgcttcttggctgggtggtgggggagggctggcttgtacacatgctggaaagaaagttggttgtttttctgtttgcattttacttttcgttaaagtgatatatggacaacatttaaaatctgcggaaagcccgctcatgtgaagttaatcccccctcccctactttttttctttttctttgagacggagtctcgctctgttgcccaggctggagtgcagtggtgtgatctcggctcactgcaagctcccgggttcactccattctcctgcctcagtctcccgagtagctgggactacaggcgcccgccaccatgcctggctaattttttttctttttctttttttttttttttgagacggagtttcgctattgttgcccaggctggagtgcaatggcgtgatctcggctcactgcgacctccgcctcccaggttcaagcaattctcctgcctcagcctcccgagtagctgggattacaggcatgcatcaccacgcccggctaattttgtatttttagtagagatgggatttctc

SEQ ID NO: 47889 - DNA, 1043 bp, Homo sapiens
tgctgtctttgttgtgttttggtgtctggcttcagaaaagaatgtggaagagtttcgttctctttcctgtggttcagtgtagctggcagtcagggagaactctctgcagctggcgccggccctgtatttgttaggcttgtttctcctgggctcggctgctgggcaaggccttttgggactggaggagcacctcgtttttctgtctccttcttcctccaccctcctcctgtccccgggctgtctccccctccctccaccctcctcctgtccctgggctgtctccccctccctccaccctcctgtccctgggctgcagctctgcttccctgccacaggtcccaccccctgcctgcctctgtccacttcccacccccctcttcacctgctgagaccctgtgcttctcatctcagaacaactgagaactctcatgtgagcacccccagaagtaggttctgaggtctttgaggacaagggtgccctctggggtgggcagggtgagtggcactgggctgatgcctgctgtgtctgcagtggagacctttggcgacttggcctttggcgacatcttcctccacctgctcacgggcaaccttgcgctgctggccgacgaatttgcccttgaggacttctgcagcagcctcttcgatggcttcttcctcaccgcctctccaaggtaggcctgctgggtaccatccggcccgctctgtcctctcagctcttgtccgtagcagcctgagaggtggctgctgtccccagcctggggcggagggtccgcaggtgggtctgttgggcaccagggctcgcatgtggccctgcagggtgcctgggcacagctggggagggtcccaaaggctggccatgtcctgtctccaggggccttggccacctgcatctgggctgggcctgggcagacagcagggcctgcctcctgccccagccctgcacggccttttccaggaaggagaacgtgcaccggcacgcgctgcggctcctcattcacctgcaccccagggtggccccgtctaagctggaggcgttgcag

SEQ ID NO: 47890 - DNA, 1009 bp, Homo sapiens
aagctggaacagctggatcaccggaagcccagcccggcacaggctgcggagacgccggccctggagctgcccctccccagcgtgcccgcccctgccccgctctgagggccctccagacctgctcgggtgctggggccatgccgagtcgcggccctgctcagccggaagaggctcccggacctggatgtacagggcagtctctcttcccggggctatggctgggcctgtcctgccgtcatggccccctgcttcctgctccttggagctggctcccggaccttgcccaccatccatgcagtggctcccagggcagagcctctccttgtactttggcagccatagaaagcgtgctcattttctgttttcctgtgttaggaaaaaaccacctgttttccaaggggagagggcggggcctgagggtgggggcggggcctcttcattggcccagcttggcgaaagcgaggcacactgcttactgccttggggttgtggagatggacccgtgacctcgtggaggccgtgtgggggcagcagcctggcctgtgccatggtgggtgtcctggggcctgtgcggagggagccacctcaccctgcagcccagtttgcaggtgtggccttgtttctccttgcccagcagtgctgccttcagcggccgtgacggggccagctggacacacggtgagattttctcgtatgtaaataaaaggcattttggtaaacgtggaggctgagatgtctctgtgcctgccctgaggttggatgtagctcagatggacacaggcatttgtgctatggagccaatacttggggctttgtgggccacagcctctctggactgctcagccctgtctgtgaccagcagctggggacgatataataatttctgggggaggttgatataataatttctgggggaggttgataaaatttctgggggaggatataataatttctgggggaggttgatataatttctgggggaggatgatataataatttctgagggagg

SEQ ID NO: 47891 - DNA, 1064 bp, Homo sapiens
cccgagtcgagcgcacacggcgggcgcccctggcaagtgggactcctccggccccgaggcctgaactcagcccggagaccgcgcccaccagcgccggtgtccccggaggggccccgctagttccctgagcagaggtcctgcggcttcccggagggtgtcctgttctctcccccgcctcgcatccattctcgccctggtggttggtgtctgtggtcgggggcgagggccgtctagtggagacggggattcaggccgcttgaaagtctgggatctctgggcggatggcagcggctccgcggagctcgagctcggcgcgcaggtcctgggcccagggcgggagcgctagcgagagggctgccccgtcctgcccagagggtcctgaggactcccgctgctcctggagtcttggggaggggtccggctccacggggtgggggtgggggctaccaggaaacctttgcctcctggggctgtgcaggaccggctagccagcgctgggaaccagggctgagttcagcccagctctgtccaccccaaccccagggctaggggaaggagctgggagaaggagccccacctctcccaggcgagtatctgtcccaggagcccacacagagggacacccagctctggtctggccttcgtgttggcttcaaggtggtaacagagagagctgcagagtgggggtgtgtttgccagtccctgcatgggtgaatgttggggtgcccactgctccccaggcaggacccccaggactgtcagctccccttcccacagagcacccacctggaggtgtcacctgccggcaagcgtgggccattcatccacctgtcagtcaacaacacccgctgagcatcggcttgtatcaaaaggtccagacctaaggggaaattttatctctttctttctttctttcttttttttttgacacagagttttgctcttgttgcccaggctggagtgcaatgacacgatctcggttcactgcaacctctgcctcctgggttcaagcgattctcctgcctcagcctcccgagtagctgggattacaggcgcccgccatc

SEQ ID NO: 47892 - DNA, 1046 bp, Homo sapiens
gtgggactctctgcccagctgccctctccaatcccagagccctcgagggcagaaccaggtctgggtcccccgtgggccacctcagctggcgtgttggacacagggcccagccttaaggggtcagcgtgggcagccccatagttgccccaacccctgacctgtccatttccacatccacatttccctgatacctgcgcctcccactgccctggggcaggtgtggccctgaaagtggcgagggggctggagcaacaccactgtgtgccttgtccagggcacaaaacgggcccccatggctgcattattattattatttttgagatgcggtctcattgtcacccaggctggaatgtagtggcgcaatcacagctcactgcagcctgaagccccggggctcaaatgagcctcccacatcagcctcctgagtagtacaccaccacactcagctaatttttgtatttttcgtagagatgaggtctcacgatattgcccaggctggtcttgaactcctgggctcaagtgatctttccatctgggtttcccaaagtgctgggactccaggtgtgtgccacgcccagcccctctgggtggtttctgagtatgaccaacctgccaggcttactgcgatgctgggggtgggggcagggaggccgggaggctaggaccagcttacacccgagtcctgacttggagcggggtgcacggccttcccagtggtcacttcctggacaaagagacgggtcagatacccaggactcccctggcaatgccaggagggggctgggtgcccactgagagccaggtcccaggcaggcacctgcaggtcctgtggaggtgtggccttcccgtcacagcccttctgatgtcagagcaccctggggaggaggtggggcttccaggccatctgtgcaggggagcagggaagaggaggccgagatccatggtcacatggctattccaggacccctccccatgcaggggctttgggttgagccccagatgacatggctgccgcaggcaggtggcctcgaggcccctggagcctc

SEQ ID NO: 47893 - DNA, 1053 bp, Homo sapiens
gactacaggcgcgtgccgccatgcccagctaatttttgtatttttagtagagatggggtttcaccatgttggccaggctggtctcaaactcctgacctcaggtgatccgcccacctcagcttcccaacatgctaggattacaggcgtgagctaacatgcccggcctgtaatgcagttctttagctgctgactctgggatctggactgcgttatctcgtctccagtatgtgacagccaaggttgcctgaggtcaggagtttgagaatgtcttgaacccagaggcggaggcagcagtgagccaagatcgagccactgcactccagcctgggtgacagagcgagaccccgtctcaaaaaaaaaaaaaaggatttttaaaagacaaaaatcttgcataaccccactccccagaggtaactattattaacatactggaacacttttttctggcctctgtccttgtgctcatggtaaacacattggttttagcagcacctcagtgggctctgcgccttggacgggttggggttgggtgggctgtggcaacctgagtggcgacagccctgcccaggcaggggctccgaaggttcctggacaggagcaggaggggctgtggggggtccccaggggctgacggaattccgtggccctgtcacccatcacgctgtatctgtgatgctgcgtgaccaggttacagaccttggcatcccgtgggcatttttgtccccaggcatttgaccaagccgtgaccaaggacacctgcatggcggttggcttcttccagcgaggagtggccaacttccagctggcaaggtgagtacaggggtgccttgttccttctctgacggccctttgtctccctgcagagtccactcctgcacctcctcctcctccctctccatccactccctcctcttgcccaccccctcctccatggttcctggctccagggaaacctgagactgtggccctcgcctctgctgagcgccacccttggacacaggtcgtggggtcctcactgcttacctgggctctctgcaccatgtcccttcctaa

SEQ ID NO: 47894 - DNA, 1024 bp, Homo sapiens
aagatccatcaaaggcttcagggaccaccacatacgcagtcgcccagagagcccggatctggagatattttacctttcagaaaggcagatgaacgaaaaagccatctcttcctttactgaagagtcccagcattcgggattatggctgtgggactgtccctttctggattacgatccagacccctctggggcagcctctccttcacatcggcgcgggaagcccgcctggaggagaggcctctccggcaggcgctggggagctcccagcaaggcttggaaggaggctcagagtttggagggggagcccccatggggtggggggcctgagaagcaggagggaaataaccagggctctctgcacggttcagaagagaggcttgggggcgggcaggggcccaggaagctgagtctgagctgggaaaatggtggagccccagcacacagtgacccccacacccactcagcacacatgtgcatggacccctggcccaccagacctgagtgtgcagacctaggcaccgcactgccctccctcaggtctccttggaaccaggtgttgggggcggctcgagcggggctggtgtgaaagctgcctaaccacagccccatctccgccctgtgctgctgaggggaccccggctgcccacaggttccaggaggctctgtctgacttctggctggccctggagcagctgaggggccacgctgccatcgactacacgcagctgggcctgcggttcaagctgcaagcctgggaggtgaggccgggcagggctcactgtgctgctggctgtggggtgtccacgggcggtggcactgtcacaggagggccctgtggactggggagcgcctctggccgaagctcttggtgccatggaataccctggccactccttgacccgcaggaggttctggtggcagtggaggtggagggaccattttgtgccatttcaggccaccaggggtggctccacccagaaggagggcagaggcgaaaggctgctgggtgggcagggagcaggca

SEQ ID NO: 47895 - DNA, 1038 bp, Homo sapiens
ccaatttcatgagatgaagaagcttccggagggagatggccctagtgcccagtttcgggtgccaggcgggggcttcctgtgacctgcgggaagggggtggggggcccaagcggccccttctgctccaaggcacaggggctctgcggctgcaggcctggttggtcaccccgtctgcatctgctggatacccaccccctccagagacggggctcactgccgccacggcaggtccccaggggcgaggtcttccggccccaccggtggcacctgaagcacttggagcccgtggatttcctgggcaaggccaaggtaaaggtggggacggcgtcctggggcatggcggctggtgctgagccctcgaactgtgttcccagggatggggggaggtgcagtccaggccaccgtaagggccaggagggtagagagtgggcccacagccatcctcaaactggcgcccacggtaggggggcggtgccccaaatggggctgtgagcttgaaggcagagcccactagagccggctgcataggagggggctccagctctctcaacaaggaccctgcaggtgccaccccgcccccagactgggccatggccacagccacagccttgcagcctcccagagtccctgcgtctctctgcgtcctttcatgcctttgtgtctccctgtgtccctgccacagacagcgaggtcccgggggggtccctgcgtccctgccacagatagcgaggtcccgggggggtccctgcgtccctgccacagatagcgaggtcccggggggggggggtccctgcgtccctgccacagatagcgaggtcctggggggatgcctgtgtgcctgccacagatagcgaggtccccgggggggtgcctgtgtccctgccacagacagcgaggtcccaggggggtgcctgtgtccctgccacaggtagcgaggtcccggggggggtgcctgtgtctctgccacagctagcgaggtcccggggggcgggggtgcctgtgtccctgccacagatagcgaggtcccggggggtctcc

SEQ ID NO: 47896 - DNA, 1053 bp, Homo sapiens
acttcaaccatctgataaatctaataataagttacaatcgaggccgggcacagtggtctgtaatcccagcaccgtgggaggctgaggtggaaggattgcttgagcctgggaggtggaggctgcagtgagccatgacagtgccactccactccggcctgggcaagacagcaagaccctgtctcaaaaaaaaaaaaaaaaaaagccaggcgaagtggctcacgcctgtaatcccagcactttgggaggcctaggcaggcggatcacaagatcaggagatcgagaccatcccggctaacatggtgaaaccctgtctctactaaaaaatacaaaaaattagctgggcatggcggcgggcacctgtagtcccagctactcaggaggcagagccaggagaatggcgtgaacccaggaggcggagcttatagtgagccaagatggcgccactgcactccagcctgggcgacagagcgagactccctctcaaaaaacaacagcaatgcctgaccctcagggtctagccagcgctgggctgtgactttgtgacttgcagctggtgaactggtctcctgctcagtgcccaactcagggcacacggttaatgtcgagcccacacagaggccggggcccagggactgggtcctcagcttcctggggtcactggggagcccacccacctggagctgccacctcggtgggccttgggggacggggcgctccctcctggtgacaggcagcctctaggtctgcagggacccagccccatcctaaggcagccgacttgtggccagtgccctgaattcaacacccacagaccacctgctgggtgctggccgggcacacaggccacacccttggtgtgggctctgcgaggacagtaccggcctccagcacctgaccgccccagcccacccagcctgtgcttctcttgcagaggccccaggtggagcaagttggcaaacaggctcctctctccccaggtatgggcgtcctcagcggcggggtccccgggtgaaggaggaagctgctggtgcatgggtgccggctgccctccac

SEQ ID NO: 47897 - DNA, 1028 bp, Homo sapiens
gaggctggaagaggggggaggtcaggagcacattcgtggtgcaggggacatggcactgatgttcacccatggggacgatggtggaaagggatgaggcattggctgcagaggagaggggatgacgagctgtgtcggacagggcggtgcaccttggcagtagccaatgtgaaggttctagaaaggctagtaggtgtgttggtgggagtttggggaagttcttttttttctggggtgaaagggtccccctctgtctcccaggctttagtgcggtggtgcaaatacggctcactgcagcctagacctcctggggtcaagcaattctcctgccttggcctcccaaagcattgggattagaggcgtatgacactgtgccgggccaagagagtttattcagatcatctttcttttgttactttcactttctcataaataactgaaagaagtcaattggccctttaaactctatgtcaggaaagtcagatcacagcatgcactttctgtccgccacgttccacaggcaatggtcttgctggaaggtaaatagtctacactttctccagcctgcaatagcaactttctcatgacccctcctgctgcatggttccaaagtcaacgccatatttaaaaatttttggggccaggcgcagtgtttcacacctgttatcccagcactttgggaggctgagatgggcagatcacctgaggtcaggtgttcgagaccagcttgacccacatggagaaaccccatctctactaaaaaaaatacaaaattgtcagggcatggtggctcacgcctgtaatcccagcactttgggaggccgagatggggggatcacaaggtcaagagatcgagaccatcctgactgacatggtaaaaccccatctcaactaaaaataaaaaaaaaaattagctgggcgtggtggcacatgcctgcagtcccagctactcaggaggctgaggcaggagaattacttgaacccgggaggtagaggttgcagtgagctgagattgtgccactgctctccag

SEQ ID NO: 47898 - DNA, 1020 bp, Homo sapiens
gtgttggcctggcgcagtggctcatgcctgtaatctcagcactttgggaggctggggcaggtggatcacaaggtcaggagtttgagaccagcctggccaatatggtgaaatcccgtctctactaaaggtacaaaaattagctgggcatggtggtgggtgcctgtagtcccagctactcgggaggctgaggcgggagaatctcttgaacctgggaggcagaggttgcagtgagctgagagtgcatcactgcactgcagcctgggtgagacagtgagactctgtctcaaaataaaaaaataaaaaaaaaaagaaggccggtcacagtggctcacacctgtaatcccagcactttgggaggctgaggtgggcagatcacaagatcaggagagcgagaccatcctggctaacatggtgaaaccccatctctactaaaaatacaaaaaattagccaggtgtggtggcaggcgcctgtagtcccagctacttgggaggctggggcaggagaatggcgtgaacccgggaggtggagcttgcagtgagcagagatcatgccactgcactccagcctgggcgacagagcgagactccgtctaaaaaaaaaaaaaaaaaaaaaaaaaattatggcagtatctcacttctgagcaccaatttctgttccaattatatctattgcttcataacaaaccaccccaggccaggcgcggtgactcacgcctgtaatcccagcactttgggaggctgaggtgggcggatcacctgaggtcaggagttcaagaccagcctggccaacatggcaaaaccccgtctctactaaaaatatgaaaattagctgggcatggtcatgggtgcctgtagtcccagctactggagaggctgaggcaggagaattgcttgaacccaggaggtggagattggagtgagccgagatcgcaccacttcactccagccagggcgacagagtgagactgtctcaaaaataataataataataataataataataataataataataaacca

SEQ ID NO: 47899 - DNA, 2414 bp, Homo sapiens
tcggcggcgccggggaggtccgggcggcgccgcccttccgcgtctgcccttcctgccctctcgccgaggggcggcggggtcccggcggggcctgaagcgggtccactgtggaggacgccctgagcgcgggcgcacgcaggcctgcgaccctccccgtccgcgctcgcacctgctgggctccttcccgcaccctggctcccggcgcaggcgctcccgctgcagagccgctcctggcgcgggcgtgcggtcccggcggggtgcagacacctgctgcggctccctgcgccccctgccacccgccagcaggcctcgccggccccccgccgaggtggacgcctgggcctcggggactgggtatcgggttgctgcagtggccgctggcagggcgccctggaggtgagggccggcccgcgaggtgaggctgcctctgcccggcccttggctgtgagtgccgcgtccctgccggggacttctctaccttggcctcctgtgggaaccacctgggctgcttggcctgtgccacagcccctggacttgccgctggaccttgaccgctgggcccgcgcgtgggtaacagcaccgattttgtgcctgctgagaacccacagtctctgttctgtcctctcagcctcctgggacaggtgatggtgctgtggccctgaccctgcaccgcctgaggctgtggggcctcggaagaagccgggtggtaggtgcttctgtcaggctcctggccccactgggcctcctgggatgaccccacagcctcccttcctctgtcccaaccttgagtttggggtctgggtgggggcaggtgtggccgtggcagggcagagatagcacacacatctcttgggtacaggtgtggtgtgtggtgaggccggctggatcctggttgagggctgtgcaggaccctgtcgtccttcccctggcgtggcctggggtgagcaggccattgcttaccacagggaagggacggccccgcggtgcgtgactggcctgggtgtgcaggctcccctggcctccgggtggacgtggtgggtgggttgaatgctcacgcctgtaatcccagcactttgggcagctggcccaagagccgagggagcactggctgatggtcctacctcacagaggctggtctgaatgagggagaaaaaggagggtcgtgagctaaggagtaggagatgggccctgatgggccagagagcacatgattcaggctgctgcaagtgaggtgggagggtgtaccggggcccccgggggtttcccccagccctgcctgggatgggaacagaaggaccatggtttcttttcctcattcagaggatgcttgtcaatcctgctaggagccagtagggaggccctcagcccccaggaggacagcagccctgcctgggccccagagcttgctcacttactctgccgatgagtgtcggtgacagtcagcacccagccgtgaggacaccggctgtctaaagggctgacgcggagggaggcctgggagggagcagttttctggagctcaggctggcccagtccagggctggggttcaggcaggaccacttcttgttctgctgttactgggatgggcgaccagggccgacagtggttctcggagcactcatggtgggcccgatgcaattctctccacgtgccacgggccagcctcagttaaccctcagcgccctggcaagtggcacggttgttactctcatgatacagatttggaaacaggactgggggagtggcttacaggtcacagcttctgtggcaggcgtgagtcctttgggatgaggatgaggagtgggtgggtcttcatggtccaagtgcaggtggtgcaagggaggggctgctgaacaggtgggagccccagctggagaagaaagttccagtggtcacttgagaacgcagcccagtcatgatcttccttagagtcagagaggcctgcagcctccagcagcttgtccttgcttgtgcatctgaacacaggaaacattttttatttttatttttttaatttattttttcgagacggagtctccctctgtcgcccaggctggagtgtgccggcgcgatctcggctcactgcaagctccgcctccccggttcacgccattctcctgcctcagcctccttaagagctgggactacaggcgcccgccaccacacccggctaatttgtgtatttttagtagagacggggtttcaccgtgttagccaggagggtctggatctcctgacctcgtgatccgcccgcctcggcctcccaaagtgctgggattacaggcgtgagccaccgtgcctggccaggaaacattttttaaacctgcatgggggaggagggacagggcttgcagggcccctgcaaagaggtgcaacgttcaagtccagaaggcggaagaagtcacactctgac

SEQ ID NO: 47900 - DNA, 1033 bp, Homo sapiens
ggccctgactcagccctgcagggagaagaggggctggaggtgcaggtggcctgccactgtctcccccaacccctgcccacctgggtcttgtgctgtgtgtacttctgctgcgtctgtcctcccttgtgaccagcttctgctggacctgattgtccagccatgatcttctgatcatcatggtttctggacacacatctgttggactaaggaatttgtgttcctggccacagaacagtgccacctctgcctcaagcagttcctggtctgggcactcccccagggaggccggagaggactgagccgtctcctgatgcagaaagtcagccccgctgggcagtgctcgcccaggaagtagggccccacccaacggtgtgctgactgtggaacactgtgtctgcctaggcgggtctggccacattcctgcagcatgatggttggcagttagcttcctggagtgtggacgggtccttccctgcctgactgacttgtccacagggcagcaagaagatgcgccccttggtgtgtcccgagtgtctcctgtaggcagctgagctttcgcaggtctggctgggagccaaggttaccaatctggggggtaacccagccatcatctggatgagcgttggggtctttctgctctggattgcagggcagacgtcgttttgtgctggtcaggcccctcgcctgcctgattcccttggagccccccaagacaggagatgggcagatgtcctctgaagtggcatgggctgcttgctcactggccttcccaggaccctgcccaggtggtgctgcttggccccaggtcgaattcctgtgctggcagcaagcaggggcctgggccgtcggctggctggggctcatgcagccatcccctttgcagccatccgggtgacctgcataggttcctgcggggtctccaacaaggctaatgacacagcgtgggtagtggaggagggttacttcaacagttccctgtcgctggcagacaagggtaagtttgggagccagttcccgagtggtgacccctggg

SEQ ID NO: 47901 - DNA, 1047 bp, Homo sapiens
cagcgatctgcctgcctccgcctccctaagtgctaggattacagacatgagccattgtgcccgtcctgttgtttcctgtttagctgaggaggaagggttagataacttggccagtcggttgtaggaccagcactagtacagtgttgggcacgtagtaggtgtttaatacatgaccgatgagcaaatggctccagatgtctctggttccataggcagccttgaatagggctttacacacctgatgagaatgacagcctgtgttgactgagccctgacttgtgtccaaccctgccatagtgccagtgccttgcatgaattcaataatttgagcctagcagcaaccttaagaggtaggtactgttacctccccgtttataaatgagaagacaggcgcagtgaggcccaagattgaagagcttgtggccaagaagatggagttgcaggtggtttggccatagagctgatgcttgctaaatgtgttatatctgtgatggtcattttaggttaataaaagctctgtttttagattgataattctaagggtttatcatcaaggtgtatgagaaggtgagggagcccctgtgtgtagcgcagcaactctggccttctggacagtaggtaggcatgtgatcactgttgtcactaaacctgggaaatgattcctgggtcagggttcattaattgccaaatgattaaagtaataaagctgacactggaaacttatctaacttcatttcttttccttgatttacaaagatagtcaatacattttcctaccaaaaagaactggccagccgtggtggctcatgcctgtaatcctagcagtttaggaagccgaggtgggcggatcacttgaggtcaggagttcgagaccagtctggccaacatggttgaaaccctgtctctactgaaaatacaaaaattatctgggcatagtggtgtgtgcctgtaattgcagcctgggcaacggagtgagagactgtctcaggaaaaaaaaaagaaaaaaaactactgaggtagttgaatatatcctccattccccatttg

SEQ ID NO: 47902 - DNA, 1021 bp, Homo sapiens
tctgatcacagtatatttaagatgctgttttgagcactttctgtttatgcagtgcaattctaggtatttgtaagaggacatacaaagttttgagattgatccctgatgttacaaaatttaataatagaacagagcaaatattactgagtaggaaatgagagtcagttaaaagtaaacaagaagaggctgctggatggccacaattgctgcggccacatgtgtggggaaaagttccttgaggaagatgagttagtctaggtcttttttttcctttaacagcttcttgtccaacacatagtctaggtcttaaaggatgtgagacatgaattggcatgagaaggtggacaaagtgtacattaacaaaaattaggcattttagcaaatttagaaatcaaacctagaaacctcaggatgccatatatttgtcatctgtttttttcctgatcctcgtgagtgtatgtgtttttatttaaaattggtggtaatcagtgattatgtgccgttgtacttcctctgtcccgtattgtctgacgtgcattcgtatcttcagtgtttttggtagctgcatggtgtgtgacatagaaaagtcccagtttcctcgactgtgatttgggtgaggtctgtatcctttggtgcacagtggaattacaaggtcagaaggggatagtggcatgagatgaagctggagaggcagggcaaggttatccagggccttgttaccatggtaacaagttgggaagtttcataaccactgtagacagtccttgaagattttaggcatggaatgatactttaaaaagatgaccctggctgctgtgtggagagcggaagtagggggccagtgagcaggcttggcttgagtggtatgggttagtcatgatataggtgtttagatttaattttttgagcatataggacagttacatggttcaaaattgaaaaagtatggccgtgtgtggtggcttatgcctgtaatcccaccactttgggaggccgaggcgggtggattgatcacctgacg

SEQ ID NO: 47903 - DNA, 3148 bp, Homo sapiens
tgttgcccaggttggtcttaaactcctgggctcgagcagtcctcccgcctcagcctcccgagtagctgggattacagatgcgtgccaccacacctaggtaatttttgtatttttggtagagacagggtttcacaatgttacccaggctggtctcgagctcttggactcaagccatctgcctgccttggcctcctacggtgctgggattacaggcgtgagccactgtgcccagcctagaccactttttagggattacaggcgtgagccactgtgcccggcctagaccacttcttcaagcatttaatgactgttcctttgatcatattcctgggtatagcatcacacggggcaggttgctaacctaggtgggctgatggagctgtggagaccatgctaatgattctcgtccttgcaataagggcagtaggagggtttcaaggcagggagtgacctcatcaggtttgcgtgttaggctctggcttccttcctggtcttcctgctgctgtgtgaagaacggattgtagacggatggcagtggaggcagcaaacgcagtcctcagggagtgggtggtcaccggttatgtggcagatgaggagggcacaaggatgacttgtgggactaggccggagccaaatgctgggttctctgcttgaacggaagggtgggtggccgtgccattcacccggacagggaaggcatgctcaggtcagctctggggtggtttattccaggggtggcaaactctttctgagcaggctggatagtatttcagactcatgcaccaagaagcaaaatcaaggataactccacaaatttttgttgacaaagatcaaaatataattgactactttttttttttttgtaatacagatctactgattagaagaacagaatttttggggggataacattttgcttaattggggttcaatgttaatgttccccatcataaaaattactggagctgttcatctgttaagtgcttactgtgacacagttttctgtttcatctttgaaaatgtcttcacaccgatagctgttgccatattccagtatcagtccaggagcagatgatttatttttattgagatgtaattcatttactataaaattcacattttaaaatgtgcacctcagtggggttctttggtatgtctggagtggtccaaccattaccactacttccagatcattccgtcattaccactacttccagatcattccgtcaccccaaaaagaaacctcatacccattagcaggacttccctaatcctccctccccgacccccgacactgctctacttttttgcaaatattttttctcattctgtgggctgtcttttcactttctaatttttttttttttttttgagacagtctcgctcttgtcgcctaggctggagtgcaatctagtctcactgcaacctccgcctcccgggttcaagcgattcccctgcctcagcctcctgagaagctgggattacaggtgcgcaccagcacgccggcttatttttgtatttttagtagagtcagggtttcaccatgttgttcaggctggtcttgaactcctgacttcaagtgatccacctgcctcggcctctcaaagtgctgggattataggcatgagccactgtgcccggcctaatttttattttcttgatgccttcctttgaagcacagatgtttttaatttttgatgaaatccaccttcttgttttccagttggtttctttgcttttgttgtcgtgtctgattgcccaatccaaaccagggagtttatgtttccttggaaaatttgcatagttttagctcttacatttaagtctttgatccgttttgacttaatttttgtatatgatgttaggtaggatccaggcttcattcttttcatgtacagttggctcagcagcgtttgttgaaaagaccatgctttccccattgaattgcctggccatcgtttttgaaaatcagttgaacataaatgtgatggttaatttctgggttctcagttctattccgttgatgtatatgtctgtcctaatgcgagcattgttgcagcagtgtaataagttttgtaatgaggaaatgtgagtccttcaactttgtctttttcatgattgggtcccttgcattttctttcatttcttttcttttcttttcttttcttttttttcaagattgggtcccttgcttgcttgcttgcttgctttttctttcttttctttctttcttctttctttttttttttttttgacagagtctctctctatcgcccaggctggagtgccgtggtgcgatctcagctcactgcaacctctgccttccaggttcacgccattctcctgcctcagcttcccgagtagctgggactacaggcgcccccaccatgcccagctaatttttttttttttttttttttttttgtatttttagtagagatggggtttcaccatattagccaggatggtctcgatctcctgacctcgtgatccgccggcctcggcctcccaaagtgctgggattacaggtgtgagccactgcgcccggctgtcacttggattttcgtatgagttttaggatcttgttgtcaatatctgcaaaaaagcctttcaggatcttgaaagggattgtgttgaatatgtagatcagtttaggatatcgccatcttaatagcaagtcttccaattggggaacaccggatgcttgtccatttatttaggtcttctattttattttattttatttatttattttgagacagagtcttgcactgtcacctgggctggagtgcagtggcgtgatctcgggtcactgcaacctccgcctcctgaattcaagccattctcctgcctaagcctctcgactagctaggattacaggcacccatcgccacgcccagctaattttttttttttaatgtatttttggtagagacggagtttcaccatgttggacaggctggtcttgaacttctgacctcgtgattcgccctccttggcctcccaaagtgttgggattacaggcatgaaccactgcgctcggccttcagttttctttaacattttcagagctgggcgcggtggctcacgcctgtaatcccagcactttgggaggccgaggtgggtggatcacgaggtcaggagatcg

SEQ ID NO: 47904 - DNA, 1055 bp, Homo sapiens
ggccccaaattttttaatctattcccccagtctctacttttcatgtgggacaggtaatgcgtttcatctaatgtaattactgaaaggtagggtttatacttgtcgattttgtatttgctttctgcgtcttctgtcttttttgttactttctgcctcagttagtttttgttcttcatggagatggagtttcactatgttgcccaggctggagcgcagtgagtattcataggcatgatcatagtgcaccgtggccttgaactcccgggctcacaggatcctcccacctcagcctcctgagtagctgggactgcaggcgtaccacaacgcctgactcattgctttcttcttttgtgttagatattttctagtgtataccattttaattcccttgctgtttatttgactgtattttttatttgttttcttggttgtcctggggattacaatttagtatattaatttttgataatgtagtttgtattaatactatattacaatactatatgaaatatttatttgggcatagcttaatttcttttgcccttcttgtactgttattgtcatacaaattacattacactgtgtgcccatctacgcagatttatagttgctgctttacgcaattgtctttcaaatcatataggagaaaaaacaaattataaattaacaaatacatttatactgtcttatgtagctgcttttatactttacctgtgtagctgcttttactggcgctcttgattgcattcccctcccctcccctcttgacagggtctcgctctgtcacccaggtgggagtacagtggcacaatcatagcactgcagccttgacctcctgggctaaagagatcctcctgcctcagcctcccgagtagttgggactatgggtgcgtgccactattccctgctgatttttaattttttttttgtagagatggggtctcactgtgttgcccaggctggtctccaactcctggtcttagaagatccctcctacttgagtcttccaaggtgttgcggttgcaggcatgagccaccgtgcctggccttggtgc

SEQ ID NO: 47905 - DNA, 1056 bp, Homo sapiens
agacaaacaattacacactttggtaattgctattaaaagagataaacagggtgtgatagaagcagcgaagaggggcctcctgtaggtggttaaaggaaggctgtctgtgtttccatctctgctgcagactgatacacaagtgtctttttcactcgattccaaatggaatcttagagaagggttggcttttgtacttgcagcgctgagtggagaggtggctgtgatctccagaaacgtggctgcagccccacgtgggcctcagacccttgaaacatggccatatcgaactgagatgtgctatgtgaaatgcacactagatttcagaggcttagtacgatagttcacactcttttggtactaattattttatattggttacatgttgataatgttttggatctatactgagttaaaggcaatttattaaaattagttacttctatttttacttttttttttgagacagagtcttgctctgttgcccaggctggagtgcaatggtgtgatctcagctcactgcagcctctgtctcccggattcaagcagttctcctgcctcagcctcccgcgtagctgggatgacaggtgcccaccaccacacccagctaactttttgtattttaaatagggatgggatttctccatgttggccaggctggtcttgatctcctggcctcaggtgatccgcctgcctcggcctcccaaagtgttgggattataggtgtgagccactgtgcctggcctatttttactttttaaatgtagatgctagaaatttaaaatgatgtctgtggcatttcctgtctttctgtgggacagtggtacctggcctgaggaacatttcaagtttgtgctgcgggcaagaatcctgtgaccacggggagaggacgagggactcattctctggacaatgggctggaaagtaagagggctgaatgggagccccgaggagtgctcccgttttgtgggagagaggagctagtcagcaggtggaaagcagccttggctgcccaaccctggagcctgggggaggcccccgagcgtgtgggctggggtg

SEQ ID NO: 47906 - DNA, 1100 bp, Homo sapiens
gctttaacattatctcctactgtctttgaaaacacggctattcatgttcagcttcttccttacctttctgtaccttaaattccagtccctcaggtttccttctgcctgtgctgtttccagtccccacgtggctgagcccgctgcagcaggctttggtctccactactcctcagatgcccttttggttatggtcaccattgacctagacattgtcattggttagttctcagccttcgtcttactggttctttcaccagcatttgttatcataattcaagcaaaaaaaacctgggattagttgtctccgtttggcttctagaacactgcactcttctggtttcctgccgcctccttcttcccagtcctgtttggaggacccgcctcttaagcctgacttctaaatattgacgtgcccgaagtcccaggctggtcctcgtgttgtgtgtgtccttattccctgagctatccagtcctctgttgaccccaggctcgtgccccaggctgacctctttgctgtggctccaggttgactccatgttgactgcatggaaaactgataggcaccttctgcccagcatgaaacgcagctctcttggtctgcctctcgccccgcagcgctagacaccatctgtagaatggcatttcccaggagacgctgtcggctctacctttatgacacagcttctgcactccatggctgtaatggggtcccagcttcttctccctgctttttggtggcccctgtgctctctgctcaggggcagcagtctttgccaggcgttgctgctctgcacgcagacttcctgtgccttctgggctctgctcttgccttttttttttttttttttgagatggagtcttgctttgtcacccaggctggagtgcagtggtgcaatcttggcttactgaaacctccgcctcccaggttccagtgattctcctgtctcagccttccgagtagctggcattacacgcgtgcgccaccatgcccagctaatttttttgtatttttagtagagacggggtttcaccgtgttgcccaggctggtctcgaactcctgagctcaggcaatccacccgcctcggcctcccaaggtgtt

SEQ ID NO: 47907 - DNA, 1489 bp, Homo sapiens
agagggaagtcccttatcagatataggaccccccgcttttttttttttttttttttgagacagttgcactctgttgcctatgttggagtgcagtggggtgatcacaactcactgcaaccttgacctcctggacccaagtgatcctcccaattcagccccccaagtagccagggccacaggcacatgtcaccacacctggctaatttttgttttttaattttttgtgcagactgtgttgatcaggctggttgaactcctgggctcaagcaatcttcccgctgccatatgaatatgaatatgtgcacacccgtggttccagctactcaggaggctgaggtgggaggatcacgagcctgggagttcgaggctgcggtgagctgtgattgcaccactgcactccagcctgggtaggtgacagagtgagaccctatctcaaacaaaacaaaacaaaaccaccagtgttgacgatgatatggaaaaactggaaccctcccaaagtgccgggattacaggtgtgagccactgcacccaggcagatgtaggacttgtaaatattttttcccattttgtgggttgtgttttcactttcttgatagtatcctttgaagcacaaacatttttaattttgataaagtctaatttatccctttgttctttgttgcttgtgccttttgtgtcctattttagaaacacttttgaaattcaagattatgaagatttgtgcctgttttcttctatgagttttacagttttagctcttttaattagatctttgatctattttgaattatagtcacaggccacataatgatgtctctgtcagtgatggacaacatataagatgatggtccagtaagattataatggagctggccaggtgcggtggctcacgcttgtaatcccatcgctgtgggagggaggccgaggcaggcggatcacttgaggtcaggaattcaagaccagcctggctaacatggtgaaactctgactctaccaaaaataaaaatacaaaaaattagctgggcctgttggcacacacttataatcccagctacttgggaggctgaggcaggagaaatgcttgaacctgggaagtggaagttgcagtgagccgagattgtgtcactgcactccagcctgagtgacagcgagacgccgtctcaagaaaagaaaaaaaaagattgtagtggagccgaaaagttcctattgcccaggacatgctaaagctctagcaataggcattatgtgtcctgctcaggtaaacaaacctactctgctatcagttgtctaaaagtctagcacatacagttatgtgcagtacctaatgcttgataatgataataaactcctatgttactggtgtatgtagttactattctgtactatacttttttaccattattgtagagtgtactcctacttatttaaaaaaaagttaactgtaaaacagtctcaggcaggcccttcaggaggagtctagaagacactg

SEQ ID NO: 47908 - DNA, 1226 bp, Homo sapiens
aggctggagtgcaatggtgccatcttggctcactgcaacctctgtctcccaggttcaagcgattctcctgcctcagcctcccgagtagctgggattacaggtgtgtgccaccacgcctgggtcatttttgtatttttagtagagacagggtttcaccattttggccaggctggtcttgaactcttggccttaagtgatttgcctgcctcagcctcccaaagtgctgggattacaggtgtgagccaccgtgcctggccacccttttacttttgtctgttcatcctgcaagtgcaaggtacctgctccatgctgtggtctggggggtgtagcagtgaacaaaacagacggaacttgtgtgttatggccggtgtagacaaggaagggcacatgggcagtggtgtggggagcgtgtggctgcagtcttgaggaagcagcaggagcaaggcgtggggcagccagctcagctgaagaggggtgattgtctcataggcttctcctagagggaccactgggagattctgagcagaggagtggcggaatgtgacttctgttttaacagtgtctttctcgtggcagtgttgagagttggctgcaggggtgcagcaggtgaggtgagaggctgtcgcgctcgttaggatgagagggtggtggtttgagtggaagtcggcctcccagggtgttgggattgtaggtgggagccagtgcacctggttgcttttttttttttttaataaaaattttttattttcaatttttgtgggtacatagtaggtgtatttatttatggggtacatgagatgttttgatacaagcatacagtgcataacaatcacaccagggtaactggggtgtccatcacctcaagcgttgatcctgttttacagaccatgcagttctactcttgtagttattttaagatgtgcaatagaccattgttgactctggtcactttgctgtgctatcaagtactagttcttactctatgttttgtgcccatgaaccatttctacccccactccccacctccactccactgcccttcccagcctctgcaaaccatccttctactttttttttttaatactgcttctacaagtgatagcccctagacgtccttctactctaccatctccatcagttcagtcattttaatttttagctcccccacatagatgagagcatgtgaagtttgtctttctgtgcccagctgatttcacttaacacag

SEQ ID NO: 47909 - DNA, 2066 bp, Homo sapiens
ggaggatgacttgagcctgggaggcaagcagaagttgcagtgagctgagattgcaccactgccctctagcctgggttacagagccagaccctgtctcaaaaaaattttttcctcatctttcttcatgtgtataatcatttttcctagctttaggtattgagcaagccctcctttcttcgtcagcctgtcataccgtatcccacagttcaaatgtgtgggggtttctgttttgtttctgtttttttagagacaggctctcactctcttggccagactggagtgcagtggcgttctggatatttttggccacttattcttcaatattaactctagaatcataaaatttcatgaacaatcctgttcggatattaattggaattgcactgaatctatggatcaattttgtgtgaatccacatcttcacaatatatctgactatttgtgagcacagtatatttctctcttcatttagtttttaagaaatatttctatgaaattttacaatttttcctgtagaggtcttgccatcttttgcaggtttctttctagataactgatgattctctgatgccatcgtaagtgatggcttctctttaattacagcagctaattgtttactgctgttgtagaataaccacacagctgactactgagtatttaacctttcctaccatcatcttgctaagctctactattatttctaatactttgtagaacatataatagcagttttatttcttcctttctaatcccaggcctcagattccttgtctaattgtgctggttaggacacgatatgatgtcgaaaagaaacaatgctagtggatgtttttattcttggttttgtctatttttatgacttttttaaatttttagtttgaaataattttagacttacaaaaaaagttgcaaaaataatacatagaattcccataggtccttttacccagataccccaagtgttaacattttaccacatttgctttatcattctatatatctatccatctctctagtttctgtttgcttttcatgattattcttgattttaaagggaatgtttccaatattttcctatttaggatggtgtttatttttttaatacttgaaaactatttttttcctagactgctcaacagaactatacttttttattggagtaaggaaatgctcttccattcctaatttactgagttgtaaaaatcatacttgagtattgaattttaccccaggtagtttttgtacatcttttttttttttttttttgagatggagtcttgctctgttgacaggctggagtgcagtggcgcaatctcggctcactgcaacctccaccgcctgagttccagcaattctcctgcctcagcctcccgagtagctgggactacaggtgcgcaccaccatgcctggctaatttttgtatttttactagaggcagggtttcaccatattggccaggccggtctcaaactcctgacttcaggtgatccacccacctctgcctcccaattaaaggcgtgagccactgcacccggctgtttttctacatctttaaagaaatctattttttttctcttttttgagatggagtttccctcttgttgcccaggccggagtgcaatgctgcaatctcggctcactgcagccgccgcctcctgagttcaagtgattctgctgcctcagcctcccaggtagctgggattacacgcatgcgccaccatgcccagctaattttatatttttagtagagacgaggtttcaccatgttggtcaggctggtctcgaactcctgacttcaggtgatctgcccacctcggcctcccaaagtgctgggattacaggcatgagccactgcgcctggccaagaaatctattaatggggtgagttacccaacaatatctgctgatagtatatatatattttttacacattgttgaattcaaattgctgatatttttgtttagatattttttttccagacagggtttcactctgtcacccaggctggagtacagtgttgagatcttggctcactgcaacctctgcctgttgggtttaagtgatc

SEQ ID NO: 47910 - DNA, 1043 bp, Homo sapiens
acactgatactgtactagaaagcgtgggggagttatagaatagcatttatagagaaggattggtgttatttactttcatgtgaccttaaaaatagaaaataatatttgtgcttttattttgcagtttgcctggaacctgaatacactattttaaaaaatattccctatttttatagaaaaaggacttcaaatatttattgttttgtattaagagctacaaacaacttggtcttgattggagagctggcataggtgtataagggcctctccctgtaagaaatttggagctggggtgggcataggaggtgatgtttaggagcagcctgagtgtggggagactgctgtgctcgaacctgcgtcgtgcaggtgcgtcctggagctactccttgtggcagaagcattgccctgagacccagccctggtatgcttggcactgggacaggagctccggtgggaggtgcgcattgcgagctggtgttttctgtttgctttcctacccactgtcatgttgtgggctcttggccccagaggtaaaatgtctctgtgagttgagttccttgtgagagggctggtccccagattccatgtctaggtttttgttagtattttttcaacagagctaatcctgagaggccctacgagcagtgattgctttgtgggatgagctgtgttgatggtttctgtggagggacccttcacgttttagggtgaaaacaataaatgtctcgttaaatggtttccatctgagaacactgattgttttaaaatggttgtgaatgcgagggtttaagcagcttccgaggaggcctggaggtgcctgggcggccgcgtgcagctctggaatcctgccgctggggcagcctccatttcgtgagatggctctggagcatgcccagtgcgtggagctttcagagggagccgccgagctgggctactgtgatttctctgcagttggccgcagtcaacaattgcactaagacaggaggaaaaaagtgatggggtacaagcaagaaacgtggtatttggtactttttttcttttgc

SEQ ID NO: 47911 - DNA, 1013 bp, Homo sapiens
agaatgaaaagtttgggaattgttgttttaccgtaaaccaaagcgcctggcgcagtactgcagtgaactaaccaaccaaccaaccagtttctgcctctcgtagagctgacattctgattggggataagtttcacatttttgtgtcatatccttcaaaatagtcaactccttaggtttaatgtctttttatcaacatggagattttgaatgaaattcagccatgagtgtgtgtttgttttcccatgctatctcaatcgtattacagagcagtgttgtggaaacatttaaaaaacaatctctgacatgagtaggaatgtggtcttctaccaggaactttaccgattgcagagaatttattaatattactactataccttgtggttttctgcatgcaggtttaagcctgcatttacacttctaaccacaaggtggtgcttttgttctaggtccgaaggctgacaccgggctggatggagcttgagaaccagttttatatgggttgcttttttgccaatttaagatgattctgctttgaagtgcttagcaaagaaccttaccttccttttgcatcagggttgtctcatcttagagtgacatcctagagtgtgtaggaacctcccagcaggtgtttattgagcaccccttacttgtgtgctagtctgggtgcctggtggtgctcagagctggcctggaccaagtccccaggggtttgtggtccctcaccattctcgactgctgcttttatatttgttgtatttctgataggaccgttgctcacgttgctcttctgatctgaaaaaagaaataggcttctcattttttcatggtgtgtaagttctgtacagccttatttttatgtctcatgttgttctgaagaggagatgggtgtcctgggaggcagggcagctgtgtccagctgcagtgtccctggtggctgagctgaaggcagtgtgaagctccggcctcgaggatgtgccagggagtgtgtggaggtcatgtctgtgtccctccct

SEQ ID NO: 47912 - DNA, 1050 bp, Homo sapiens
agaatatatcttgtttcttgtttattttattttattttttttgagacagagtcttgctgtgtcgcccaggctggagtgcagtggcgcgatctcggctcactgcaacctctgcctcccgggttcaagtgattctcctgccttagcctcccaagtagctgggattacaggcgtgtgccaccacacccagccctctcctttaaacattcccgtgttggtggtcattgtgatcatcacttgtgtatgttgctgttacaaattgcactgctgctttaaacagcatcatatattcttccacatgtacatgtccaagagtgtttctagataagcaccatgaagttaaggtgctgggtcatacagagaggactcatttaaacatgttttaaaattatgacaacatatacataacataaaattcaccatcttaaccatttttaagtataaagctcagtattgttaagtatattcacattgtgctgctgttaccaccatccagctccagaactttttcatcatttcaagctgaaactctgtctccattaaatgccaagtctccattcctccctcccctcagctcttggcacccacctttctatttcctgtctctaagacttggactatctagggaccttacacaagtggaccatacagtatttatcttttgtgcttggctcatttctcatagcataatgtccttaaggttcatctgtgttataggatgtgtctgaatttccttcctttttaaggctgaatagtatatatgtaattatatatatatatataaaatatatttttttttcttaaaattttttttttgtagagacagagtttctctgtgttgcctagtctggtctcgaattcctgagctcaagtgatctgcccgcctcagcctcccaaagtgctgagattacaggcttgagccaccgcgcccagccgtaatgttctgttgtatgaatggactacattttgtttgtccattagtggatgtccgttgatggacacttgggttgcttccaccccttggctattgcaagcaatgctgttgtgaacatg

SEQ ID NO: 47913 - DNA, 1032 bp, Homo sapiens
attttcatcttaatttgctccatattaaactcagggaaggagtagatgttttccagtttcacttgggcgggtagaggctgtaagtctccacagggctgtgctctgagccatgtgccagtcagcagcccaaccatggtggagacgcgcctagcacacaggcaggagctgttagcaggaggctggcgagcaggtgatcaggcgcgaggcctcggggtgcccttgacccggcgaatctcctggaaggcaggccatcagctcggcaggcccaggaatttgatgttgcaggtaaaccagattgtcagaattgtactctcggtcttgaaggagatggtagataaactagagcatcagcatattagtggcggtaagaacggcaagtagccgtttccagcttgactgcccttagagcacataccctctgacctcacactcaccagttatgtcaaggcacccgttctggtcatggctactttttggttttggacctgaaagactctaaacagacaggttttggctgatgggaatttggagtttttggggtttttgcaggcaggtgctcacaccctgggcacctggattaccggccgcccggccctgtgtgcctcccctcggcacgtgtttcttctgtaaggagcacttagactgctcacgttcctggtttgctgatcttctctgttggtccagttccctgagggtacagactacagccgttgagcctaggccttggtggcaggtgagccccagagcttggattgctgtgagatctgtgtgtcgggcctgtgctgggagcatggacggagccctggagctggggtttgctctgacccctgctggcgaggggaagaaggtcaggacaaagagcattgctttccttgtctcccgccagggactgcactgccctgaaactcggtggctgaaacaacaatcatcatttgttatccctttgaggggacaggaattcagacggcacagaggagatgactttattttggtcaatgagtctcagctggaagactcgaacatgggggtggt

SEQ ID NO: 47914 - DNA, 1051 bp, Homo sapiens
tacagctccttttttgtagtttgactttttgagtaaaatgtgattgcatattctggtccaaagggaggatggcactgttgtgagggcagcgtgtgagggcggcgtggctcgcggaggcctcactccccactgttgtgagggcagcgtgtgagggcggtgtggctcgcggaggcctcaatccccactgtcgtgagggcagcgtgtgagggcggcgtggctcgcggaggcctcactccctggctttcactccagcctcctggtagcatgcagagacacagtgtggaaacggaggccactgtcacaagcgctgaggaggatcattattactggtttgttgacaaaacgtggacgcattttgtcttatccagcatgttgtagaaaagcagggattgccgtggaaactccacactttgactaggaaaagaaatgatcacttctgaggtaactgtgatgtagatgtattattgtagacatggtaaactaccttattaatcttcacctcatggtggtattgactgggcggattgtaaaatgccattgtttgctctgtctttgataaacatgaaggatcaggtgtcatctctttagtgggtgagaaagtctctggaagaccattgaagctgcctaacaccaggtatcgctgaaaggatttttaaagctagtgagcaggttgccaggttgttcaaaggtagagtgggcagggaggtggctggctatccccagggcccagatgcagatgggcaggggtccttcctgccagcctggaaccttaggtgcaccctcagtctgtttcagggtcaggcagggcctaggtttaccagcagccatgaaaccattgagtcttttcttcatgacataccagtggccagtgtcgcagtcaacacagttccattggttctttttcctatctctttaaaatttaaatttataaaattatttaaatatttttatgggcttgtctttgaataattttaacagagattatccaaaatatgtctagtccttatttgtctttgaattttaggaatcttataaagggcagtgtctcagt

SEQ ID NO: 47915 - DNA, 1022 bp, Homo sapiens
aatgcgttcttattgttaagaaactgtcttcaaaaatagaaatacaggagaagtttccttggactgtgttctgaatgccagttcttctgctggaggcgactgtaaccagctggcaggagtaaatctgactgtccagcagctcatggtgaatgttgtaactacgattttttgactttttccaaatgatgtccatttggaaaagcggcctcccactgaacccggctgacggctgttgtttctctctaacaggcagttccggcgaggggggagcctcagcaggattgctgtgtgaaaaccgagctgctgggagaaggtgagggcggtgtgcaccgagggacaggagcagcgcctccctccagactagaaaacctgctgctcttcctctcttattagtccccgtcttctgactttctttgcttcacctaggtttatggtatagtttctaatctatcccattcctaaatagcacagttgcacagacaaacacaaaagctctgccagagaaggaacacatttgtcaaagtatgaaaagcaaaaatcctgtatatccttgtcttaaagtacacccagaaaattaaaagtgagtggccacacaaatgtttatagcagcattgtcacgtcgccgaaaaccggagacactccggtgtcctcagttgataaggaactggataaacagatcgtggtacatccacacagtgggacagcggtcagcagcccagaagagcacacagcatgactgacgccgcgccatggatgaagcttttgtacggtttgttaagtgaaggaggccagacccaaagggccacaagctgcatgactccaattttatggcagacacttggagaacagcagtggttaccaggaggtggagggagtggtgtggaagcaagtgtctgcagagaggcagggtgaggggagttggggcgaggggagtcggcggggctgcacccctctgtaaggcgtggcgcacacatagggttcggatgttcttggagagcctgcaccaccaagagcgcccccag

SEQ ID NO: 47916 - DNA, 1683 bp, Homo sapiens
agcttttgtcactcagcatagttctcttaagatcatccaagttacgtcattagcccgtcccgttctctgctgaggccttggtgttctgtggggtgtggacagccttgtacgtcggcactcacccgctgaaggacactgggcatttttactttagagctgctcggggcatttacgtacacgttttggatgtaagatttacttctgtgggtcaaacacacaggagcataatcactgggttctatggccttcgggtgtttcattgaacgaggaaattgctgaaccacactccagagtggctgcagcctttcacacgcccaccggcgatgttgcagtggccgcctttctcccctcctcgccggcgtcctcgccagcgttagctcttacccactttttatttagcgcttctgttgggtgcgctggtgtttcctcgaggcttcagcgtgcgtatccctgtgactgctgatggggagcatcctctcccagacttctcacactcacccctcccagacttctcacactcaccccctcccagacttctcacactcacccctcccagacttctcacactcacccctcccagacttctcacactcgccccctcccagacttctcacactcacccctcccagacttctcacactcaccccctcccagacttctcacactcacccctcccagacttctcacactcaccccctcccctctcaccccctcccacgcctcaccccctcccacgcctctcaccccctcccacgcctctcaccctctcccacgcctctcaccctctcccacgcctctcaccctctcccacgcctctcaccctctcccacgcctctcaccttctcacacgcctctcaccctctcccacgcctctcaccctctcccacgcctctcaccttctcccacgcctctcatcctctccctctcccacgcctctcaccgtcaccctctcctacatctctcaccctcatcctctcccacgcctctcactcttgttccctccacgcctctcacgctcatccccttgcacattgctttgctgtcggtgtgtcatctttggtgaaatgtctttcagacttctgctcgttttatgattgcattgttttgttagctttgagagttctgtatatgagtgtttgtcagctatgtggtttccagtattttctgctggtctgaagcttctcttctttctctcaaaaggtctttcacagagcaaaggtgtttcattttgatgaagtccggtttatcagttttctcctgtggattgtgctgttggtgttgtgtgtgataactcttcacctagccctagatctcaatttctctaattttttttttttttcagtcttacgtgaactttaaatctgtgatccattttgagttaatgtttgtataaagtctgaggcttgggctgaggttgaatttatttttgcctgtggatggcgccccagtcacagttttaaaactcacgttagaaactgtacatcattcgtctctctgaagttatgcttttattacagtcctacttccaggattttattctcatatatttttattcgtgaggatcttttattgtcatcctattacattcctttagggaaaaaaagcaatttgaaatttttagaaaattctctgaccatgaggcttatttaagtgatcgcttttttctggattgagtaattaaag

SEQ ID NO: 47917 - DNA, 1072 bp, Homo sapiens
aaccccgtctatactaaaaataaaaaaattagccgggcatggtggcgggcgcctgtagtcccagcttcttgggaggctgaggcaggagaatggcgtgaacccgggaggcggaggttgctgtgagccaacatcatgccactgcaccccagcctgggcgacagagcaagactccatctcaaaaaaaaaaaaattttttttaatttaagtattttcagacctccagcaaagttgcaaaattctacgaataagtcctgtgtaccctttattcatttcaccacatggcacaatctcgcccccggcccccccatgtattacttttttttctgagacatgaatgtaagttgtaaacattgtgcccttttatccctgaaaactaatgttatttcctaaaattactgtccctcaacataaagacattctcttagatgactacagcacagacatcccggtgaggaagtataccgcgacgccgctctctaatctcagtgtcctgttccgcatttcccattcccgactgtcttttagggcaaaggacaaataaaatctggttctagagcttcgagcacctagttgttgtgtcttgctagtttcctttaatctgaaccattctcagccttctttgtctttctgaaccgtggtgttttgagtacaggccaggtctttcatagaatgtgtctgatgtgggtttgcccagtgtttcccaggattgtgtgcaggtcgtggagcgacgcaggtgactgacaagtgtccttaggaattgaattgtggtggttttttgtccatcttcaagttactgctcaccagactgcaagcatgtcttgcagggagagaccctaaggtgctgcatgtacctcccatcacatcccaccagggtcttcagcatctgccatggcccacgcttagctagtactgcacggtgggtgccaaatggtggttttctaactccatcatttcctctcttgattatttcagtttctgctgtaaggaggtgcttcactttcctgtccgtccacacagttatctgtccatttactttacaaaaaaaaaaacttaaaaaaaaaatagagatggg

SEQ ID NO: 47918 - DNA, 1024 bp, Homo sapiens
aaggtggagaagagttttattgagcagcagaacagctctcagcggagaggagacccaaagtcagtagctcctactggcagggaggcagtcctgttgtgtggctgagtctgggggtttatgtgggctcagaatggaggaagtgcatgaagtgcatgctgattggtccatgggtaggtctggaaaaaacaccatttgattggctaaaaggcatcaaggaagttctcactccaggttgtggattctgccgggaactggcagcccggttttcaggcttcaggcggcctttggcttgaaggtcaggtttcaccggggacctgctcctatctgcctaggaatttgtctgccattatcacttttatttcttcaactgtcactccattgcctgccattcattgttgcctccctgtgggaggggtgttggagccaggttatcaaagaaaggctgagatttcttgtcacgtctttctgttaatttttaattactgtggcgatgatcacagatggttctgctctttccctcctgctacccccttaagtttaccacaggcaggaaagaagagcagagtcacatgttggtttcaacgtgcattgtactcctgaagtcatagcagagcccgtgtgtggtagcttgttcccatgggcagctgtaattcttagttttagatggagggtggctgtgattctcttcgacctgttctgcaccctccaccctgtagtatcagaaatgaaagatctgtgctgtgcaagaaggttgagaacatgcgtttatgtgacagccccaggctggggatggccgtgctgaatcaggatctcaggcacccagcattgttttaggtgagcattccttctttttacagagtggactggcatctttgttagcagcttgttctgtatctttcccacgtgtagcggttcacaatttaaaaacaatcctcgcagtaccaaaaactgatttcagagggttctagaaagatagtggggcaggaagaccaggaattcatctcctcacctagacaacagttcc

SEQ ID NO: 47919 - DNA, 1966 bp, Homo sapiens
tcttgtttggaaaccactgctccagagcccccagacatttgcttctccctctcagcctcttatcttttaatagagagctggaccgtagctccaggcactgtctttccccttagtcactggattgcagcgcaaggaggatggtgttggggagagggcctaggaggatggtgtctgggtgttgggctgtggagtcacaggggtggacctggcacagagcttgtgtcctaggaagactggcctggcctggcccctgtgctgggaagggaggctgggctcttcctgctccgcgctgcgtcctccctgctgcacatgctgttcacgttggtctgttttgcaaagtgagaggacttctcaagggtagtcattccatgtgcaaagccaaggggactgggaggaggagtcgcttcagagccctgctactgatgatttgtggctttcctgcctccaaggtggggtgataatgtttgctccgtgttttgttgtgaatggaacagatgaacagatgatccaggacgtgtttctgattctctgtgaattgatcgtgagggaaggatgcctgtcactgtgctgatgacctgcgggcagtgggcctgttgtgatggggtttgctggtgattttggtgatcaagttttgtaaactgtctcttacctttgaaaaacatttgaatggtgtttcttttcctttcttgtccccttttgacttttttttttttttttagcttgcttgccttttgttttagcagctgcagtatctcggaagaaaaaacgaagaatgggaacctatagcctggttcctaagaaaaagaccaaagtattaaaacagaggacggtgattgagatgtttaagagcataactcattccactgtgggttccaaggtaagagacgcatttgagtgagttgccacgtgtgcgtggaaatgcgtttctgtgttcagggcctcgttatcagtaatttgggtgacctcagtccccgggaaggtgccagtgccatgaagctcctctgccataggggcagagtgttcgtgtccaagatcattgtgggggactccaccccgtcctccctgccctcctcaccacagcccacctgtctgccgggctcttctccaggtggcaggggcacctcttcgtgtgtccccgcctccccacaggcccttgcacctcccagtcacccaagactcctcagtgaaagcaagtttgttcatgatgcgcactgatcctgccttggggtatacacctgcccgtgttctagggggagaaggacctgggcgccagcagcctgcacgtgaatggggagagcctggagatggactcggatgaggacgactcagaggagctcgaggaggacgacggccatggtgcagagcaggcggccgcgttccccacagaggacagcaggacttccaaggagagcatgtcggaggctgatcgcgcccagaaggtatgtgttgctgtcttgggtgacagcacaaggaaagagcatcacaaagttggccgtggttctgaaaattaacagtctggtcacttctagaccctgataaaatcccctgtttacaattggcttagatttttgtattttatttttcttgatttattagattattttcattcaagaagtatttatgtttctgtacatcattcattgaagtaaacctcttttttttttctgtgttttctttctttcttttttttgagacagggtcttgttttcacccacgctgcagtgcagtggcacgatcatagctcactgcactcaacctcctgggctcaatgatcctcccatcccagccccccgagcagctgggaccacaggctcacgccaccatgcctggctaatttttaaatttttttgtggagacggggactcgctttgctgcccaggctggtcttgagctcctttgctcaagtgatcctcccgcctcagtctcccagtgttgggaatacagccatgagccacggcgcccgccc

SEQ ID NO: 47920 - DNA, 1038 bp, Homo sapiens
tgcttccacgagtttcctggtcttattggccagcggatccatcttcagctcgattattgcgtcttagctgcacattgtggaagtaagtgagctgtgaacaggacaaccatccgtgtagcaatgctgggcattattccaagccttttgcgtagggcgctcctccaggtccacggcagcctgtgcagcatcggccgtcgcccaggtgatacaggtgaggcccgtgagaggggccaggtggcgcctccagactcactggcctgctgtgaggaaggcaggaatgggagccttgttccaaaggtcaggcccgaccgctgtgtcggggagcatgggcaacacccgggaggagcgggcagagccctggaacaggccagtcagtttcgcccatggccctcaccctggtgcctgttggcgtggccggggtttctgattcagcaggtctggcctggctgggattttgcttttctaaagtgttccccgtttctcctgatgcttctggtccagggaccacactttgagaaccactggttcgcctcctcttctccttctccgtaggtgttaaacaggatccagtggagtcagatccccgtgtgacacgtgcttccctgtgacttttctctctgtatctccacgtttccggtgcacatgcctttactcagactccgacactggcgttgcttttgtctcatcccagctaggcgacgtctgcgtcagcgcctctcatctgtggcacgtgtgcccagcgggctccctatgtgacggcttttcccacctctgagtgttcatgtcactcgctgcatgttctgccacactcggcccctctgcagagcctctcacttgtttcaaaagaactttccatagtgacaagtgagggcgcagttagcctttggaaccctcgactcggctcctctgtcaccagcgttctctcccacccttctttcttggttttgaactacttactgttttaaaacaaaccccattttactactgaatagcacagtgtgtttctattaagatcaaaaatggaccattgtctcacat

SEQ ID NO: 47921 - DNA, 1056 bp, Homo sapiens
gtcagtacctgtttcagctgctttctgtcctgaaagcacagcacctccctgtggtgggctcctttcttgttctggtccctccttcaggatccggtcagcagtcggtgaatctgtactctgctgtggtgaacccagggtgcccctcccacccatggtgacctcagtggggccaccccagtgcatctgtgtttttcccaccttgttaaaggattccttgttttatctcttttttcccaaccctaactggatcccattgtcatttatttgatatatccttcccagaacatctccttccttacattctcctgccgttctgcctggaccccctaccccgcagctcccttctgtgtttccttcttacacagcacagagccagaatcatacagcattatcgtttttatgattgtaaaaataatgcatgccgattgtaaaataatccagatactacatacatgcatgaataagaaagtaaaatcacttcttattccaaaactgagggaatcattcttagtacttttgtatgttctcctagacttctatgtgtataaccacattgaatttttgaaaataacttgtttttcctttaatgtaaacatttttcaaagtcagtaggtacaagtgccctgcagccgctggtcctgaaccagggagtcactgcagaagcatttggtggtggtggtgtggagggggcattttttcaggatgtacatgccctggttctacgcctttcaggtcttgttccataggtttggggtggggcccagactgtcttttaaaaaagttgcctgggtgattctaatgcagcctcatttgggcatcgagaagtctcttgctggcttcagggtagatcatttatgccacctgggcgtgccctgcagccactcttctgcaggtagacaggttggttgttcctacttttctgttattgcaaaagctgggtccttctagatacatgtttgtgcacttaattatatcttcaagtggagtcttaagaatatgtatttgtaattgattcatgtctccaagttgcttgctgtgaagtttggacagaactca

SEQ ID NO: 47922 - DNA, 1088 bp, Homo sapiens
atttgcttttaaagaaaggtttatttatgttgaccagcagttttaatcattttgtcatggacttcacaggacacctgtgaaggtcacctcactgctccgttgctcaccgtcctctcagacctcctgggaattgaccgatgctcaggcctctgtccccggccttgcttgctcccctagggtgtgtctgccctggtcagccgcctcactgggcctggggcggccatggccaggccacacagaaacacagaaggaacctcagagttagagcagggtggtaaagggaagagcgtgccttgccgagttagttctgacagagggacctgcctgttcaattccgcaggagactagcacactcaagtctcaagtccagaggatggtgctgtgggcgggttccggcgtggctcgaggtggctgtttatgtggaggatggtcatttgtgagtgcttgccagccatcgtgacagtcctgagctggagtctgtggctacatctgaaatcattaataaaactgtgtttgttcacagtggacggaattgaccccaacttcaaaatggagcaccagaataagcgctctccactgcacgccgcggcagaggctggacacgtggacatctgccacatgctggttcaggtgcggcggcacggcgccctcctagggctcttcacctgctctcttttatttttaccaaagtaaaatcataccacgttcgcggttcttccagtgtaagagttccgtagtgctgtgaatcgggcacagagtcagcttttctgcccccgagtcctgcaggtggatcagtgcttcccgctgtttcttccggcatttaccacggcctttgagaagagcatgccgccatttggctgtttcttgatttgctttctttggttttggttttggttcttcacactcatgacgtccctctgggggagccaagcactcgcagaggcacggacgcccctcccccagccccgttgactggctcccattttgtttagatcagatcgtgtgagcattttcaagctgaaccacgtcgtctacagggtatgttgtgtctgtcgttaatcactggcttgtgtttctgttggttgagt

SEQ ID NO: 47923 - DNA, 1244 bp, Homo sapiens
ttcttgtcttttggttctgccttctaggcagcattctcaccttcagcttccagctcctgggggattcttaacatgtgtggtcacattttcaaatcccagtaattcctttctgctcttagatagttcctctttcagtagcctctttttcttcccttatttctctgatggtattatggttattttgaagttttatgctgctgtgttttagtttttcttatctaaaggttttcctcaaatgcccagtgattctcgtttatatttaaagtaaactactgaaaagctggtggtagctcttgcttgccgggggcttgtcagctgtagggtgatctgcaggcctggctgttttgttggggcccccaggccccactgtctgggaaggacctgtcttctcggactgcacctgtctctgcctttcttagggccaagaaggagagagcgacggggcgcaccgtctgctgtgcccacactcacccgctgtccagctgcctcagtctgtcccccgtttccggagtcataactgatggtgttttgttactatttgcctggaatgatttttccctccttttattctgaccttttccctcgtttttggatatatgtattttaaacgtagaacttgatttttataaatttagtctaacagtcttggtattttaataggaacttttagtcctttatttatacctaatgtcttatattgtagttttaatttctagctgtcttagtccattttctctagctataagagaatacttgagaccgggtcatttataaagaaaagaaatttatttctcacagttctgcaggctgggaagcccaaggtcgaggggctgcctttggtgacttatggtgaggacctcgtgctgttcccgaacacagccaggaaccacgccaagaggaagatgctccagcacagccttgctgtggaccaggccgcccacagggagcaggtccattcctgggggctgactccgcctttcagagaggcgtggctccatcttcacagcctcgtagcctcttaaaggcccagcctcaaaacctcattggggcccccagccccggtaaataaattgcattcagaccatagtgccagccttttgaagccaatacttttttggtcgttcgtgcatcttttgaattggttttatttcgattttgccgtttctcttctctctggaagttacagactttccactttttggtcgttcttgcgtcttttgaattggttttattttgattttgcc

SEQ ID NO: 47924 - DNA, 1033 bp, Homo sapiens
gtcttggttgtgtggagtcatctccctccagctccagtcttggtcgtgtggcgtcatctctccctccggctccggtcttggtctcatgtggtgtcatctcccctgggctcccatcttggccgtgtggcctcatctctcccgggctcccgtcttggtcatgtggagtcatctcccctgtgcacagacagagaaatccattgtgcaaaaagtgcttccctggcagccgacctggagtccaccccagcctttcgccggtgctggggacatcagcgttctggctcccaggctggggagtggctccgaggatcggtcacggagcctcctgggtgtccgagctgcctcaagcgccccggggtcttttctgacttgatctgtgtttttgtccctgcggaggagtcgggagctgtgcctccatctgctgcagctctggggtgctgctgccctctctcacctgctgcccttcggtgtcctggtccctcgtgttgcaagatttcatgccgtgtctgcagtttctggagagcactgagcgaggtgccacacgctgccatccgaactcaccacagacactcatgttttcatcggtctgctcttctgtcatctctcattaaaaaaaaatgttgtaaattcctttactgttatctcccccacgcccctaccaagaccacgtagggtccagtcttgattccctaaccccttttcctgaaaaggtactacctccttcccaggctgcatctgccattcggtgacggctggtgacggatggatgggtagtgggctgagaagaggggactaggaagggctattccaggctcagccctgcctcccacagccttgcctctgggtgtaggggaaacagaggcatgactgaccagggccagggccgtgcccagctcggccacggccacacgtggggtagttagtaaacaccatggactcccagcaaggctgctgcctggtgtttcgaggctgctgtggtcgcagacaaccgcctcgccttggctccctggcaacaagctgggggtggaagcgggag

SEQ ID NO: 47925 - DNA, 1291 bp, Homo sapiens
gtgtctctcatccgcatgtgtgagtccatcatctgcatgtgtcattcgtccacgtgtgagtcgtccacgtgtgagtcatctgcatgtctgtcagtcgtccatgtgtcagtccacatgtgtgtcagttgtctacatgtaagggtcagtcatctgcatgtatgagtcagtcatctgcatgtctgtgagtctgtcgtccacatgtatgagttggtcatccatgtcagttgtctgcgtatgtatcagtcatccgcatgtgtgagccagtcgtccacatgtcagagtcagttgtccacatgtgtgtaaagtcagtcgtccagatgtgtgtgtcagctccagggccctctcttttgatgcattgatctgcatatctgcctttaggcaagtactgtcctttcttgactgatgtagctttacagtaggtcttgcaaaatcatttttctcctcccaaacttgatactgctattctcctatattttacacatatatatgttctgaacaccataatagccatgtagttattctgtttaaacagtcagtggtctttttttttttttttaagatggagtcttgctccgtcgcccaggctggaatgcagtggcatgatcttggctcactgtaacctccgcctcccgggttcgagctattctcatgcctcagcctcctgagtagctgggattacaggcacgagccaccacgcctggctaatttttgtatttttagtagagacggggtttcaccatcttggtcaggctggtctcaaactcctgacctcgtgatccactcaccttggcctcccatagtgctgggattacaggtgtgagcgactgtgcccggcctggttttttctttttttttttggagacagtctcaccctgtcacccaggctggagtgcagtggtgcgatagctcactgcaacctccacctccctggttcaagcgattctcctgcctcagcctcccaagtagctgggattacaggcacatggcaccacgcctggctaatttttgtatttttattagggatgggggtttcaccatgttggctaggctggtttcaaactcccaacctcaggtgatctgcccgctttggcctcccacagtgctgggattgcagaaatgagccaccacgcccagccgagtggtctgtttgaaagactgcagaagagctctgcagttgctcctgccatccccatccctgtccctgccacgcttctccaccttggtgggctcatgctcctgatgttgcttcccttccgctggcctcactccctttaccttttctgtggtgttg

SEQ ID NO: 47926 - DNA, 1108 bp, Homo sapiens
cctcagcctcctgagtacctgggattataggcgctggccaccacgcccgggaaatttttgtgtttttagtagagatgggtttcaccatgttggccaggctggtctcaaactcctgacctcatgatccgcccgcctcggactcccaaagtgctgggattacaggcgtaagcccctgtgcccagccctcttacagctctttaatgcctggaaagtccttattttgctttcatctttgaaagatattcttagaattctggatgcgtagttatttcttccaatgctttaaatggcggtttccctgggtcctcacctgcagtgtttgcagtgagaaatccagtgccaccacacagttatttctctgtgtataatgtgtcttttttatatggctgcttttaaaatgttttttctgtatctcttggttttagcaattggattttcctctaagccttagtttgtctgtaaagcaatttgattactgaagtgctttggtgttattttgtgtgtgtgcacgtagggttcattgagcttcttggatctgtggatttagggtttttgacaaatttggaaatttttcagtcattatttcttcaaataatgttttctgcccaccacgctttccagtattccagctgtgtatgtaggagttctcagagtggttccacagctcactggtgctcttttcaatttttaaattattattttttccctctgtgtttcagttgagcaggtttttgttggtttgtcttctagtccactcatcttttcttctgcacgtgatgctgttgagctcatccggtctgtgtgcttacattctaggcattgtcgttttcagctctaaaagttctgttggagtctttcaaacatttcctaacatgtttctacttaactttcgaacctatagaatacagttataccaatggctttatttacttatttatttatttatttatttatttatttatttatttgtttattttaaggcagagtttcactcttttgcccaggctggagtgcagtggtgcaatcttggcccattgtaacctccgcctcccaggttcaagccattctcctgcctcagcctcccgagtaactggaattacaggcgcgc

SEQ ID NO: 47927 - DNA, 1991 bp, Homo sapiens
ggaggcggttccgatgctgcccctcgtggactgtgggtgatgggtccggaggcggttccgatgccgccccgtgtggaccgtcggtgatgggtccggaggcggttcggatgccgccctgtgtggaccgtcggtgatgggtccggaggcggttccgatgctgcccctcgtggactgtgggtgatgggtccggaggcggttccgatgccgccccgtgtggaccgtcggtgatgggtccggaggcggttccgatgccgccccgcgtggaccgtcggtgatgggtccggaggcggttccgatgccgccctgcgtgaaaggcgctcctcgcacggcgccaactggaggaggcctcagtacctgggagcctctggtgatgacgaagggtcagggacaggtgggcatcaggcttaggaaacagcgtgggcgtgttcctcattccgtttatcgctgttttatccctggggcgatagagttagggatacttcattgttctgatttatattcttggctgcctggcagagttgaacattttcttatgtttaccgttcatctttttcttacctacgttttttattttcttctcctttgcacatattttttcagaattacagtgttctaatttactgtgtgattataaatcatctatattttacatgtggcacaagtatttctccaaattttatttgttttatttaaaagaggccttttttaaagtaaaattttttgtttttttttttgagacagagtttcgctcttgttgcctaggctggagtgcagtggcacgttctcggctcactgtaaccctctgcctcccgggttcaagcaattctcctgcctcagcctcgcaagtagctgggattacaggtgcccaccaccacgcccggctcattttttgtatttttagtagaaacggggtttcaccatgttggccaggctggtctcgaactcctgacctcaggtgatctacctgcctttgcctcccaaaatgctgggattacaggcgtgagccaccatgcccggcccaaaattttaatttaatcaaatttgcacgtccttttttcaaatctttcaaaagcattatcctatcctatgactatacccctgcttggaaatgaatataatttttaaaaatacatgaaagaaaagtgcctccaagtgttaatatgttgagtgtaggttgatataattctggatgaccttttccctatttttattctttactgtgattatgctacttttataattatgttatttttacaatgaaacaaacaaaacatgaaacgaagtgccttccagagttgagatgggcgctaggttcccatccggtgacctgtggcaccctttccacctggccctgctgcggacggccacgcatgctccagagcctctccccgggcacatgggctgcagctgctgtggcccagccccagcactgtgagccagcaggaagcctgcactgagctctggcttgtgtctgttcaggaggagaacatttgcctgcactgggcggcgttctccggctgcgtggacatagccgagatcctgctggctgccaagtgcgacctccacgccgtgaacatccacggagactcgccactgcacattgccgcccgggagaaccgctacgactgtgtcgtgtgagtgcagtgcttcccccagcgcgggctggcgctgacctgacctgggcgcccagagagaccgcttgacagtcttgtgttcacacttggggcgtgagtggacacaggccctctgttccttcgtgtggaagtccatccttggtgttccacacgcagagaagtgtctttcccagtccacgtttgagatcagctgtggtttatttctgggttagggaggattgtcatgaaaaaattcccaagttggagtctcagacctgatactcctcacatggctgaggggcagcatgggaacagccctgctcccagcagggacctgccagctcagagtccccgagaggctcagggtgccttctggga

SEQ ID NO: 47928 - DNA, 1098 bp, Homo sapiens
aagcccctctgggagcaggcacatccctggcgtacagcagcgtggggtgggggccacagagaccctggccccgagaaccaagctcgtgctgtcctcagtcctcttgctgctgcccgtaaccagcccaggagtgcatttaagaaggcgtggtccagttaggaaggcgtggtccagttaggaaggcgtggtccagcatgggcagtcatctctaggggaggaccattctgggttctcaggtaccagaccgcagacgcagagctttcggtatcgttatcatcatcctccggaccctcagctgaaaccccagttcaaccctgggcacacctctctaaacatgttccctgcatgttcttctggtgtgccctgctctttccctgtggctgcggagtctgggctgtgcttgtctgtgggcagtgctcgctgccttccagggcctcacctgcaccgcaccctctgcaggtatgttggggagctgatttcagactcagaagccgacgttcgagaggaagattcttacctctttgatctcgacaataaggtaatgtgttttgtggggttggggccacgcagaacttgtgaactgtaaaacctgaatgtgtttgtcccagtagggctgggattcagaagagagctcttactgttgacaagagtgggcttgctatagacctgctgagtgccgcatttggagctggccttggttctgtgccctgcatggatggagggagggacctctgacttgggaggtccctgagcctgtgcagccaactgcccctttcttgtgagagtgggcctgagacccaccactccagtcctccaaaccacaactgagaatcttgggttggggcttggcaacccctgagactgcacagaggtgaaggacgggcgccgtgtaccaagactgtagagaggctgagggggggcgccatgtaccgagactgtagagaggccgactgaggggcgccgtgtaccgagaccgtagagaggccgattgaggggcgccatgtaccgagaccgtagagaggccgactgaggggcgccgtgtaccgagaccgtagagaggccgactgaggggcgccgtgtaccgagaccgtagagagg

SEQ ID NO: 47929 - DNA, 1496 bp, Homo sapiens
gaggccgattgaggggcgccgtgtaccgagaccgtagagaggccgattgaggggcgccgtgtaccgagaccgtagagaggccgactgaggggcgccgtgtaccgagaccgtagagaggccgactgaggggcgccgtgtaccgagaccgtagagaggccgactgaggggcgccgtgtaccgagaccgtagagaggccgactgaggggcgccgtgtaccgagaccgtagagaggccgactgaggggcgccgtgtaccgagaccgtagagaggccgactgaggggcgccatgtaccgagaccgtagagaggccgactgaggggcgccgtgtaccgagaccgtagagaggccgacttaggggcgccgtgtaccgagaccgtagagaggccgactgaggggcgccgtgtaccgagaccgtagagaggccgactgaggggcgccgtgtaccgagactgtagagaggccgattgaggggcgccgtgtaccgagactgtagagaggctgagggggggggcgccgtgtgccgagactgtaaagaggctgaggagcggctgtgtgttctcggtgactgagtgaagcagcagtgagcctcctggattgtgcacagaggccaacagacacgtcccttgtgtccccagcccacccaatccccactgcccaggcgctagaatcttgtgtgggagagagcaggggccactccgggagcctggttttgggagctttctgaggctagggcagtggtgattgacccatcccagccctcatgttccctttactgtagcctcgttcccatcattgctctggaattcatccattgtctattttaaaacctcttgaaacttgcagtaactccaagccagtggggaaataaaggtttttctcatctcaagcagcagccaccagaccacggaataaatcttatacctggagaatagggcaccaggcagccgtcttcatagcagtggcctctgtggactgccaacctcaaccccaggctccgtccctgcagccaccttctaagaagtgactgttggtgaaatgacttgtgtttcatagaagagaagctgggctctggaaggtcacagtgtacaggcatctccctgtgcagtggggctgagctctcaagggatggcaacctccatgtgtgcatgccgtgtgcagagttgtgaggctcctctgctgcgaactgcccattccagccttgctgtggaacgactcgccttctgtgggctggtgacacatatcctcacaaaggctgtgttgtcactcgtgtgtgccacagatgtcgccttctctctatgactttttcatttcctaatgatgtctaggagtgaacagaagttcttttttttattctagttcagtttatcagtctttttctaaatactgggttttcgtaatgtcttagtgatatttttttgaaaacttgaatatttcccagaaacggtcatgtttgctttcacgtggcttccatgtgtaggttgacagccgttctgtgt

SEQ ID NO: 47930 - DNA, 1094 bp, Homo sapiens
ctgtaaaccgtgaggcttacaaataacaggaatgtatttctcactgctctgggggctggaagtcccaagatgaaggtgttagtagatctggtgtctggggagggtttcctggttcgtagccagtgccttctcactgtgtccccacgtggtggagggggtgcagcagttctctggggtcccttttatgagggcacaattccctccactcccatgacctaatcgctttcccaaagcctcaccctaaccttggggtctcagcctgtgagtctggtcggggggcacacacattccaactgtagcacctgcagtaaccatcagcagaaatcgagaaaaaatactcaagtagatttcttattccttctcttttcttacacaaaaagtggtagagtgtagatagtgcacgagcccttacctttctcccgacaggatttggggagagtcatcatattgtccgtacatggaaatctttctccttctttttggggcattcaggttgatttcagcccttgctatttatctcaaataatgttgcgtacaagtcaatttgtttgactttacctgtcattaggcaaatctctgagattctgttcatccacccagtgatggcttcagcagccagtgaatttcgatgtagaatttccgttggattctttttctgtttctccgctgagacttctcatttctctgatattttcatgccttgaaatctttctttgttcttcattgaggacagccttaggagctgccttgaaaatacgtgtctgttggcccagtgtctggttcatctcaaggctggactcagttgagtgttctttcggacgtgttcgtttcctcagtgtttcaagcgtcaggtcccttgagttgttcctgttaacatgtggggaggactctggtttctcttctgcgtgggccttgtttccctagtgcgattggctgggccccttctgcaggcccggcctctctagtggtccctgtgctttcgcctcagtcctaggattggctgggctccctccacaggctccgcctcctacgtggctgctgcacttcgccccagtcctaggattggctgggctccctccacaggctccgcctcc

SEQ ID NO: 47931 - DNA, 1046 bp, Homo sapiens
tgttaatataacatctttaatttaaatacctcaaagttgttttatttagtatttgtttacatgtcagcagaggataaacatttttcttttctgtttacaaaaagtaactgattttcttactttatgacacacactgccaccatcctgtgatatccactgttaatattttgagctatttccttccttccaagctttttcggtgtgtaggtttttaaatacacaattgatatcaccctccagggctactgcgggcacccccctcctgtcgtgggcaggccacctggtgcagctgtgccggctggtacaagatgcagggtgagggccccacgagtgctcactgcacacagatgtctcagcatctgatgtcccggcaacccccactgccgagtgtcctctgaggagacgattctgccttgtgggcagaactctgtcagattcctcttgtcaagcatttgggttatttcctattttgcttttgtagataaaccaaaacgcatacctatatctttagacatctctgattatttccttgggacaaatgcctaaaagttggatgagctttgtttttcctgtaaattatactattaaaaaactcttcaccggtggctcacgcctgtaattccagcactttgggaggctgaggcgggcggatcacggggtcaagagatcgagaccattatggtcaacacggtgaaaccccgtctctactaaaaatacaaaaaaaaattagccaggcatggtggtgcgcgcctgtagtcccagctactcgggagcctgaggcaggagaatcacttgaacccaggaggtggaggttgcagtgagccgagattgagccactgcactccagcctggcgagagagcgagactccatctcaaacaaacaaaaacccttcaccttctcatcacttggtcgtgctctgcttcgactcatacgcatcagtggtctctctctgtccgtgcctgtggtctcgttgtgtagctcagaggaggggtttaatgtctcatgaagccagtcccgttctccttgcttttcttctttgaatcat

SEQ ID NO: 47932 - DNA, 1022 bp, Homo sapiens
gaaacactacaagctagaagggattggggctctatcttcagcctccttaaacaaaacagttatcagccaagaattttgtatccagcaaaactaagcatcataaatgatggaaagatagtttttttcagacaaacaaatgctgagagaattcgctactaccaagcaagcactacaagaattgctagaaggagctctaaatcttgaaacaaattttcaaaatacaccaaaatggaacctccttaaagcataaatccaacaggatttatataacaataacaattttaaaaacccaaggtattcaggaaacaagtagtatgatgactagaatagtatctcacatctcaatattaatgttgaatgtaaatggcctaaatgctccacttaaaagatacagaatggtggaatgcataaggattcaccaaccatctgctccctttaagagactcacctaacacataagactcataaacttaaggtaaaggtgtggaaaaagactttccatgcaaatggacaccaaaagcaagcaggagtagccattcttatatcagacaaaacaaactttaaagcaacaacagttaaaaaagacaaagagggacattatataatgataaaaggccttgtacaacaggaaaatatcacaatcctaaatatatatgcacctaacactggagctcccacatttataaaacaattactagtagacctaagatatgagatagacaggccaggcacagtggctcatgcctgtaatccagcactttgggaggccgaggtggatggatcacctgaggtcaggagcttgagaccagcctggccaacatggtgaaaccctgtctctactaaaaatacaaaatagccaggtgtggtggcaggctcctgtaatctcagctatttgggaggctgaggcaggagaatggcgtgaacccagaggtggaggttgcagtgaggcaagatagtgccattgcactccagcctgggtgacagagcgagattctgtcctaaaagaaaaaaaaagagagaga

SEQ ID NO: 47933 - DNA, 1030 bp, Homo sapiens
ttgcaatttcctaatgacatatgacgttgagcatcttttaatgtgcttatttgccatgtgtataattttctttgatgagattcctattcaaatcttttacccactttttattctggctgtttgttttctagttgttgagttttaggagttctttgtatattttggatacaagtctttcatcagatatgtgtttttgcaagcattttctcccattttgtggcttggtttttcattctcttaatgtctggtgttttcgattgctaaaaacaactgattgtctggtccctattattacttctactagaaacagaaatctaggctattagtttttatatgttgattatgtatcctgctacttttctgaatcctcaaattgtttattagtttcactgattccccctttttttccgagatatattatcaaaacttctgcaaatatacttctaactctttctaagtcttacaccactcattattatttttttgtctgatttcactatcagataacaatggaattactgggcattaccttgtttccgcctacattaaataaaattttggtttggggcctgagggatgtgtgtgtgtgtctgtttgtgtgtgtgtaaaattatgttgtggtatccattagttcctacttcagtaagtgtttttatctggaatagatgttgaattttcttgaagaccttttcagcatccatagagatcatatatttttttctccttagatatggggatttatagtaatgaattttttgatatgaaatatctttgcaatcttagaataaatccaagtggttattatatttattttgtaatatgccattggattctctttaacattttttgtaggatttttggattgatatttttaagcgagatgtgttctgtagctttcttttgtcacatttgaggatcataaggtttaaatatcaatgacatagagttatctattgcttaacttcacagctccattcctgaaaatcaaatgttctaaaagagggtctcatttccactcccccccaacctt

SEQ ID NO: 47934 - DNA, 1030 bp, Homo sapiens
aatttattagttggatactcagctcatgacattgagcttttctactttgctaatgtgtttaaaactttaagtttctctctgagagttattttagttatatattgaaagtttaaattttttgtttcaaatattttttccaagtgtgattaagaattcttgtttgattcatgagtttttaaagtaagtaggattttaaatttctaattgacagagatttctctatcttgttctcttttcctatgttttgcagttgattctgttattccttttcatatttcatcactccttatatttcggatcatccattgggtttctttcccccccgccccttctgcctgaagaacagctttcctaatttttttttttgtttttgagacggagtctcgctctgtcgcccaggctggagtgcagtggcgcaatcttggctcactgcaacctccgcctcctgagttcatgccattctcctgcctcagcctcccgagtagctgggactacaggcgcccgccaccacgcctggcttattttttatatttttagtagagatggcgtttcactgtgttagccaagatggtctcgatctcctgacctcgtgatctgcctgcctcggcctcccaaagtgctgggattacaggcgtgagccaccgctcccggccttcccctaatttcttttagtgaggtttgatggtggtaaattctcttggcttgcctgaacagtctttattttgccattgtttgtgagacgtggttttacatcgtagaaaattctcatttgttatctttatttcaacatattgagactgctccactgtcttctgccttctgttgtttctgttgagaagccagtcattcgtctaaattttttttcctatgtatgactgtcttctctctggggctgcttaaataaaatcaattttattgtggaaaattgaaacatacgggaaagtggagaaaatgcggtgaactcctgtgctccgtctccacccacattttgccaatgttgtttcacttacgcttcttcttgctttcttgt

SEQ ID NO: 47935 - DNA, 1033 bp, Homo sapiens
ctttattaaagcattaaagaagttgagtcaataaacaatcttcctataaagaaaacaccagattctagtggtcttatacattaggtttctacttaaaatataaggaaagatcattccactcttaaacagatttttctagagaacagaaaaagagtgaacattctctaactaactagactagtataatgttgacattaaaatttttttaaaagaagagaaggctgggtgcaatggcccaggcctataatcctagcactttgggaggctgaggtgggcagatcacctgaggtcagaagttcgagacgagtggataacattgtgaagccccgtctttactaaaaatacaaaagttagccaggcatgatggcgcacgcctgtaattctagctacttgggaggctgaggcacaagaatcgcttgaacccaggaggtggaggtcacagggagccaagattgcgccactgcattctagcctgggcaacagagtaagactctttcaaaacatataaataaccagaactctggcactgctggtgggcgtgccagccagcacagcatctgggagggctcagcagcccctcgaaagttggacatgtgcatacaactcagcaactgtactcctaggcaggtgtcccagagggtgcctgcacagataacccccagaggcattttcacacaagtgttcctggcaccagcgttctgccgaccaaacagaggcatctgagtgcccatcggtaacagaatgtgccagttgttagggtctctgctaacgtagtgaaaatacgcaaatgatgtgaaattgaaacacagctttggggggtttctgtgtgtgcacccctttccagtgacatcagcacagtgtggatgcttctcagaaacagtttttggtcagagcataggtgtgcgcaagtcaaagaagcctgcgggcagcctgatcccacaacaaaggccagggacaggcaaacatagaatgcatttccagagtttctggtaaagctgaaaagacaagccatgattaacaagaagggaaggta

SEQ ID NO: 47936 - DNA, 1010 bp, Homo sapiens
cggtcggttatcctgttagtctggcagccgcgctgaaggacaggcctgacccgcggcgggggttacatgctactggggaaaactgcctgagaatgtgagcaggagcgcatcggatccttgcgctgggcaaacttggcttgcataatttagattttctttattttagaaagaacacattgtcagctatttgggaaaaagcatttaaaaaaacataaagcagtgtcccagttataaatctttggcatctgaccacttttccaacagcagggacggaagagggacccgagtgttaatttgttatcgaaggtgccggtgtttcaaaggttcacggaaaactgatttctaaactctatttcagggattgaagagttctcttgctttaaaatttgcagagatctgatgctgtttaaataaatacatctttttttcctgctttggtctgtggatgtacaagagcacatacgttactgatctttgtggatgtgtcatagttcataaatttgcagccagattccagattttgggctgagtacaattactgacccatttgcatttcttactgtggaaaagtcagttaaaatggctaaaaagcccgttgtactattgcatatgttttaagaagacattttcccatgatctgtcagacctgttaccaacataatgcctgctttggagtcgctgatgatcccacttgaaaacacttcctgtgttacgtgtggcagaggcctcacaaacttagctcggggccgttcttgtgagtgtttcggacttgcatctgtggacaggttcagagctggagccggcacatgtgtagctacggagagggcgtctatactgggaatgcacactggcctctcccgggtgggagttctctggtgtggggcagtcgcccatctcacgtggggtccttgtacggctcgcacgccctctctggctcggtccacctggcgcggctcctgcagacccagcagggtccgtgccattgctcttctccattgcaggtgtttggg

SEQ ID NO: 47937 - DNA, 1216 bp, Homo sapiens
tcttatatatagaaaaccctaaaagctccaccaaaaaatccttagaactcataaagtaattcagtaaaatcaatgtacaaaaatcagtagtgtgtctgtataccaacaacaaactagcagaaaagaaatcagtctcatttacaatagttacaaaagaaataactaaggaagtgaaagatctctacaaagaaaactataaaacattgatgaaagatactgaagaggacacacaaaaaatagaaagacatttgatgctcatggattggaagaattaatattgtgaaaaggaccatgcagatttaatgcaatccctatcaaaataccaatgacattcttcatagaaatataaaaaaaatcctaaaattaatacagaaccacaaaagaccctggatagcttaaataatcttgagcaacaagaagaaagctggaggcatcacactaccaaactttgaaacagcatggtactggcataaaaacagaaacatagaccaatggaatagaatagagaactcagaaataagtatttgtatttacagccaactgatttttaacaaaagcaccaagaacatttattggagcaggacagtctcttcaataaacgatggtagggaaactagatatccacatgcagaaaaatgcagctcaacccctatctctcgctatttacaaaagccaactcaaaatggatcaaagacttaaatgtaagactcaaaaccatgaatctactagaataaaatacagggaaaacacttcaggatattggtctgggcaaaaattgtatggagaagacctcaagagcacaggcaaccaaagcacaaatagacaaatggggttgcatttcagtaaaaagcttctgcacagccaatgaaataatcaacagagtgacaacttgcagaatcagagaaaatattgcaaactatttatctgacaagctattaatatccaaaatatacaaggtgaaactcaacccatcagcaaaaaaaaaaaaaaaaaaaaaaaaaaaaaaaaatcagattaataaatgggcaaatgaactgaatagacatctctcaaaagaagacatacaaatggccagctggtataagaaaaagtgctcaacatctctaatcatcagggaaatgcaaatcaaaaccacagtgagataccatctcaccccagttagaatggctgttatcaaaaacacacaaaaaaaataacaaatactcatgagaatgga

SEQ ID NO: 47938 - DNA, 1655 bp, Homo sapiens
gatgacaacattccccaatctttatgagctacgcccgggccttccacagtcagccgccggcaagagcagaggcaggaagaacgggaagtggacttgggccagatggcagcttggttaccatgcacagtggtaccataccaaagccagagtctcagagcaggggtccttagaagacataggcagtcggggatgtgagaagtgcttactgaagagtaaacaacagaatacaggcctcaccccagagatagcacgcacaaaataacacacaaaacctgcgggccttgagatagcacagacgtgacctgtgagcaacacatgattctgcccccacgagcagcctgggctcaccctacgtagtccaagatggccaggacaggccgaggggcccagcagaggcagctgagcagattgggcctggatcctgtgtcctgagcagagcacagggcaccttgagcctttttggtagcctctgtgacaaacgcagtgatgtagtcatttcccaggggaccactctatggctcctcgttctttgggagaaactttgaaacaacaacaaaattttatgagatttcctgagttgtgtgtgcacatgtgtggtgcacaaacaggacatgtgtgcatgtacatggctgtgttgtgtgcgtgtttgcacagtgtgaccacatgtgcactctgtgcatgtgtacatgtgtgttgtgcacgcatgcacacagatgtctacatgtgtgttttgtgcacatgtgcatgcacaaggcgcgcacgtgtgtgcatgttgacgtttgtgtgtgcacatatgattgtatatatgtgtgcctgtgtgtatatgtgtgcaagtgaactgaatgtgcgtgcatgcctgtgtggttgtatgtggatgtgtgtatgaatgacatgtgcacctgtgtgtgcatatgcccatgtgtgcatgtgtgtgcctgtggatgtgcacatgcccgtgtgtgcctgtggtgtgcacgtgtctgtggtgtgcacgtgcctgtgtgtgcatgtgcctttgtgtgtgtgccaccgtggtgcgtatgtgcctgtgtgtgcctgtgggtgtgcacgtgcctgtggtgtactcgtgcctgtggtgtgcatgtgcctgtggtgtgcatgtgcctgtggtgcgcatgtgcctgtgtgggtgtgcatgtgtgtgcctgtgggtgtgcacatgtctgtggtgtacacgtgcctgtggtgcgcatgtgcctgtgtcggtggattctgaaggcacgaaactgttcaccctggtgctgcttttcccagccttcctattgttgttgcttcaaccctgtggtgtgaagcctggtgacttgagaggagaattgcagtcacacttcttgcagcaatctggctgctcatttctgtgtccacccatctgtctaataacatctcctgggcatctgccatgtgctggggcaggggcccaaaggtgaaacaggcacatgctgtcagaacactcagccaggcttggcagtgagaccacatggtgactgtagctcaaggccagggcatttctgaggaaggagaggccatgtctggcctgaagaatgagaggaggtgccatttgagctgaacttaaaggaataggaaggattgagcactagagaaataggatggattgagctggggatgggaggtggggc

SEQ ID NO: 47939 - DNA, 1330 bp, Homo sapiens
cttgctgaggggtgcttgctggctctcccagctcctctccctttcagggtgcccggctgtctgtctgccgctctgctgtgcgcccccggctgcctcactgtgtctttctcttcagccccatcccagcttccttcccagacagagggatgtggccaccatgatgtctcactggcctcttgtccccacaacctgagctgccccctttgagagccccctggaggctcaggaagacagaactagaccctcctccctgccttttctccctcccttcctttcctaggaatgaggggacagaccacttgtttgacagagattgtttttgttctgggctcagaacaaagccctaagcccctggtatggatggagctgtccagccctctgggtctggccctgggggcaggtggggcctgcagggcctctggtgcttctgtacaaccccctccccagctcagcaagtgcagaggctctctgggcccaggctgcagtctccagggactttctaggctccatggtggggaagaggcactgtggcactgagaaggaaaggggtgctggggagaggcatcttgctattattcctggggcctcagagggctgctggaggatggggatggcctcggggcccaggagtcatgggatgctgagttgccaagaagggggtaaatcgagggatgcctccaggcctccctcctgggtgggcaagcagatcacatggcccagccctaaaactgttccatctgcccagctgtccccagtcccacctcataccctccatgtgtaagcaccttcgttcccccagcacccacccacctactcaagagccctcctgaggcccccactgctctccggcaaacggcctgtggttcagccaacacgtgcctagagcttttctgatcctccctgaggaagactttcctgagtctgtctgaggaagcttcctgccagagctttcctctctggtgctgtggacagctgttgtccacactggctctgtgccctgactctaggtctttgtcacccgactcagtgcagcctgtgggagccaagtggctcctccaagccatcctcagcccctgccctgcccctgcattgtgcctgcctgggggttctgcatgcaaggctgtagctttgtccccaagaaggagagctctgtccacacttggcgccggggcaagcaggcagggccatgatggagcagcctttggagccccacccagctgtgctggctgactccaaggttctgggcatggagagaccaagggaggcctcagggtgggggcagaagggccagatgagctgaggagggtccaggagatgcccagagcactgc

SEQ ID NO: 47940 - DNA, 1212 bp, Homo sapiens
ccaagcaccccggtgagagtctggatgctatatcagtattgcagctgtcatatcagtattgagggtgtcacttgagtcttaggggtgtcatagcagtactgtgggtgtcatatcactatttcggatgtcatatctgtattgtgtgcatcatatcagtattgcaggtgtcccatcagtcttacgagtgtcatatgagccttacaggtgtcatatcagtattatgggtgtcatatgagtcttaggagtgccatgaatcttgtgggcttcacatcagtcttatgggtgtcacagcatcttgtgggtgtcatatcagtattacgatatgccgtgatatgttataccagtatgatacctcttctgaaaacaccttcacagacatacccacacatagtgctttaacagctctccgtgtattccttaatctggtaaagttgacacctaaaattaaccatcgcagtatttatgcctgattcatggctaaaatttcagaatttttaaaaattttagaatgaaagctgggcaccgtagccagacactgtccctacataaatattaaaaagttaactggttgtacttgcacacatatgtagttccagttactctagaggctgaggtgggaggatcttttgagcccaagagattcatgctgaagagctaggattgtggcactgcattccaggctgcgtgacagggtgagactctctcaaaaaacaatcaacagtaataatattatttggaataaatttaaccaaggtacaagacttgtacatgaggctgggcatggtggctcacgcctgtaatcccagcacttttggagttcaaggcaggtggatccacgaggtcaggagatcgataccatcctggctaacacggtgaaaccccatctgtactaaaaatacaaaacattagccaggcatcgtggcatgcgcatgtaatcctagctacttgggaggctgaggcaggagaattgcttgaacccgggaggcaggggttgcagtgagccaagatctcgccactgcactccaccctgggtgacagagtgagaccccatctctggaaaaaacaaaaaacaacaacaaaataacttgtacatggaaaatttcaaaacattgctgaagtaaattcaagaaagcttacataaatttaaagacacctcatgttcacgaactggaagacttaataattcttaaggtggcagtactacacaaagcc

SEQ ID NO: 47941 - DNA, 1069 bp, Homo sapiens
agtgatactcctctcttggcctcccaaagcattgggattacaggtgtcagctaccacgtccagcctgttgatttttaaaaatgtaatttctttttctttctttttcaaggcatggttttgccctgttggccaggttggagtgcagtggtgcgaacgtggcttattgcagcctaaacctcctgggctcaagcaatcctccctcctctgtcacccgagtaactaggactacagatatgcaccgtcacacctagctaatttttaagttatttgtagagagagtgttttcctgtgttggccggactggcctgaaactcctgggttcaaaagatcttcccacctcagcatctcaacgtgctggtattacaggtgtgggccaccacccccagcctgggatggttttcataattacattctcatgttgtttgttgctagtgtctggaaatacaacagattactgtgtattgacattttgtgttgtagtttactagttttaataatattttgggggtttgtcgtgatatttctgtacataagatagctcctgtgatctgtgagtagctgtttttactgcttcctaacacatataagttctctttacttctttttctctcctatttgttgtgggtggaacttcccgtacagtgttgaatacagtgatgaaaatgagcattggtgccttggtcctgatcttaggagtaaagcactgggccctgacaatggagatggtgctgaagtccgattgtggtgtttagaaaattcctatccctggtttgttgggtgttttttatggtgaaatggtgttgactttgtttaaagtacatgtgggtttcttctttattctgtttatttcatgttcctttgcagtgatggctttagtatgccaaaccagcttgattttctgagaaaaggatgtagtgatcatgttgtgcaatcctcaaaatacgtgctagtatgaaatgacaattattttcttgggcattattattattattatttttaatttttttgagacagagtctcactcttgtcgcccatgctggagtgcagtggcgcgatcttggctcactgc

SEQ ID NO: 47942 - DNA, 1030 bp, Homo sapiens
gtaattatggtgtgcaaaaatctcaaatagagtaaacaataaaccagtaaaaaataactacaacatatttccaagacatagacagtaaaatagggaaggaagagaaacaacaaaaagtttaaaagaatggcaatggagttaaagtgtagagtttttattagttgctttgcttgtttctttgtttatgcaatcaatgttaaattgtccacagtctaaaatgatgtgttatattatattcaagcctcatgaaaattttaaatcaaaaagcataccacagatgtacaaaaagtaaaaagcaataaattagataatattaaaggataaatcaccttcactaaaaggaagacaggaagaaagaaaagaacgatgagaggacaaaagttaatcagaaaacaagtaacaaaatggcaggagtaagtgcttatcaataataacattgaatgtacatgaacaaaatactctaatcaaaagacaaatagtggatgaatggatagagaagcaagacaataatctgtgacctgcaaaaaaaaaatactttacctataaagatacatttagactgaaaataaaacgatggaaaaagttattccatgccaatagaaaccaaaaaagagcagaaatagctttacttataccagacaaaaatagatttcaacaaaagactgtaggaagatattaagaaggtcattatataataataaagagatcaattcttcaagaggatataattggaaatatatatgcacccaacactaaagcacctagataaacggagcaaatactataagagctaaagaaagagacatcaatacaataatggctgaacacttcgacaccctactttagtcattggatagaccttccagacagaaaatcaacaaagaaacatcagacttaatctgcactgtgtaacaaatgaacctaatagatatttacagaaaatttcatccaacagctgcagaatacacattcttctctgcacatgggttattttcaaggatagaccatatgttaagtaacaagtctaaaa

SEQ ID NO: 47943 - DNA, 1079 bp, Homo sapiens
tctctaggttctgttcctaaaacatctgtgaagtgtatttctgtagattaaattctgttttccattgaatgttatcttaatttcagaaaatttctgtgcagggttattttattaagctcatttttttttttttttttttttttttggtgagaaaggctcagcagctaatagactcagcaacaggcagccaggagctctgaggctcacagctggcagtctagttccactcagtctctactggagaaattctttctttggaagtacagcagaggccttaggtgagtggcttgtctgctatggcagagattagaggtgctgccagactgccataagtgttaggcagtaacagcagcagctgcttatatgcatgtgaacagctggggaattaatttggtatgcattctcaggagccactcatctgctggcagaggtagcagaagaatgcccttagtgtaagtcctctacaaccatacaccaaatgtgctccctgcatttcaaattccattgtagaaagtctctgataatctcacttatactatgagccattcctcagtatctgtcctcttcctgttagtgttctacaattcctttctccttaatttttctccgctttacaaaatgtcacacagacaagtgcataatacttaaacaagcttttaaaaataatgctcataaatagctttggttctgtcataatattcgtatttataaacattttaagtcaattctcttcttttgttttcatttcagaaatatccatgtcctgaataaaagttgtgtcttgattagtttattatgtaacaatttagtgtgtttgacatttctaacttttatttctaacatttgctttattatagaacaataaacatgcagtgattgatttttcttacttcaagtggatgagtgagcaagtgactaaaatcttctgtgaattattcagtgtatggtgcttgccagtgcatctgagaatctagggactttctgaaatagtacttccttgctatgaggactgaagttgcattagaatccttttcaatgaagatcagatgtcctgagtacaattcttactattgggtcct

SEQ ID NO: 47944 - DNA, 1033 bp, Homo sapiens
actccgtaaaatcttcctagttataggaagatctagttatatactagaaaacttaatgtatttcagaagacatgtatagcctacatgtaaaagtttttagcagcactgtaatagtaaaacactggaaacaaaccaaatgtccaacaaaaaaaaaagataaagaaatgatatagtcatacaattgaactacaatactatgcagttaggattttctttttttcctctatgaattttagtgtgtacggttcacaagactattttttttctactggagattgacatattgggttttatatgccacctgctggataaagttggtatagctttatgaatttatcttactgaacattctgtccattgttgacactacctggctctattccccatttcataaaaacttttatagattgtttaaagcatactataagtagccatatagtcagcctgaagttgcgtcttgttaatgttgaaataaaaggtcattataaataaaagattgtgtgtaaattttagggaaggttaggctaggttgaagaagctgtttcaacttgtaggagtgtttgtaaatatttataaaattttatgtctacataaagtattttgcaacaggtttcgaaggatgctttaatcttatcctctaggatattctatgctaaaataatatatgaaaaatagcacgcaaattctcaaaaacgttaggattctttatatgttttttgtatctttaaaattattttgaatttttttatttacaaaaaatatgttttataggtgctgggaagacaacacttctgaactatattttgacagagcaacatagtaaaagagtagcggtcattttaaatgaatttggggaaggtaagtaaagttcaataaatgtcatgttgcaagattttgtgtgactgtttattcctctggtgaattgatattccatatttaaaaatgaaaatgcaaggtattgtattgatgtggatagctttagaaaagttggattaatttctgttaagatttatatgggttgagatactgaaat

SEQ ID NO: 47945 - DNA, 1057 bp, Homo sapiens
aggcaatgagtgggctgcaaccattgtcactgaaaaattaattctgctccctcaggtttctaattcagctaaataaatccaacctggcttgacacttactttatgaagtgccaagaccagagttagactgcagcatttttaagtgactagaattttttaaagacgattttagattttcttttctttctaggtttaaagagtcatgaaagaaaactggggccaggcgtggtggctcacgactgtaatcccagcactttgggaggctgaggcaggtggatcactaggccaggagttcaagaccagcctgaccagtatggtgaaaccccatctctaataaaaatacaaaaaaattagccagatgtggtggcatgcacctgtagtcccagctactcaggaggctgaggcaggagaattgcttgaacccaggagacggaggttgcagtgagctgagatcgtgccactgactccagcctgggcgacagagcaagactccatctcaaaaaaaaaccaaaacaaatctgaaggacctattcataatacaactctgtaatattgccaccttccttcgataccagagatttgtccttttgaataaacatggtctcctgttctgggcatgatatccaacatatttcattccacactgtttattatttttattaaacaatattgaaattcgatttatcagattgcaatggccaatctcaatgagtttcactttattgcattggctctcagggtaggataggccaggccagtgccaacttaaaagtttagtaagttaaactaaaaataataatatgaaaccatcatattttataagcccttttcagcttatgaaaatatttccccaaatataagttttatgaaagcatctttcagcatttccttctgaactgcaacccaaacaatgcctaagcacatttctaatataataaagtgttgttgggaaaaaacactgttagggaatggctttcacttggcattagtttgaatgacttggcattgtcaccaggggtggtggtattttaaacacagaacattctgcacagtgatt

SEQ ID NO: 47946 - DNA, 1066 bp, Homo sapiens
agtttctgatccaggtgaatgttttaaaaactttctgtgtagttatttaaactagagtgcatattcctttctatgtgcctctggcattgctggcacagcctacacgttcctcaatgcatcgtggaattcagaggtcaccctgtttcttggaatatcattttatcttccttacaccaaagcataaaggaacttcctcaaccctatgtgttcatgccatcaaagcccttgcttcatgctctttttgaagttatttaagaaacaaaatgtaggcactgttttaaaaattaaaaagttctacaatgattataatgaaaacctgtggtcccttctctcacctctttcccacccttgatcccagctacccagagacaagtactgttaacttttactacccttaatgctagtatttcacttcattttctaaatgataaaattttactactaaatcttattttttattgagttagagattatcaattgacttgttactatcaaacgtgagaattttactcacttaaaactcctcacagctctgcctccatgttcttcttctctatccttctattacacaatgtttgattatagtaatcgagttgtagattactattattaatagttgtatttatatttttataacaatgtaaatcttattcttgtttttcataacaatgtaaatacgaatcgtgtgtattttaatttttcttgtacaattactttttattttcttgaaaataatcacctaacttggtttggtaaatctttctgagaggatgcatggctgaaaatgtgtttatttcacccctctctcatttgattaatagtttgattggatatagaattctaggttaaactaatctttcttcagcatattaaagccattccattttcttctggtgtctggtgttgttgagaagtctagtgacatatggttgtctgatctatttgtggcctgttttttatttctggaaatatttatgatctccactttgttctcagttgtctgaaatgttgtggtgatgtatcttggggtatatgtgttttattgtgctggacagtcaggtggcgg

SEQ ID NO: 47947 - DNA, 1040 bp, Homo sapiens
gtaattttttcatattttagtagagaaaaggttttgccatgttggccaggctggtctccatctcctggcctcaagtgatctgcctgcatcagcctcccaaagtgctgggattacaggtgtgagccaccatgcggctggcctaagattgtttctgatgtctaccttctgtaagtaatgctgcaacatatatccttgtacatttgcatttgtgcacctctgtgattctgtttgtagaataaattcaaaaaagtgtaatcagaactaacaattcagcacaaatataagtaaagtttctaaccagagacttggctacttctgttacagttttaatgtccagatcacagcagaactctgggtgattttgaatcttttaagcaatcacctattaatagggatcctagaggatgtggacaaaatttgtaggtacaggcatgtctttactaccagtgtgcagaatggagaggaaaagagtagacaatggacccatcccttgtaggactctgaaggctccaaatgacccatcaggggtacagagtttctcttactacccacaggggttgattgcactgcacagatctggagaggacagagtgatggggtttgaggtaggatacaagtatacagtttgaatttttgtgattcaccaagattacgtccaaaaagatgatgaactatttttataaatgaaaatgtattttaatggcatagaggtactgtctaaatgaatcttatgaatcatttcatagagcaaatagttctcttgaagcattaaatgttttacaataagtcatattttgagttggcatgtgacaatttctgtttgcatgtataaaaagcttttgtacccaggataacaggtgccccaaaaagcacaaactgaagataatccaaaatcaggtgtatccaggtccagcaaatgacttagtcactccaggcttgtttctttacctcaaaaatgagagggttaggatatttgctctctaagcccccttgcagctttgggactatgcacaatgtggacagtcaagaaatgctcagta

SEQ ID NO: 47948 - DNA, 1028 bp, Homo sapiens
ctccatctcttcacttttttcttttctttttcttctcgtgctggtttcctgggtctgcttatgtttttcctcaagattactagacctttgtatttttttccttgaggatatacttattttatccttttgatcttccaggccattgaatttgaatatcatcagtgatcatcgtttccttaaattcatctagtgacttaaaaaaaaatgaatgcatgttttctaagaagtcttttgttatgtgctgaatttgaatccctttaaatactctttttatcatttactttttcatttttttttttttttttttagtacattgccctctgcctgttccagtcagttttatttcatgagggaccagctaatccttgtttatttttcctgtctctgattgttgagcccccttagcatctggttatttttctttgctgatcattggagttcagtggctaggataccttaactgggattgagggtggggtgagattgtctgagaaacagaaggtgtggtgatctgaccctgagaactggctgggctgcagtgagaagtcatcaactccctatcatggcatgaggaagggtggaggaggagggaggttctccgtggctttcccagcctcagggggagctctccgtccaccctcacagctcctcatgagcttctctgggcctggcgagactggccaatgtcaactttgtcaactttccctacagaggttcagcgatctcaggagatcaagctattcccaggagctggctgcttcagatccttgctttggaactaccttctgctgcctctgcctcccaggctcccacttggcccagagggtggacacaccacactggtgtgcaatgtgtgtaacgtgtgtgtgcagttttgccaattcactgcctgagtggatgctaggctgaggggagtgagagaaagctgaggaggagctgtgtgtctaggaaaggcaggagacaccaatgcactatctttctagattctcctgctgccatgctttctagaattattttaaatatttcag

SEQ ID NO: 47949 - DNA, 1113 bp, Homo sapiens
ggcacgatcatggctcaccccagcctcgacctcccaggctcaagtgatgctctctcctcagcgtcctgagtagctgggaccacaggtgcataccctacacctggctaattttttccatttttttgtaaagatggaggtctcgctttgttgctattttgacagattacttcttaaccaacaaaacctgtgcatttggattctggtttctgacattaactgtgtgaccaagtacaagtggcgtaacctctctgcttgcagtttcctcatctgatgaaaggatttaacaatgcgcaatttgcttggctgttttgaagttaggataagacaaggatgtgtcttgtacataataaaagatagtttccatccgatctggagccagcttccaccttctcagtttgtcctggagtgtaaagtggcagctactgcgagactaatcagtcttgataggagaatctatttagttgagctgatgcgcctcaatgttgctttgtaaaaaagatgctgggatacatattggtgcatataacttcataaagtactacgtgacaatgcataatgtagtggcttgggagctctagaagacaacaaaggagattgttgaaatgtgctttgcaaaatggctatgaatccaggagggtgtattagtggtatccctactggtccaccccagtatttatttaatatcaatgggccagctgtaggaaggtctcattatatagttggtaacatgatgtcatcatggttggattccacttgccatataagattccggaaggcagggatgtttagttagtaaattttgagctaagtagtaacagatcagtttttcctattttatgttgggggatgaagatacaacaaatgactattgctacatggaagaaagcaatctgaacaggagctgagaatttctgggttccaaattcaacatcattttcttgggtgacggtcatcaagataagaataggcgctcaaccaagaaagagcacccagatagcaagttttgtgctgaacactgagatccaggcttagccctctttgataagaacagaagcttagcaaagagggctgaagtctcatagttgccaaaagcacttttcaaagctattttct

SEQ ID NO: 47950 - DNA, 1047 bp, Homo sapiens
ttcttcccaaatgaatgtagaagcaaaggttattgcttccatgtgacaaagactatcaactagtcagttatggtagcttctatttattgcagacttactataggctagcagtttacatatgtttcctattacattagtgctcacaaataacctccatttgacagatgaaaaagacaggtctatcctacatcctaatacatgagcatttgtagacataagtgtccaggagggatttgttttgcagctgcaggagaattcacagtaatgaaaactactgtatttttcttaaatccttgagttgaattacagagaaagtttgcaggatccttggcatagagagaagaaagattattaaaagcaagtcagatttggtgttgtctgaaagtattaaaaatacataaaagaatggataagagaaactctctgtaatgtgggatgcatatttcacaaaggatacagccccagaatggtgaaataaaatgccaattatatttttctttatctcatctttaaagtttcaatttgtgagtgtatactttctgatatgtgtaatatatttgagcagtaatatattactgcaggagaaagattgcattattggaactaattctttacatctttctgtgtctaagctgtttgccatataactttgcagtgccctcctatggtgggtgggctaacctgccctgccctttgacttgcagcttggccatgtgacttactctggccaatgggctgagcaaatgccatgaaaagaaacttatgaagtgtttgcatgatggggcttgcattctctctcttgttctttgccacagccatcgacatgtggctgctggagtctgccagaggaatgcagacatgtggcctagtctctcccttcatgccagttgaccatcaggcatgtgaatgagtaacaagagcctcatgaaagagaagaaccttctagctgaaatcagagtatacgctgacttttaaattcatgagctaaataaacgcttgatgttttaagccattgaatttcagggtggttggtgatgtatcgttatt

SEQ ID NO: 47951 - DNA, 1084 bp, Homo sapiens
ccatttctccctagatgggaattaaaagctgaaggccccagactgacccaagtgacctcacagaatgagttgtcacattagcaggagttgggtttggaaatgtgaccaaaatttccgcaatccatcttaatatactgaagaaaactggctagctcagcaactctgcaaactggaagcttaaccattctgctgtaaacgtacatactttccttagccttgggtcccaaagccagaatgtgaccttcccctggcagtttactcactaaacaacaaatcctggcctgccatatattatgaggataagcatcaaatttttctccaaaacttgagaatacttggatttctcatttaacaagacaagtttgtttccctcataatgaacaaggaatggaatcaatcttggcacccagtagtccatgcattcaggaatttatgatcctagggaataaaacttatttttcaaaataacactctttctgttttccaaaggaattagaggtggtgaagatggatcttttttggataaaattattataagcctcaatacgtgttgtccttcaaaggatccagcttcaaaggctgtacttactcatgctattattgcaacaagtatatttggaattcctcttttgaattatagtctgcacagtagattcagtagcagcaagcggtcatatccaccttgatggtttactctaagtgtcgatcttaaactaaagtgtcttaactattttaaaatactgaatgtagccttaaaaagacaaagatttaacaacctagaaacaagtggatgtgtcacaaactctgaaggtaattcctcagtggaattcaaagaatgtcttgattagtggaatcactgttagaatgaggtcatgggtgactaccttcaggataataacaaccctcatctgtatattacagttctgacatgtttgtaagtggtacaataagcggtaggtgtgcacagctaaagcaaagccacaaatgtaagtttgagatctattaatctatccacagaaaggtgcgcaataatgatgctgtccacaccctcagcttccctgcatttctccgtgccctcaatgat

SEQ ID NO: 47952 - DNA, 1070 bp, Homo sapiens
tttaaggaggcaatttgagtaataataaaactctggtcttctgtttaggggttctatgtgtattaaactttctctatagcagtgcccttgataaatcggctctatctgggcagtgggcaaaatgaacccattgggcgattatactccaacaccattctctaattctcaggtactttaatacctacattagttagacttccaatacccttcaccttctcaccatctgtagttttcttctatcgtacttcagacactcactgccattactctaggtactttaatacctacatcagtgagacttccaataaccttcaccttctcaccacgtgtcattttttgttctatcctacttcaggcacttactaccattactctaaattatgcatgggaatggcaatcattccataaagtcaatttcatacatcccactttttgatatctttctttccagttcactccctctagtgtctgaacttcaataactctaccactgcagcatgacctacaatctgttacaccttcctctttgctgttcctcattccttcagtggcctcctcacatgccaggagtgctcctactccaggacatttgcacttggtgtttgctcttccccaggatacctgtggggttcagtcctcacctcctgaaaggctttgctccagtgtcatccttcacagtgaggcccaccccagtcattttattgaacatcgtgcctcactccagtattgttactccttatcctcctcctatgattgattttcctccattgtacttatcagtaaaatattatatattcctctttctatttattcctctacaatggaaggtttatgaaggcagggaagtttgttcactgtaactcagttgcctagaacagtgcttggcacacatatggttatcaataagtattagttgaatgaaaacaatgggctgggctagggctgtatttttgaacccaagttagttgaactagaaagttcctccttcccactaccccatgtcatttcaagaagaaccacagatataaactagactcgtgggaaccattgagttagaggcttttctaggg

SEQ ID NO: 47953 - DNA, 1031 bp, Homo sapiens
caggatgatgctggcctcataaaatgagttagggagaagttcttccttttcaattgtttggaatagtttcagaagaaatggtaccagctcctctttgtgcctctggtagaattcagcagtaaatccatcttgtcctgggctttctttgattgataggctatttattactgcctcaatttcagaatttgttattggtttattcagggattcagcttcttcctggttcagtcttgggaggatgtatgtgttcaggaatttatcaatttcttctggatattctagtctatttgcatagaggtgtttacagtattctctgatggttgtttgtatttctgtggggtcagtggtgatatctcctttatcatttcttaattgtgtctattttattattctcttttttattctttattagtttagctagtggtctatgaattttattactttttccaaaaaaaaaaaaaaaaaaacagttcctggcttcattgattttttgaagggttcttcatgtctctgcctccttcagttctgctctgatcctggttatttcttgtcttctgctggctttggggtttgtttgctctttgttctctagttcttttagttgtgatgttaagatgtcaatttgagatctttcttgttttttgatatgggcattttagtgctataaattttcctcttaacactgctttagatgcatccccaagattctggtacattgtctctttgttctcattggattcaaagaacttcttgatttctgccttaatttcattatttacctaggagtcatacaggagcaaattgttcaatttccatgtagttgtgtggttttgagtaagtctcttaaacttgagttctaatttgattgcactgttacgtgagagactgttatgatttcagtttctttgcatttgctgaggagtgttttacttccaattatgtgatcgattttagagcaagcgccatgtgacacccagaagaatgtatactctgttgttttggggtaaagagttctatagatattgtattcg

SEQ ID NO: 47954 - DNA, 1128 bp, Homo sapiens
tactttgcccatttttgaatagagttgtttggtttttgcttgttaatttgtttaagttcattatggattttagatattaggtctttgtcagatgcatagtttgcaaatattttctcccattctgtaagttgtctgattattctgtcaatagttttttgtttgtttgtttttgttttactggtttgtttttcctgtggagaagccctttagtttaattaggtcctgcttatcaatttttatttttgttgcaattgtttttggagtcttcataataaaatctttgccacggcctacatccagaatggcattttctacggtttcttcttgaggttttatagttttaggttttatttgtatttttttaatctaatttaatttattttacgttctgggatacatatgcgggacgtgcaggtttgttacatatgtaaatgtttgccatggtggtttgctgcacctatcaacccatcacctaggtattaagcctcacatgcattacctatttatcctgatgctcttccttcccccgcaccctcacaccaacacaccccagtgtgtggtgttcccctccctggtgtgaggtgtcccccctcattgttcagctcccacttaaaagtgagaacatgcagtgtttggttttctgttcctttgttagtttgctgaggataatggcttccagctccatccacgtctctgcaaaggacatgatctcattctttttgtggctgtatagtattccatggtttatatgtaccacattttctttttccagtctattattgatggccacttgggttgattccatgtctttgctattgtgaatagtgctgcagtgaacatacatgtacatgtatcttcataatagaatgacttatatttctttgggtatatacccagtaatgggattgctgggtcaaatggatttctggttccaggtctttaaggaatcaccacactgtcttccacaatggttgaactagtttacattcctaccaacagcgtaaaagtgttcccgtttctcctcagccttgccagtatctgttatttcttgactgtttaataatcaccattgtgactggcatgagatgatatctcattgtggttttgatatgcatttctctaatggtc

SEQ ID NO: 47955 - DNA, 1020 bp, Homo sapiens
tctttaacattttcccctcttcggtcacacactcagttaactgggagtgtggccaactattaaatgttactctcagtcaccacatactgttttcttctcccacgctcatctaaagattgcatactgaaattatcataggttattttcttatgatttgagttcatatagtttctgcccttcaattctcatggagatcatccaatgatttagtggctgctgacaagcatgtaagcctcttgaaagaatataatgtacaggggatattgtcaatatgactaataggagggtaataccaggagtttgagaaataccccaaagccaaggtcccccagagtcaagttttaaccactaacggataaactgattgggctttcccaattaggtggaatacttggattttatcttttaggtctccagattctgggcttacaattccttgtttatggacataaaaacagcatctttctccagtaagcgcacaagctcttccttgttgagtagttagggtatcaagaacttttctgttttgaagtacagaaggtcctcaacttatgatggttggactcatgatttttccacttaatgatggtgcaaaagagatatgtttcactaggctccttgacttaagataggattatgtcccaataagcccgtggtaaattaaaactacaagtctagaatgtgctgtcaacttaagatttttttttttacttatgatggccttatccagatgtagccgcattataggttggggagcatctgcactactgaggctaaactgctcattttagattttatcagttgaagagaatttaagataccattaaattattttgcaagagttgcagaaacattgataagtgatttttgtaattcaaacactcccatttgagggcagaattctctagtaagagaataagatccagaacttcttcatataatgaggttttgaggctaatgagaaacttatgggggcgggagggttctgtgtacaaatgatcctgttaagaatttgactat

SEQ ID NO: 47956 - DNA, 1099 bp, Homo sapiens
cagtttcttatctgcaacctaagtcttccgcctgatcctgtgattgtaccctctagagccacacagaggacatcctctgtcagaagtaagggctttaaatatttggagacagggatcctgtatcccctaagtcttcttttctccaaaacagacatttcctggtttcttcaactattttttgtaaatctttctacatatgtttttaggacaacctcatttgccttctcttgagtatttaatgtcccctataaagtaaaatgtcaagtactgtatacaataactacaagagtagttaagcagttatagctctacatttcataacttgatattcgattttcattcattcagtgatcctaagattacacctttttgagttgaattagaatttcttactctttttcacggatcaagtggtgtgtgttagtgggcatgtgttgtctttggatgcccaccattgatttctctttctcctggtaactgcatcatgatttttccttggccagtgcttttctaccctcagtctctgtacccggagatagaaataataacccaggactaaacaatcgtgttccaatccctgtcaccaaagtgaccggatcttttgcttaagctattggggttgcaagtgttgatatgataaaagccttaaattactactgaaggaagccaacatggaggaaagcggaactgagcaacacggggagaaaaatgaagtctttgtgacatcatttgagtccagcttccttgtgcctaaacctggctttaacctgtacttttcagtttgacaaaaataaaaccagatcaagttggaacaatttagaagtttttaaaatacaggccatgatctggggaacttcaaactgaaagcattaagaagctcagcccacagcagttacagcacagtttattaagtgagaatgagaaagaacattattccctatcatgatgggctacttgaaacttatcttttcaagccgctgtgctctataagcttacctattgatagctaattagctggaaattgtaaggtcatgctgacctgggaaagcttaaattgtgtttatggttacagctagtattacaggggaatcaggacagt

SEQ ID NO: 47957 - DNA, 2020 bp, Homo sapiens
tcaatagtcagtgtgcagattttaattaacctacctgctttcagcacagtgcctctccctcatgccctctcatatctggggccccctagtcttgagaaaatgagtcaacataagttcacaaagcacttcctcagcctgctgccagggttgggagtggtggtcaagcagtttgggccaatccccctgttttccattccaaggcttaccccagcattctccagtacctggcacctctagctgctggaattttctggtctaccatggtgagaattgactcgttcctctccatgcactaggtattccgctttcacagttctgccgccttctctactgcttcctgttcttccagatacttggtgctatctctcacccactgtggcttctcctctgtttactttgttcctgtgaatttatacaattttatttttctagtcttatcttactctttctgaaaggaacagagataaactcaacaatgcaccatttttaagcagaaatccacaaatggctttaaacaaactgaaaacaacctacctggcttcatggtggtcttcttttccatggatgaatttagcggatctgagaatgtcatttatttgaaaattcagcttgtcgtattttcagtttgcatcaaaccctgcttctcctaggaatcagctgatgttagaaggaaggagaactccattctccctttatgtctgctgtaataagcacttgcataacagaataaaggcctcttagaggaaatggcttcctacctgaccaaactcaaaagatttgctcttgaaaacatgagatggcacttctgtttctatatcagtgaaaatttgaaaaagttacgtcttaattttagcagattagtcacttttaagtctggcaaatttatggatatatgtatttagaataatggttaagagaacacaagatcacaaaacagcagcagttagtagggagcccataatcaaactatttctgccaaaattaatgacctaaacaaacataaaaatttgagacttgagctcgtcttaccttttgatagtgcttaacgtaaggaaactaagtttatgatcatcttcatcttttctgaacctaaaaacaccaccatccaagtgccccaggtcccctaacttcttccccagatgcattagtaaattttttttggagacagagtcttgctctgtcgcccaggctggagtgcagtggcgccatcttggctcactgcaagctccgcctcctgggttcacgccattctcctgcctccgcctcctgagtagctgggactacaggcgcccaccaccacgcctggctaatctttttttatttttggtagagacggggtttcaccgtgttagccaggatggtctcgatctgacctcgtgatccccccgcctcagcctcccaaagtgctgggattacagccgtgagccaccgcgcctggccgcattagtaaattttttaatgaatggccttaactaggagatacagtatgccctttggattgtgtgtcttttatgaatagtaactaaatggctgctctgccttccacagtgtgcagacagacactgattgctatgtatgtttgtaccgatgatgatgccctggatgataccacagataacagcctatgaaagaacagtgtttggaatatttttcatcagaatgttttatccagtttttaaacatgggctcatgcccgtggctgaatgtaagtggacagacagagctgcaaaaatgtgggaatgagaaattttggtctgtgctctttttcttagggagttaattgtaccttgggaggaaatgattagctcttagttgtgcttgatatgtgataactacttgagggaaaggtgagaggagtctggtaaggtcatgggaatcatctgactttgagctcttgatgactataattaaacataatgactaattcagatatcttaaaatgacttccagatgcttgacaacagactttccttttagatgaaaatcctcttgcatttaaaacttaggttcttattgatat

SEQ ID NO: 47958 - DNA, 1022 bp, Homo sapiens
ccgagtccggagggcccatttcttaaatcagtgacggatttaggaaggagcctgaccagtgaaagttggaagagagatggtattcctgggagggtttcttaggtctcttgggttgtagagagtccccttcctgcccgtcagctttggtatgtgcaggactaggcccagcctgcaagctagaagcctgacaggaaatagcaaatatgccgaggatggctgagcaaaggtttgtgaaaagagtctggaactttgatgatgttgagctgttgaataagttaactcctggagctgcgctagccgtggacttctggttatgtgagagaataaaccccagtttttcattttaggtcagttttgagttggatcttttgcaacttgcagccaaaagtatgctaacctggctgtctctaaataccaatttccacagtatccaacatgtcaagtcggcaagcatttccaccttctcctggagacacccctcctggctttcgggatgtcctgaagaactgctgctccttcaccatcatcatcgtctgccttcccttagtttctctcctatgaaaagtccatttctcagatcccatgcatctctcttgcttaacacccttttctcaacacggcacatcctctagtagcttcccgagaaagaatacattctaaagaccttgcaagtccgaatgtctttattctactctcaaacccagatgtctagtttagctggacatagaattctagtttaaaattaattttgcctcagaatttgaagatgctcgtcaatattgtctttagattgcaaagttgtagaagtttaatgtccagtgccatccttattctcaatcttcatatgcggcctttaagtctccagctttctcgtgtttcaggatcgtgtgcattggaaagtgttatgtatattttcttttccttctttatgctaggcacttggtgaaccattttagtcggaagagccagatcctttcatcctgcgagatgtttttccatggttttttttctgatttttttaa

SEQ ID NO: 47959 - DNA, 1030 bp, Homo sapiens
attgtgatgactttctttgggataggattgtgggaagaaacaagttggcaagactttcatgttacaaactgagtattttgacatgttccttgtgactttattacccttttgactccaatcaataatgattgtttttcattcttgtgacagagatgtgaggccatagaattggctgatgaataaagttgtttcacagaaatggaaacaggctgggatattgaaagtttgcttttgtttaatattttcacgacaactaaaatgtgcatagctgttccaaatggatttcaagagaaaccaaatttccttcatgatttgccagaattgtctgttaatttttttccaaagatgtatgccacttaaagttgctgttgaaaaagttttaattccttatgcttatcactttgattcccacaactgcttaacccacattcttaacgactttctcatacttagggcagctttccctgaatggcctgatttgccgatctctttcctgtaactgacaaacgttcaacaggttctgtgtattattaaactgtgtagctcgtgataaaattctggaatgctaattgcccttggatttttcccatcactcatccaccacaaaaacagttgcagtatgcagtgctttttaaaaataaccaggaaagcttagtgttgctaagcactctgttcagggcaccagacttcccaaaatgtcaggttgaaatcacagcctggtcagctgagctcttcgcctttcaaaatggatacgagctctttcttactactttcctaaataaacataaagtttcatccagtttacctttgcagtcaattgatatgcagacggtttgacagcaatggtcgctggaaagtaaataagtatactagccaattgctgtttgagggtgaataaatattgatgcatatttttaaagccattgtctttaaaatatacagaaaggtatgaataatacagtgaacatccagcctcccaccacctgacatgaaataaaacttgacaaatacagttcaagtttaagccctt

SEQ ID NO: 47960 - DNA, 1085 bp, Homo sapiens
tttccccctacattttacttttcacagctctgtacatattaatgagtaatctctttctcaaggtagcacttttcctctttaacacccttatttctttccttttcttttcctagttttgccagattttcccagagtcccttgcctcccattttacctttatccccatctccagttcatttggaagtcgtcccagcttctataacatgaacctcaataatctgacaatataagaatgatgctcttgtaataaggagacttctatttaaaacaatgaaattacatgtgtgtcaatattataatacacttaagagcttgaaagtgctaaaaagttcctttcaggatatccatatatcacttttcactacttcattctcctctaattaaattttcttttctttatgcatttaagataatttttctattgcagtataactggtttcctgtttcatttaattgatagtattacgatggcataattctctaattttttgtgtaaatggtggtttttgagatctacattatgggctaaatagctttcggtgggctgacctgataacttagctattgcatatagttgtgtttctgtatttaaaaggcattctgattttgaagttcctgactacttttcattttggatattttttttttctaatttaagaacatctctaagtgtccttagcttttttaattatagacttgaaatatctacattcgtttcacaagggaatatttacaatgcgctctattgttagtatattttcactttagagagtagtaaaatgaagtataatataaagtagtttgaaaagccagaataatgtgctgtggttttatttctctaagttaggttttagattatcatcttttcttggcaaaaactaactgccaagtaaatagtgagtttgaatttatggtaagaaatgaaattaaattccttcatggatactagtaagtttctccttccaattatcaacgtgcaaacaaacaaaaaaaacctctcctgctaatttcagctttatttgtaatactaaaatgttggaacaaacaaatgtctaactatgtgggattggttatgtaaataatag

SEQ ID NO: 47961 - DNA, 1058 bp, Homo sapiens
tttttttgataaggtatacactttctatgtaggtatgtatgtatgaaaggtggcattattccttaagttatccattatacaaatttgatgtgtgatttttattatactaactggtaaattaaacagataactgaattataaaaactgggaatagttgaaaactgttacaaaacaccaatttataatatcagttgtacatattaattttatactaaaaatattcatatttgaggttgttttgttaaggataaaaattctaaggtgatttttttttgttttgcgtttttttaaataagaaaattttcctttttaacaaaaggagtataaaaattaaaaaaaaagtaacttttgtatggaaaaatcacaaagtgatctcaccaagcccatattgattgatagtgcggtacttgtctaaatatacttctgctagtgtttattgtattaccttgaattgattattgaaaagtatatttaatttaaatccccgtctcaattgtactgaagatctgcttgactcacagtgaggttgtgattctcagtttacagtttcacatctgttactgtagtaaaattaacaaagttgaagtgccgtgaaacctatttaagatttcatatcatgtgcctcttgccaaatgtgagaaatgctaaccatagatttttgattgttttcactcctaaaaatcaagatttttttttttaggagatgccatgccattaaatgggatttaattgagtttatgtatatttttcttttactgtagaatcagagaaaagattgtatatgaacacaatctttaaagatttgttggtcaagactcaagccatttctttccaaacattgagcctatctgtaccatataagttcagtttttctcactgttctttagtgttcgacatataacctatagaatgactgatgcagcctactgtgcaatagtagcatatactgtggccgaaattcttgactgagaaatagtccgttgggtcactccttagggggctatcagtaagtgtaatgcatagtcaattaattcagttgatgtaaaactagctatgtt

SEQ ID NO: 47962 - DNA, 1050 bp, Homo sapiens
tgtgatctgtgtcacacagcaactctacctacaaagacaataaacgagctccatgctttgatttgtccatctgtaaacagagtaatactacctgtgtcatcaggttaatgggataaccaaatgaattcatataggtcaaggacttgcaatgctgagagttttcatcttctgctattctgtacaacaataaggactagatagagtatttgctttaaaaatgcacgcaccttctgtcatatatttttacaaaatagactagaagatgttaaccagggttatttctatggagttggatgtttggtaatttaaatgttccttttttctttaataaagtttattttactgtaaattttagatgaaaggaggatattcagctctttacaagtaatgctgcctaacagttgcatttaatcaataggggtttcttctccattgcttttgttagctttctccacttggttttgaccggctcctcaagactttgtaagctttgagttcagaacgtactgtaaacctttaacaagatgatctgagtagttctttagaggttcattaatatcttattttgctgttgattgtggcttagatagttattctcagtgtttgttctggctcagtcactgaatgtggccatcctgcaggggacaagtcactccagagcctcaggagatactgtattgattatttgttgccttcttgtttttttttttttttttggcacatagtagaaatatttatctctgagagtccacagatttcattactccttaggctagtttctgttgtagccacagaactttacagatgagaaagatccatatttgctggtttcagatttgacccaaggatatctttggttgtgcagatcaggatctaagggatttaaatggacagaatgctttctgacatcttggatcatctgaagaaaagaaccaggaatgaatggaggtaaggaagtaaaggaaagaacagtagtgatgaatgaaggcagttatggaaggatacaggggtttatagaaataattcctgactttgctgtggaacctgcct

SEQ ID NO: 47963 - DNA, 1043 bp, Homo sapiens
atctaggcactcaggccagatagtaaataattactaattatgtaggacctctcttctcatggggcttatcagagccttgttactcaaaaatacgattctctgaatagtatcgtcagtcaactatgagattgttagaaatgcagaatctcaggccccacccagatgtacagaatcagaatctccattgagatttcacatgattagtacaaatagtatagattgagaaacactgttctagagcagggtttggcagactatggccttggtgccaaatccgcctggctgcctatttttgtaaataatgttttattgggacagccatgcccatttgtttacatattatctatgactgctttcacaggcaatggggcatttgagtagctgtgacagggactctagcccacaaagcctaaaatatttactacttggccctttacagacttagtgtcccaccctttgttctagtccgtaaacaagtagcgtgacagatatttttacttatttgattgtgaaaatctttatggaataggcaatgtttgaacagttctgaaaaacattggtttaacacatttttagcctgtaatctacaatacaaatgaaatacagttgacccttgaacagtgtagtggtttggggtggcaacacccccacccaagcacagtcagaagctagctataacttttgactccctcagaacttaactattaataggcttgccaataacataaacagttgattaacacatattttctatgttatctgtattatgtactgtattcttacagtaaattaagctagagagaagaaaatgctaccaagaaaatcgtaaggaagaaaaaatatatttactattcattcaatgggagtagataatcataaaagtcttcatcctagttatcttcacattgagtaggatgagaaggaggaagagtaggggttggtcatgctgtcttggggaagtggaagaggcggaggaggtagaaggggaggcaggcacactttgtgtgactttatggaaatacagttgactcttgaacaacatg

SEQ ID NO: 47964 - DNA, 1042 bp, Homo sapiens
tcaaagtgcaatattttcctttcattaatgtggcagaaaacaactaaatatctacagcaagaatgtttttgacattttcatttgctgcttggaaaataatggatactatgaattgtgctataaaagaaaactgctaggattttgtcatttccatttcaacttcctaacaaaaacgtggattactcaatgagcaattttttttaaaaaaattaataggaagagttggctgcaggagttaccagaattgattgacattttgaggtgcttggcttgtaggagattcttagggagtttattggctcaggcttcttgcttgtcacatctccttccctgtatgtctgagtaatagaattccagttgggtgtgatcgtttcctatcctttctgtcttctcaagttcatttttatcccaaatattgcacagcattttgctctcttctcctgtttcttttgggttaaagaagtatttatttcaattagttcatgcgaaggattgttaactttttacttttaaaaatgtacttagggccagccaactggcatgtagtattttgaataattttggaactaagtgtccattgatgacaaatgttttgctggaggaattactgaagtatttattcattttaaggtatattagttttgacataaatactcttatctgttgatagtgtttatctttttactaaaaatataatgcttttataatcatacctttgattgctagactctagttattaaaaacttgaagatcactcaaaatttttccctcctgcaattttgacacactttctgggctatattcttgcttctgtatgttcttttataaactggatatgtttagttagaaaaatactggttgtaattaccagaaacccatttcagcctatctgaaaatggaaatctagaaggatattgggataacttctgaaatcacaaagaacaacttggcttcatgaagaattgtaatttgccataggtaaagctgttaggaacataggtaatactcttcccatcttttatgcttgcttctatctagatgt

SEQ ID NO: 47965 - DNA, 1035 bp, Homo sapiens
tctctcttctcattacttgaggcttgatttactcttgtactgatttctcagggtggaagcagaggctattaagttaagacctttcttattttctaatatagatatttagtagtataaatttccctataagtactgttttagtggcttactacaaatttttatttttattttttttaatttcgttcagtttaaaatactttctaatccccgtttttgtttcttctttgaccctttggtttatttagaagtttcatacttatctccaaaatatttggggatattctagagacctttctgttactgttttctaattcagttcaattgtgagcagataacatactgttatagcttgaatcattttaaatttcagacttgttttatggccagaatattataaatcttggtttctgtcagtttttgattcatatattttgagctctgttatttggtgcataatcatttaaaattattatgtcgtcttgatgaattgatcactttatcattatgaaattattctctgtattcctaataatagttctgttctgaaatcaactttctttctgatacagtatagccactctagatttcttttgactggtattagtgtggtatatctttttctgtccttttgcttttaacttatatgtgtctatatttaatgtatatttctcacaggcagcatgttgttgtgtcttgcttttttaggagtctattaacctctgccttttaatttttaattggagtatttagatcattggcatttactactattatttttgatatggttccttttgtcatcttgccatttgttctttctttgtcccatctgttctttctttttctttttctaccttctttctgtttttacaccatatttttcatggtttctagaccctttaagcatctctgttgtcctcttgacctagctccaatttatttaaagatagatatagacttactgtatcaagttcttcaagactgaagtctaatgtcgtgtaagtatttttgactgaggatttgtacaggtcatttcgt

SEQ ID NO: 47966 - DNA, 1053 bp, Homo sapiens
gagacagggtgtcgctcagttgcccaggctggagtgcagtggtgtgataatagctcactgcagcctcagtaattgtagcttcaatctcttgggctcaaacgatcctcctgcctcagcctctggagtggctgggactacagatatgcacttccacacctggctaatttttttcctttttagtagagacaaggtcttgccatgttgcccaggctggtcttgaactcctgagctcaggagctccttggcctccccagttcctgggattaaggcatggggcactgtgcctggccaattttccgtatgttagtttaactgtaaagaatagtcttttaaatcaatgtgaatagaaaagtgtcaaataaactgatagtgtacagttgtaattagaaagaagcacagcaccaatgaggaaaagaaccaggcaggtaaaaactgagggaagggtaaatgaaaccatctctaataaataagcaaacatgactagtgcatagaaaaactgtgtgaggcagagaagctccaagagctctgggatgaaaatagctggaaatcctcaagagggatggagcttagtgtagagatggggaagtaattttgaaatgttgagacctatgcttgaagagcctagaaacaatgatcttggacacgacagaaggaaattaagtgtctacagtatgctaggtgttgctctcctatgtattaatatgatatcatttaattcttacctctattctttgagggagggtattattagcaacaatttgacagatggaaaaaatgaggtacagagggggttgaaaacatgctgcaagtcacatagcaactaattgggggtaaactcaaagggcctgatttttaattttaaagtagtttggggataaagataatagacaaaaccaacaaggtgtagcataggtgcaaattcttagggcctaggtcacccatcagtacttctttggagttttctgggttgaattggttaaaagaaaagagttgaaaattgttacatttagatttaggtagtttattgcagtttaaaaatgtgggttatggctg

SEQ ID NO: 47967 - DNA, 1026 bp, Homo sapiens
gttccaaagaaaataataggaaaataatattttatcattgacccagtaaaaacaagtgcaaaacaaatttatgttcacaatcaagaataatgacctttctgcactttttagaacccagtattgagagatttcgtagtttatatattgactttatctttgacttattgaaaatattgttttcatccttattgggtgtcctggaaaaatacccaagttgatccttaaatttgaaaaaagaaaattcagaacgaagtatttctagattctaatggtactagactagaaaatagaagattggtaggtaaagaaaataatgtatatgaaatagtatatgaacacagaagcataacgtatttgtgttcctacattgaacacaaattcagtatgcattttctgtctttttgcagcagttcaactttggacatgtatttctttctttctctttttgttaaataaatgaacagaatttatcccttgatcatctgtaacatagtttcattgtaaccaatagtctgggctttcacttgaatgtttttttaatgaatttatctggagatgctttgcatttttctaaattttggctacactaattagagagtgggtattacgaaaaactgacaggcagttttaaaaaatattaaatgaattggttttgaaaagggatacaactatgtagttttacatttttcaacttgtttttacattgccctttagaatgtttaatattttgtaatgaaagtatgcggtttttcttcttttttttcttttttcttttttttttttttttcaaaaggaaaacaatcgggtaaaaatctgagaaatattttcagttgtccaaggctaatgttgacttaaataggtctaggtcttcatggttgacagctgcagataattagctttttctttcttaacaaagaaagcaaatggagctgcaagacattcattgccttttctgtcatcaaaataataatgtatgtatttaactcctgcagttccttaaattgatttagtgctaagctgcctaca

SEQ ID NO: 47968 - DNA, 1808 bp, Homo sapiens
acctatgtctttatactataatttagattaggacctaatgaaggggcaagaagctggtttactaaataagatcattcagtaatcgcagtgcatttggtagaaagattctgaagaagtgaagacagaattctaggcagtactgctgtctgttctataaattggatgtaaggagaaggctgatttataattcaacaaactcccaaattaggcatccctttttcccccttgctgggatttaaggaggattttttctaataactagccaccttattcttgatcattcaaaatctgggtgagaattttcttaaaagtcttagacagatatattttaaacgtaattctatattgggaacataagtgattatgccacacataggcataaacaatgctttcatgagttcaattatacttaatgaatttcacacttagagagacaagtttaagcagggtaggcatagaaatgtttcaaagatatgttgaagccaaacttgtaattgacagtcagatatagtgacaaaagaaacactagacttggaattaggagacctctgtttgagacttggctttaccattactctgtaaggatccttgagcaagtgatttaaattctccaagactcagttatttgtaaaatgatgccagaatgatattacttgccttattttattgcagggttgttctgaggacaaagttagggaacaggtgacaaaggtacagtgatgtacaaatggatgctgttattatggcagcatctaatatatataagggtaaatgtcctgagctgtgagtgggacagatttgcctttagaattgctctgctgtttagtaatttggtgctttgggccaaagcaccacaatctttttgaatttcagtactctcatctgtataaaataatcaacatcacagatttgtgagaattacattaatgtagatactatatttaaatttttgtaaaatagtgatggggtaggagttattatcttgaacagatttcagaaagttagaaaagaaatagccagagattttttatctgttcccaaacatcttaataagataaattactcatagaatgttagaatgctagaagagccctgtgaaggtcatctatcttatcctgctcatttaaagacaaggatcacctcctaatacttttgtcagttgtactctgtttatatgcatagatgataacatctcaccagcatcatcaattgtaaaggatagcaactgtctctcaatcacaatagatacagatttctgaaaatgtaaagccatgtcagagaagaactctggagctagtatcgggctgtgaaaagaatttgggctttggcccggtgcggtggctcactgcctgtaatcccagcactctgggaggccgaggcgggcggatcacgaggtcaggagatcgagaccatccttgctaacatggtgaaaccccgtctctactaaaaaaaaaaaagaaaaaaagaaaaaattagccgggtgtggtggtgggcacctgtagtcccagctactcgggaggctaaggcaggagaatggcgtgaacccggtaggcggagcttgtagtgagtcaagatcgcaccactgcactccagcctgggcgacagagtgagactccgtctcaaaaaaaaaaaaaaggaaaaagaaaaaaagaaaagaatctgggctttgttgtgaaaagttgagatggaatcttgccctgtcagttactagtttgtgacagtgaaatatttacttagtattttgtggccacatagctatgctgtttttttgttgttgttttaacctaccattgttgttttaacttacc

SEQ ID NO: 47969 - DNA, 1035 bp, Homo sapiens
tttactggtccaggtatgacttcttggaagccaggcttacaaataaaaacaagatcctaaaaaaaaaaaaaaaaaaagttctagcagagaactcggtggccacacactacggggaatacaggatctgtaaaattcgttcatgaaagtactaaagaatcagcatcaagaaaaacaacacactgatgattaaaaaatttaggggaataatgtggagcaatctgatatgagatttgttaaaatatattacctaaaatgttcagttttaacaaaaattgagaaatgcaaagaaacaggaaataaaacacacagagacaaataataaaaaacgaacaaaaaaagtccctgtgggagcctagattttagactttgtagtctttaagttagctattacaaatacattcaaagaactaaatgaaaccatgtctaaagaattaaagggaagcatcagaatggtgtttcaccagagaaagagtatcaataaagatagaaattattaaaaaacaaggaagttctggagcttaaaagtataataactgaaatgaaaaattcactagaggagctcaacaacagatataaattggcaaatgaaggaatcttttaactcgaagttaggtcaatagagattgttcaatgtgaggatcagaaagaaaaatgaacagagtctcaaaagacttatgtgactccattaaatgttgtgccaacatggacattataggattcccagaagatgagaatgaggcagaaagaatatttaaaaaaaaatggcagaaaactttccaaacttgctgaaaaatattactctgtgctacacatccaagaagctcactgtaatccaagttgaataagcccaaagtgatccatacctagacccatcatagttgaatttaaagaaaaatcttgaaagtagcaggagaaaaatgacttgttacaaggaatcctcaataggcttaatagctgacttacgagaaaccctggaggctagaagacattttcaacattgaaagtaaaagactgtcaaccagtaattctctattt

SEQ ID NO: 47970 - DNA, 1438 bp, Homo sapiens
catctttctctctttgaacttatacaattatatatacaatatttatttttaatctaggtttctatcctgaaaggccggttcaatgattatacttgcaaatatgcccaggcatttatgtctgaagtgagtcagctgtgcacacattttctcaagctgtgggccagagtctgttgaagacgagtacctggttatttctgacattaaaaaagtaaaaaattaagcaaaatttagtatctccacttgtttgtaccaccgttgtgtttatgaaaagatatgtgaggtataagagactttggtgaccaatgagtcttctctcatgtttttcctcgtaactcttttgattaggaaacatctaagcatattacagcatagagcagtttgatgaaatgatgaagtgaatttccatgtatccatcactctcctttaaagttaacaacttatggttaatctggttccagctataatcatttattccccacctatcttattattcccattgctttttacctttggaaagagaaccgacatagatgactcagggctaacattcacattgccagtccattgctctgccttgtatgttgtgttatctaccctgtggatggaagggtgaggaaaaaaaaatcgtgaaaataatgaaagtttctaaacaagtgttaaatttaatattttgaattgtgaagtgtcatatgtctgatgttagatttagagttggaattgaatactgtataatttttcaaatttagtgttgactgcacaaagactgaaagttctgtgagatggtattatttacctctttattaagatggcttttatgtttttgaaagattttctgtgtatttttctttcactaaaaattgtgaaatatataagtgagtttttggcattcataatatgatgtggctgaaattatcctttggatttatagaatgtacttcaaggtaccttttcattatcctcaattattgatttcaaaaatcagctcatttcagtatctcaagtttttagatatataaaggtgaatggtagtagttaaaaagtgaaagtgatttttttttttttcttttgagacagagtcttgctgtgtctcccaggctggagtgcagtgcgtgatgtgggctcactgcaagctccgcctcccgggttcacaccattctcctgcctcagcttctcgagtagctgggactacaggcgcccgccactacgcccggctaattttttgtatttttttttttttagtggagacggggtttcactgtgttagcaagaatggtctcgatctcctgacctcgtgatccgcccgcctcggcctcccagagtgctgggattacaggcgtgagccaccgcgcctggccgaaagtgatttttgatagaagttagaaaacgtgtttaactgaggttactcttatagtcagttctaatcagtatcacattcctg

SEQ ID NO: 47971 - DNA, 1083 bp, Homo sapiens
ggaattactacagtagtgagatccatgtttgcatttgtgatattttaattagggttgcactatgcgaaggtatgattatctgcctttatgtctgctacagagactttaccctgaaaaacctttttttttaaaaaaaaaaaaacagttgtccttcataaatctatccagccctcattttaattagtgtatattcattgtataccatctctcgagatgatgagttgctgaatttagtgccgtttgtgaagtcatcttaacctctttccagacttaaggagtgctcttcaatttctgtaagttttaatatacatgctcatttcactttttaaaaattatttcattcatttcttgagcaaatattggcacataaagtaggggccaagaagtgaactgctgtgaaggatacaagaatgaataaaactgatcattcttcaagggcctctgcccttgaaggaactcacattcaaacaattgggggtgagggagagagaagataaatgagtatgtattataatagatggttgtcaatgctatggaaaaaacaaatgtgagaagcaggggggtagagagtgtaaatgatatgtaaatgatgggggtggagaaggttgtaattttaaataggatgattaagaacaccttgcagataaggtaacatttgaacaaagacctgaaggaagttttgaatatgtcttcaaatgtggctttgtatatttataatataatattgatactttggtagctgctggccttcctgttaaagagtcctaatttttacatctgtcctcacacagcactttctgcctttctctttacccccttttatcatttttatatgcctttccctgaatattttattttatattttatataaatataaaatattttattttatattttatataaatataaaatattttattttatattttatataaatataaagtattttattttatattatataaatataaaatattttatatttatataaatataaaatattttatttatataaaatataaatatacattaatatatatttatatatatataaatataaaaatgtatatattcatatatata

SEQ ID NO: 47972 - DNA, 1049 bp, Homo sapiens
caacatatatactgactcataaattagaatggaaaatacaaatattgaaagtgtaattcaaatgaatagaaagtgctaaatacttgcaagccttaaattgggatttgaatatagagattgagttaccagagtaactaaatactagactgctgtatttgttggatgtgcagagaaggaaactcaaatatggaacgtggtcttaatgtcttatgaatcatttttacttaacttttaaaattcagattaatagagtcctctaaaaagaaggtttttttgaatttttagaaatagctcagagttttacgtttccctctgtcagaatcttttcaggattcctcattgcctcttcgtcagagtcgtttaagaaatatttattagttatcacagtgtcccacagaacaaccacagtctttgctgttaggaagcttatagtctcatgtccattttcaaacttgtatttcaccacttttctctgtacttccccttttttgaccagtctacatttcgtatctgtgggatctgcatttgtgaattcaaccagctgaggatgggaaacacttgaaaaaagaaaacaatatataacaacacaacaataaaaaaagtaaatacagtataacaactttatatagcacttacattgtattaggaattataattaatctagagatgatttaaagtatacacgggaggatgtgtacaggctatacacaaatactatgctattttatataagagagttgggcacccttttttaagatggaggtcctggaaccaattccccatggttacggagggacaactgtattatgtattggttaagagcatgaacttcaaaatgaacagccctgggtgtgaattcgagctctgccactgactagcagtttaatgttaggcagattacttaaattctgtgaaataggattaataaaatcaacctgaaaagattgtttcaaagacagtatatgacatagtcaaaatagcactgtgcctgacatgtgagtgtttaataaatggcaattgctattattatcctatatggtctgaattct

SEQ ID NO: 47973 - DNA, 1048 bp, Homo sapiens
ttcaccattctccccactcccgttaagtgtttagttatatgaccccctttgcgttatttttgtagataattagccccaacatatcaattagactgactctcagcttagccacctcctctgcttcctttcgccagtgaatttgacacagatttaaaaggaacttttgggaaaagtttaggaaatgtgatttggatggtcaggttatgcagtcatacattacttaatgatatggatatgttctgagaattacgtagttaggtgatttcatcattgtgtgaacatcatagagtgtacccaacacacacctagatggtatagcctgctacacgcctatgctatatagtatagcatattgttctcgtctataaacctgcgtagcatgttattggactgaatactgtaggcacttgtaactcagagataagtatttgtgtatctgaacatatctaaacgtagaaaaggtaatgcattgtgtcaagatgtttagttggttatgatgtcactgggctataggaatttttgagctccattttgttatgggatgtggtttgttgttgacagaaatgttatgtggtgcgtgactgtatggttattcttaccatttccgatagtctattattatcttacaatttctactcatctgactgtcctcttggacaaatttataaccttgttccactaactatgtaatttgagtgtggttttgattcagaaggctcccttcttagtcctggctatgtactggcctctggctaagtaccttagggttaaatctgtagtccataaacactgtgtttgcacaatcacagatgcctgctgttgttgacttttaattcctggattctcctttctcacttttattagaagcagtaatacccagctagtactgcttgcctttgctttagagtgcttggtcaagatttctgaaggttcttggtaattcctgtttaggcaaaaatgaggtattgggtaataggagttgagcttaggaaaactaatagagtgagacagctgtcctcaaaataatagtgtgttagttggtaagagg

SEQ ID NO: 47974 - DNA, 1041 bp, Homo sapiens
aaaaaactttttcaattcatttccttgtgattgctattttaaatgaagacgatattttgttctgaaagaagtctttctcagagcactcagatttgtttataattattcctcctctccccaaactgggttccatgcaaatctctaatactaacttgtatttttttttctgttcagatgagtgtcaaatgcctgaacacttttggatggtgaagctcctgggtcctataaactctctctgaagttaataggagttttgctgtcttgggacagtttcagaccttatgccatttacataataggttttcagttaagtaaattatatactataatgttatggtttaatattttatttacagtgtctgagaactttttttgaggcatttcactcatgtatagctcaggttttctgtgatttagattttcattcacaagttgatttgagagcagaacttaaattgaatttcattacttttccattttttgaagcatatatgtgggataaaattgctattagagctgctgtggaattgattaaataatcagaaacactgagaaatggtaaatttaaaaattaaacacaaggatagatacttagcatttactttattctttcttaatatttttcctagaagggactatgttatgtattgatactctcttgtgttttcagtttttatactaatagaaatttgtaaaagtgatcatgctttgaaactaaaactattaaatagaagtcacttgtaacttgttttgaatagtcaaatgtctgtgattcaatgtatgtcataatgcctaactcagtcgttttggtgtgttttgcctatgaattgtattaaatggtgtaggcatcatacatatacacatatatggcaaactaatgaatttctagaagttttgcatcgtttcacaatgttttcattaaaggttgtagtgatggttagttttttttgtattattcctccagtactcaaatagtcttgtactctgctttggtactcaaataaaaggttatagtttataagcttactgtgctttaacctg

SEQ ID NO: 47975 - DNA, 1064 bp, Homo sapiens
ctgtagtcccagctattcgggaggctgaggcaggagaatcgcttgaacctgggaggcaaaggttgcagtgagccgagatcacgccactgcactccagcctgggcactgagcgagactctgtctcaaaaaaaaaaaaaaaaaaagaaaagaaaagaaagaaatagaaaagaagtagggtaaaggaaactcctattgtttgacagcctcctgtgtgcatttaagcaccatagaaaccttaggagagatttcttattttcattttcaagcatgacagttgtgaaactgtggccctcagagtattttatttcatattgctattttttttatgtccaagatcacacaattggtagttaacggaactaagtttagaatagagttatttgtatctgacttcaaacaggcaacaatacccttagctccatgtcctgctggagattttcttagttcaggaacatttcttttctctttaagataaccttcactatttacaatttttgagcaccataatttccttaaaaagcattacctcacactcatgtcctactactgcccagaaacactgaaaataaaaggtattggcttttgctattataaatcatttcacctgataccaattttgaagacaaaatatgaaaaaattctgtccctgtgtcttactcttttccagtattccagcatgacaggcaaggtatgttctagacacaggcaaatttagaaatatagaaatatcatctgctggagaataattgatccttgttatatgtctgatcatatttctggctagtcatcttcagaacatcagatttaattaaatgtagtaactaattaaaggacagagtgtgtgattgaattcctggaaaattagaaaagaaaatttcagataggtagaattctcttcatttgttcctttttgggggggtaacgtcttgaccttttgttaaatacagtgcaaagagaatgtaattaatgcaagtgtgttttgtacgcccagtaatagatttttttcattgaaacataacttttataagatgcttctgttattactagctgtcaggcgaaaatta

SEQ ID NO: 47976 - DNA, 1079 bp, Homo sapiens
tttaagctgcttaacgtctgtagtggctcttcctctgggaagtggatgcactggtttttgggaggttggggatgtgggatgtcacgggccaccagagaacccaaatttccttacaggcatcaccaacagctacactgtcacagagagctgaagatgcccaaaggataccacatttttgctctatttccatataagaaaccagagacacctgtaatcccagcactttgggaggctgaggcaggaggatcacacgaggtcaggagtttgagaccagcctggccaacatggcaaaaccccgtctctacttaaaatacaaaaattagctgggcgtggtggcgggcacctgtaatcccagctactctggaaaccgaggcaggagaattacttgaacccagaaggttgaggttgcagtgagctgagattgtgccgttgcactccagcctggatgataagagcaaaacactgtctcaaaaaaaaaaaaaaaaaaaaaaaagaaaaagaaaaaaaagaaaccagagatatgtgaagatctaagatgtgaacaaatagaaggcaaagatcaagagagatggtggctagggtccaccggtccccacatttcctggcagctcataaaagaacatagtggttttcacaaaaatgtatggaagaatgtttttacacactagtccaacagaaacatgaatcacagtgtcctcaagaaattgcttgaatatctaaaaagcaccaaggaaaagtttatgtgcccagtgtcctttacaaaattattggaaggaagttagaaatgatcattgactgttttttttgtgtgtgtgggtctatttttttcccctgatacaggtaaaaaaagacatataaccatcaccgaaaagaatctggtttgctagatgttctatattggttcttcaaaatgtacattgactacttttaaccacactcttccaatacctaatagaaattcatcggtttgtttattcaccaggcatttattgatgttgctcatgccaggcattttggtgcctgctgtagagacatctgagctatggaaaacactgccccatacttgcattgtttgcagc

SEQ ID NO: 47977 - DNA, 1052 bp, Homo sapiens
tgtcttcagctctggctctctttctgccatagctgcagtggggtagtaacttcgataggactaagaatccactgcggtctgccccttttatttttagcccctctactggtctttatttctcctggagatcagcagttgatactcaaacgcaaggagtagggagggattttggcatcaagaatgagtcctccaaacggctttcctgaagttcctcctggtatatcacccacagttcttctcacacctctgttctatgaacaactagtaatcactatggtgggaattaatttgggagtcaaagttcaaggaaaaaattctcaggtaatgcgccgtttgctgggcacctatttagtaggtgagtctcagggcttaaggctgcaggtcttcacagtagcctctctgtttttcctctagcactcttggagtctcagggagaaaactgttttctggtttgagtcttatatcctcccattttggctactgatagaaaccgttaccaatttgggctgagttctctacttctttcacaacaggagtcttgctttcaattcaagttgtcaatcatttttcaaaaacccactctttatttatacatctgtttatttatatcctatcttgttctacagaaattaaggggagcagagaatagtaaaactacaagtataaagtagaaaataaagattagagaggattgaaattagagtagggcaaggcctgagagaaaaaaaaaagagatttgatttctgtgttcttagccagaaaaaataaaacaaacaacaaaaacaaaatgtaaaacgcagtgcatcccagaatttttgttgctggtgaggagttaaaaaagtcttcaaacggtaaaggaaaatcctcacttggggcttttttcagatggtaattccctgtgaaaagcactgaggtcttaaagatgaccttgaatctttcagcctagcaaggaatcaggcaaactgaaacctacagagtaaactccaggcggctcaaggccaagtcatctggtataggagcatgtaggaaagaaggattcattgtgacagagg

SEQ ID NO: 47978 - DNA, 1045 bp, Homo sapiens
atcttatctccaatcttgctctctcctggagatagcaactggaagatttctgagcctgagttttggaatggctgagaagccgatccaatagctcagctaccagccaggcaggctttccaatagtttcaggccagaatctgaaggagacccagaagagcaacctgtaagtctcaaaatctggaagacaaagtagccaattaattcccccaaccataaagttttagagctggccagtatcttagaaatctcctctgctcggcaggttcctacatattcaacagggcatttttattgagccttatccaaggccctcaaggcttcataaaactgtgagttttatagtattcctgctaatcccatacatttattggaactaactctattggcctgacatgaacaagccacttacttttctgggccttagttctccatgggtagggcaagggggttacattacggttgatttttttaaatcccttatttttctgataccctttaatcagtggacagaccaggatttattgcccaagtgtgcattgcaagaaattgaatagacatattaaacacacacacacacacacacacatgcatacatgcatgcatgcatgcacaaaaaataacaaaaacctgtagtcaagaaagaaaaaaaatcccttgacagtgctctttttcgaggttttcactgtgtgactaggctctgtctccttacttggtcttctgaggccatttgtatgtacatgttgactgactgactttgcaggtgatgacaaatgggaatgtctcttgtgaaattcttgctctttgagccccaggattttctctaatatttatttttggtttctgattatacaggttatacttggtcattgtaaacaaaatagaaaatagctataaaggatataaattcactgctcaaacacattttaaaaaacatcattagccttttttctttgcctacataaaatatttctttgccctttttgccttttgcaacttggaagttataaatcttgttttttcattcagattaattttctaattaaat

SEQ ID NO: 47979 - DNA, 1054 bp, Homo sapiens
cccactgcttttgtggatgatgcaaatctggcacctttggggttcttaggatatgatctcaataaactgcctgtgtttatcagagtcaggatttaaccaggagatgtttttcatattgagcaattcagtgtgcttcacattcaacaacaatagcactgcacataccgatggttgtttttattctaaaatattttatcttggcaaaatattttggtcagtatgcgaagctggtaaaatctctggcattttgcattgaattacccataaattcctgagatctttaatcaaaaaagagggaggaagctggcggaggtggtcctaagagatgcctcctcccttcctctgccttctcactgaagggtgtgctggtgatttctaggatagagtgagaagaccatcagctgagcccaccccttcttgcccaggtgggcactgaggcccaggatttcacctaggcctgtgtgtttccctgttccttcttctaggatggacatcctgttatgttatagatcttcactcaagcagagactcactcatacttttttttactttgaatcctggaaaatattttccttttgactcttaatttatggtagaggcaatatcagttctctgtggcttctggtggcaggcagatggaagaaaggatgttctgccccaacaagttggagatgtgcagctcgccaaacctttagggccctaatgggaggaagatttctgtgaacagaagccctccccatggagtaaggagtgatttgcttccagcgtatctcaccctttgtttcctttccacctttgtttgtttgtttatttatttatttgagacagagtcgtgctctgttgcccaggctggagtgcagtggcacgatctcggctcactgccacctctgcctcctgggtccaagagattctcctgcctcagcctcccgagtagctgggattacaggcgcctgccactgtgcctggttaatttctgtatttttagtagagacggaattttgccatgttgcccaggctggtcttgagctccagggttcaagcaatccacctgcct

SEQ ID NO: 47980 - DNA, 1090 bp, Homo sapiens
actcacagaagaccttcgttccaaagaggacagacaggaggactgctggctattggaaagggtgctagtctagagccggtaggagtaactgggggtaaatgaattcttctgctctgtttggcacttaccaaaaggactaaatcactgcaagaaaccttctgaacataattccagcatggctgaatgactgagatcaagtcgttagaaacttaaagttgataaaagttgcattttgagtcttaagcggtggcacatgcatgagccttctgtctgtgcacatatttcaggagaccctccccaactttacccactcaatgactccccccatcagttttttttttttttttttgagacagagtctcactgtgtcgcccagcctggagtgcagtagtgcaatctcggatcactgcaacctccgcctcccgggttcaagcgattctcctgcctcagcctccggagtagctggaactacaggcaggtgccaccacgcccagcgattttttttaaatttttagtagagacagagtttcaccgggttagccaggatggtctcgatctcctggcctcgtgatccacccacctcggcctcccaaagtgtggggattacaggcgtgagccaccgcgcctggctccctcatcacatttttattaagtccagtgaggtgcagctttccttgcataactgaggcaggactgatgccatggagtgtatgtggcgatgcctttttgagtccttccaactctagggactcttagggagcaaagagcttggactaagaggtccatagtcagataaacctattttctgaaatagttgcatgaccttgagcaggtcacttaagctctttatattaacaataaacacacaaatacaagcatacctcattttattttgcttcagtttattgcactttgcagatactgtgtttttgacaaattgaaggtttgtagcaaacctgcatcgagtaagtgcattggcactattttttccaaacagtatgtgctcacttcatgtctctgtgtcacattttgataattctagtaatatttcaaacttttccgttgttattataatatctattacgaagat

SEQ ID NO: 47981 - DNA, 1047 bp, Homo sapiens
gctgtgagctggcttgatcttctttattgccaatgtttgggtaaacaatgtgaaaaagcctggagaaaataagagattatctcattggacaatattcattaaataatattcataaaaaccaatgaaacacaatttaaagttttatgtcaggggtccaaaagaacagaacttgaaaaacccgtttaagaactccaaatagctgctacaacaggccacatgcagttttgttttaggaaatgataggaggtaaaggatgagaccagctcttacatataactttagcaccatttcatatcaggtagctgccttgagtcagtagcagttagtggggatactgaactccagtctcagtttggaaaatgctttgctgcagtaatgggctatggcttctcaagcgattactcacggcttatgttttaagggagacattagacatcctgaaacaactgcagatgtcacttagggaaaatgcatggaaatggtagccgtataagaccatacctcttgagttgtgaaaatatcttaccttaaacaagatcctgagaagtctacttcctgtctacattcttgggaatatcagtggcctgtttcttcctctgggcagtgactaacttcatataagttgatttgtgtatgcaaaggctcttcattgctgatcagcaaaagcatcactaaccatttaaatgaaatagttatttaaaattgtgtttaatttgtttcttttgagactgggttatgagactggataatttttgtatttgtggtagagacagggtttcatcatgctgtccaggctggccttgaactacttgcctcagcctcccaaagtgctgggattacaggcatgagccaccgtgcctggcctgaaataggtattttaagagggtttattgcttcttagcctcatgaatgaaatgggtcctactcacaatggatgtttccttttctggcagatagaggaggtagaaacacagccgagaattacttttctctgattttatgtagtttgctaagacagtctgaaaaaataaaaataaataccggagg

SEQ ID NO: 47982 - DNA, 1031 bp, Homo sapiens
agctagaaaaactggcagaagtttcttagaacattctgtgatcatatttataccccgttatcatcactgccaaaaataaaaattgcaaactagatcactgccagtttataatcaggaagcactcaaaagtttacatatttcaaaataaaagattttttcttcatgcagtctgacatctagaccagcactgtccaatagaaatacaatccaagtcacaaatgtaatttaaagttttctattagccacgttaaaaagcaaaaagaaacagatgacattaataaattattttatttatcttaacatatccagcctattatcatttcaacatgtaagcaatacaaaacaattattaatattttactttttttggcactacatcattggaatctggtgtgtattttacacttacagcacatctcaattcggactagccacatttcaagcactcaatagcacatgtggctagtggctatcaagttggatagtgcagatctagaccagtcctctcaagtctcaagctcccagacaaaaccagtgtaggattttgagcaaatgactggaacataaagatagtcctaattaatttgtgagataaatgtaggctgtcttagaaccttagaacctaagtttaaagaaataattaaaagcagagacaaaatgaaaatattttctttgtgaccactgtgttaaagaagagacattaactttacaaaacaagaaatattactttgaacattccttctggaagaaaaaaaattattttcaatagttttgggatataaatgcagaacagaaaataacacaagatgcaccccttaaaacaatatatacagatatagcaaatgactcagataaagaatgatcccattgtggagggggagaaaaagtatatataaattagtacaggcacagagaaagtcgagaaagatatgactcactgttaaagtactgatagggctagtggcgatgtacacttatctgtgtgtgttactgactgctgtagcagaactagagctggtccagggaaaggc

SEQ ID NO: 47983 - DNA, 1108 bp, Homo sapiens
taagattgaagaccagtgcctttccgttttactttggtaaagtaaatgtcaaacaatatatatgatttggccacattccattattttattaaacaccagtttaaacacatccattaatgtaagataaaaaggaaagtatgttttttactactcttaagtgtcaagtaaaaatttagaagagaccgggtgtggtggctcatgtctgtaatcccagtattttggaaggttaaggcaggaggacagcttgagcccagaagttcgagaccagcctgggcaacacagtgagaccgtgtctctacaaaaaattagctggggatggtggcatgtgcctatagtcccagctacctgggaatctgaggcaggaggattgcttgagcccagaagttcaaggctgcagtgagcaatgattgcaccactgcactctagcctgagtgacagagcaggaccttatctctaaaaacaaacaaaagtttagactagtcaccagaagcagcctagctaaaatatcaagtcaagcatttgctattaaagttcaactgtttcaggaaaatttcatattttggttgcatttcagaagagtttagggtatttaagttaggactactgccacattgagagtttttttttaatataaaaatataattttatgtttataataggaaatgttcattgtagtacatgaaaaagaaaacggaaattatttataatttcaccacacaagtataaccaaagttaaacttttggtatacttccttttaacttctaattgtatatgttcaaatatatcctatgtgcagaagagcatgtaaaagatatgcgcacagtttattcagcaaaacccccactatttacccatagaaattaggatatggatcattactaggatcctagaaaccagttcccaagagcattccccctccctccctgaggttatcattattgtaacttttgtcttcttaattattcctttgctttttagttttactgcttatatatgtatccttcaacaatatattatttagttctgcctgtcactaaaaaaatactttataaaaaaatacaaaatacgaacattgatactagatatatccatttagcatctatctaa

SEQ ID NO: 47984 - DNA, 1035 bp, Homo sapiens
aataacatgaagaatcatgctgttaactgtgtgaaagatgtgggaattttaataatcattttctatatttagagatcaaacaagtctaattcttcaaagcttatgagaatggtttcacttcatattagatggtgaacaatccataatgaacttatattcaccctgtgtccccctcccgacccccttggctcacatagtgagcaaataattttcagataaatcaacttctcagaactatgcaattgtatatacatgtccattacagatgagagatggatggatttaagggttttgttaaaagtatgtttgctataatggcaaaattgaaatggaaagcccatgaaatggaaagcccaacctcaacccagacaagtacctcggttctgtcccacaccaatttaagaactgaaatacatgattgacttagaaaagtaaactgacatttcgttctcctctgaaaatacccaaaggttaacttcaggatcaccttgcctaaacctacagtcaacttttttcatcctgttagaaaatccacttactaaaacagattcatgttctttgggcagcatgttcattttcatttttagatgttgccaggctggagtgcagtggcgccatcttggctcactgcaacctctgcctcccggggttcaagcgattctcctgcctcagcctcctgagtaactgggactacagccacgcgccaccatgcccagctaatttttgtattttgggtagagacagggtttcaccatgttggccaggatggtctcgatctcctgacctcaggatccacccgcctcggcctcccaaagtgccgggattacaggcgtaagctactgcgcccggctgttcattcatttttaaaagggtaataatatgatatgccagtctgaaagaagaggaggacctgattttcctaaagagaagttataagagattgtgagctcattaggcaaaatttgaaagagctcactaatggtataattggaagagaatgttacccatctacctaagagtaataattttaaggca

SEQ ID NO: 47985 - DNA, 2080 bp, Homo sapiens
attttattttggatactaaggatgtgccaaatgattcggatactaagatgcatcgtttgaaatcatctagtgtgttgtatgcagttatcctcaaaaacatcagcgatgtctgaacctttaaaacatctgttagagcaaaattaaaagagcatttggtagtaatctaactttttgttcagttaataagtggttgataaagtttccatatttttctggaaaagttaaaaaaagttacatgtcatttggagaaaatacgtaatcagaaatttgtgcatagattgatgccaaaaaagacatttccagcattgtggaacatggtgagacactatataaaattccagaaagaaagcaactggatttacagatttattgtgagacacaaattcactgctgcctttacactaagaaatgtatatgttaaccatatatgctgtatttattttgtcgttaagcatactttcagtttactcagaattttcaatttgctataaagatgtatcaattagcatatagaaaaatattactttaagatgacttgtttcctttgaaaatacctgtgtactgagggttatgatttgtgtcaaaaattgacataagtgcttttacaagcaccaaagttgaatgaattttcaacaaaatgtaattaaagtctatgttttcagttatgactcaggttaagaaatgtgttttaggatctacttgctggtttttctttttgatccaaatgtgtgatctgccctgataaataacaagttatagtaccatctcccccgccaataaaaaagagaagaaaaaagagaaacccgtggcactatgtaaataaagtaagcatactttgttgttagtaaatagatgaggcatgcctgggaaatgctcccttggcataaatagcaatcaatcataattagtaaacaggtgtaccaataaaaagaatttacatgataggttaacaaggaccaggaaagtgagtttcctgaaggagttctttgttcctgatcaaagaaattgatacctgttagcattcactgccaccatattttaaggagaaagaactctattggtgtcgtctgagcagccatttaaaaattggaatctaaaggatggttgctgatgtactgtgtggtctggtagaagtggggaaatatgagagatggaggaaaaacttgattatgtcttccatggcatatttactcttactttacttcgtgccaaatcaaatgaaacaagccgtcttacaagtcgttattgcctttaaaaatctgttccgtttttttcccaggtacttaaaatacaagtgccagtaagtggttcttatgtgttttggggggaaaattttatttcccttttcttctgatatttaaaaaattcatcgatctttcaagatgaaccaaggttttttaaaagaaatataggaaacacttcattctttataaaactttctataatgccttatttgaatgttaatcttatgtgctttctaaaaaatgttgtgaaataccaaacttatggattatcactaggttatcaagcatatattagtctttatcagaataaaatgaaatttcataactgtggctattactttgttcttggtccttcacagggcctgctccatcccaccttcctttctgctgcctgatgtctcaatggcttctgaatgactgttctaataaatgatcttaaaacagtccataggctggtttcagtttatgcaatacttcatctcctgctatggtagccataccggccttcataatacccttaggggatttggaaatcaaagtgagcagtggaagaacatggctatgagaattaagactcttatttcctgtgaccattccctccccacccgcaaacacttagcccaaagttttgcacatacattcattactttaggaatgaatatgactgtaatacaacttttttctttatttttttttagacagggcctcactctgttgcccagactagagtgcagtggcataattgggtcactgtaacgttgaactcctgggctcacgcaattcttctacctcagcctcccaagtagctgaaactacaggtatgtaccaccatgcct

SEQ ID NO: 47986 - DNA, 1031 bp, Homo sapiens
gatcagggcagaacagtatcttgggcagaacacagactctggagccagaatacctaagttcaagtcccagctcaccatcttcaccttcaccttctgcttaacctctgcctgttttttcctctgtaaattggggaagagaataaaggtttgaaagattaatatgggtaactcttagaactgggcctgacgcatagaaagcactatagaaatgttagctattgttattgttgttgtaatagcgtatgtatgcagtagaaatctgaagcaatagtttccaaactgttatttatttatttattttagagacagggtctcactctgtcacccaggttggagtgcagtggttctttcatagttcactacagccttgaattcctgggctcaagcaattctcctgtctcagcctcccaagtagccaggactataggcccgtgccaccagacctggccaattaaaaaaattttttttagagctggggctcttgccatgttgcacgggctactcaaactcctggcttcaggcaaccctcctgcctcggcctcccaaaacattgggattacaggtacgagccaccatgcctggcctttcaaaccatcttaattttttctggagcataaaattacaaggttggcaaaccattttttgtagtagctgttactataattttgtcatttgtttaatgaggctggttctgaaaattaccgtctcttttgccctaggcaagctatttaacctccatgccacaaatcccttatttgtaaaatcaggcaatattaaatagcatctgctttatagggttgttaaaagaattaagtgagagatcctggaaagtcctacaacagccctggtgtctattaaatcattcattgtcagcaattattgttcactctcttgacactgtgctaggcccttggtccacatggacaattagatccagtccctgtcaggctccaagaagctatgtttgtgggtgaggtggggagctgggtaaacagtatttatcatacaatatgatatgtgcttatattaac

SEQ ID NO: 47987 - DNA, 1986 bp, Homo sapiens
tgcctcagcctcccaggtagctgggactacaggcatgcaccaccacacccagctaatttttgtattactagtagagacagggtttcaccattttggtcaggctggtctcgaactcctgacctcaagtgatgcgcctgcctcggcctcccaaagtgccgggattacaggcatgagccattgtgcctggcctaacacttgtttttaaaggcatatgttgttttattgtgcttcacaggtactgtatctttttttacaaatctaagttttgtggcaactctgtgtcaagcaaggctattggccccattttcccaacaagtacgcacttcccatttctattttacatttttagtaacttttgcaatatttaaaatattttcattattattatatctgttaaagtgatctgtgatcagtgatctttgatgttactattataattgttttggggtgccatgaactatacccatataagatggcaaacttaattgataaatgttatgtgtgttctgactgttccactaaccagccattcccttgtctctctctcctcgagcttccctattccctgagacacaacaatattgaaattaggccaactaataaccctacagtggcctctaagtgttcaagttaaaggaagagagtggcacatctctcactttaaatcaaaagctagaaatgattaagcttagtgaggaaggcatgctgaaaaccaagacaggctgaaaccaggcttcttgcaccagttagccaagttgtaagtgcaaaggaagaccttgaaggaaattaaaagtgctgctccagtaaacactggagcacaagaaagcaaaacaaccttgttgttgatatggagaaagcttgagtggtctagaaagaagatcagaccagccacatcatccattaagccaaagcccagtccagagcaaggccctaattctcttcatttcagtgaaggctgagagatgtgttgaagctgcagaataaaaatttgaagctagcagaggttggttcatgaggtttaaggaaagaagccgtctctataacaggaaagtgcaagtgctgatgtagaagctgcagcaaggtatccagaaaatctagctaagatcattgatgaaggtgtctacactaacagattttcaatgtaaacgaaacagccttctattggaaaaagatgccatctaggacttccattgctggagaagagaagtcaatgcttgacttcaaagcttcaaaggacaggctgactctcttgctagggactaatgcagctggtgactttaagttgaagccaatgctcatttaccattccaaaaatccgagggtcttgagaattatctaaatctaccctgcctgtgctctgtaaatggaatgacaaagcctggatgacagcacatcggtttatagcatggtttactgactatttgaagcccactgttgagaactattgttgagagaaaaagattcgtttgaaagtattactgctcattgacaatgcacctggtcacccaaaagctctgctggagatgtacacggaaattcatgttgttttcatgcctgctgacacaacatccattctgtagcccacgcatcaaggagtaatttcaactctcaagttttgttatttaaaaaacacatttcataaggttcagctgctatatagatagtgattcctctgatggatttgggcaaagtaaatagaaaaacttagggaaaggatgcgccattctagatgccaggaagaacactcatgattcaggaagaaggtcaaagtgtcaacattaacaggagtttggaagaagttgattccaaccctcatggatgactttaaggggttcaagccttcagtgtaggaagtaactacacatatggtggaaatagcaagagaactagaattagaagtgcagcctgaagatgtaactggattgctgcaatctcataaaacttgaatggatgaggagttgcttttaatgaatgagcaaagaacgt

SEQ ID NO: 47988 - DNA, 1054 bp, Homo sapiens
gagaccatgtctctaaaaaagaaaatcataagaaaagaaaatagatttactgtttgttaaatggaagtggatcgtcataaagatcttcatccccattgtcttcatgtcaagtagactgaggaggaggaggggtcagttttgttgcctaagagtggcagaggcagaggtagacccatgcggttcaaatccatgttgttcaagggtccactctagaatttttatgaggagtctgttaagatgtaatgttaaatgtaggtaatcaaatggataaaagtttaccatatctccagagaacatgctggttaagagtctttgcatataattttgggagggggtaaatatatttgaaatgtaatatgttaactgcttagactcagattagggagttaagtctttttttttttttaagtaagcttcaattgaagcattataggctccaggttttaataaatattgtggataaatgcttattgatatagaaagttcatgatatagacaccattaaatactgtgcagccataaaaatgaacaagattacgtcctttgcagggacatggatggagctggaggcctttatccttagcaaactaacgcaggaaaagaaaaccaaatacctcatgttctcacttataagtgggagctaaatgatgagaacacatggacgcatagagggaacaattcacactagggcctttcagaggatggaggtggggaggagggagaggatcaggaaaaataactaatgcatactagcttaatacctgggtgatgaaataatctgtacaacaaacccccatgacacaagttcacccatgtaacaaacctgcacatatatccctgaaattataatagaaattataaaacaacaacaagaacaataaaataaaaacactttacatttgagaaagaatgacaatatcagtaggtaaaaccaacatcaacagttacaagaccatccttccagccaagtaaggcagtcaaaagaggtgtagatctggtagcagaaactgggtccataattatcaaagtggaagttcacagagcaattataact

SEQ ID NO: 47989 - DNA, 1652 bp, Homo sapiens
ctgcactccagcctgggcaacacagtgagactctgtttccaaaaaaaaaaaaaaaatatatatatatacacatatactatgtatatatttatatatgtatatatatatttatatatgtatatatatttatatatgtatatatatttatatatgtatatatatttatatatgtatatatatatttatatatgtatatatatatttatatatgtatatatatatttatatatgtatatatatatttatatatgtatatatatttatatatatatttatatatatatatatttatatatgtatatatatatatggggtctcaccatgttggtccaggcttgtcatgaactcctagcctcaagtaatcctcccctctttagcctctcaaggtgttgggattacaggcatgagccacagtgcccaaccttttaaaaaattaatattttttctttaataatcaattttagaacatacccatcaccccataaaagaaacttcatacctattagccgtcacttctgttcctaccccacacccctccacctgagcctctggcaacaccaactcacctcctgtctcttttgagttttctgtactggacatttcatacaaatgcaatcatacaatatgtggtcttttctgactggcttctttcatttagcttagtgttttcaaggctcatccacactatagcatgtttactacttcattcttttttatcgctgaatacaattccattttatggatgggccatgttttatttatccattcataagttggtgaacatttgggttgttttctctttttctgttatcttatgggtgtaccatagtttgtttaaataacttaaagaacaattttaaaaaggtaagcctggtcatgaatactgtctcaaagaaagtaggcttttgctagattggtattttttaacaaaataagttaggccttttaaaattccatggctagaatctagtagaatccagggagcttgtctctccatctatccatctcttcatccatctgtccatctaaccattcattcaggcaactatccgtggatcctttaagcatcagatatgtgctaggtagtggagacacagagagcaactgatttcactaggtgctcacagagtgtgggcatgggagcaggagggcagatggacatgtgtgttagtcagctcaggctgccgtaacacaataccacacactagggggcttattttcttatagttctggaggctagaagtacaagaccaaggcactggtagagttggtttctggtgaggcccttcttcctggcctgtctagttgccttctcactttgttctcacatggcctttcctctgtaagcaggcaaccctgatgtctcctcctcctcttataaagacaccaggcttattggattagtgccctcccattatgacctcatttaatcttagttacctcctttaaagccctatttccaaatatagtcaccctgggggttaggttccaacatacagatttaggggagacatacttccatctataacaacatgtaaacacggtcattggagtgatatgtgtctcaatagagacaagtctgtgacatttggaagtccagagggggagcttccagttccctaggaggttgagggacacttgaccatgaaggg

SEQ ID NO: 47990 - DNA, 1066 bp, Homo sapiens
ggcgcttgtaatcctagctacttgggaggctgaggcaggagaatcacttgaaactgggaggcggaggttgcagcgagccgagatggcgccattgcattccagcctaggtgaaaagagcggaactctgtctcaaaaaaaaagatgtttaattttatcaaagttgtatagttattaaacatttttattggacgcgtatgttgttaactattgtttgttgtaataaatactgttatgactatccctgcacataaacatttggcaaatctttgcttatttccttcaaataaattcctagtatggaatttctacaaatatggtactatcaaataatacaacagaaggattgtgccaatttagtttccagtcattgtttcatgagggtgctatattttataacccatggctgtattttatagctaaggtttaaaatcatcacaggagatatgataaggacactggaaactttaggcaactcattgacagtagcaaagctggaataactgtaggtcatcactgaaacttggagtcagggaacttgaatctgaccttaagacatttagtccagtcctctcttttattgtattttatttttttgagacagagtccccactctgtcgcccaggctggagtgcagtggcacgatctcggcttactgcgacctccgactcctgggttcaagcgattctcctgcttcagcttccgaactcaggtagctgggactacaggcttgcaccaccgtggctggctaatttattttcagtagagatggttttgccgtattggcaggctggtctcgaactcctgacctcaggtgatccaaccgccttggcctctcagagtcagacctctcttttagagatgaggagactgagttcaggagaacttgcttgatagtaaacagtatttattgggggattagggtgaaaacatagatttctccatgttaaatactcttttctctatgcagtatttcccacattgagattcatgagatagacatgaattagacgatgagattcatgagatagacattttagatagacaaaaactttttatttattttaaa

SEQ ID NO: 47991 - DNA, 1788 bp, Homo sapiens
taggtcgagctcgaagttcagagatgaaaggaaaccaccgggctttgtttcagaggcccaagtcctcccagtggcagccactcttgggggtccatcgagctgagccgcagcttgttcaacgtgctggtgcctttggaagactgtcattagccctgctagagtctgctcgttctgttttgttttctttgtttctttcttttctctttcttttttggtgtggttaagctctatgagatcttgtagttctgacctttcccccatattcccaaggccaagtattatttacccttgttgcagtcataaaattatctcattttgatatccttagatttcgtagacacgaaggctattcttgtgcatggttctataaaatattttgtttctcatgccaaataaattcttacagctcggcacgaaaggcagttaacaatctacactatacaatgggtgaatttgtggtatgtaaattctctcttaagagggttgtttttgaaaagccaatcgcaggagtttttttctcaaaaaatgttgaccttacttttcaaaatagaacccgttttgaaactcattttgaaacccatttacatagaaataatgcttccacaaggcctttttcttttgttttccttctttttttttttttttttgtaaggatagcaaacaggatagacgtgcatagcataaaaaacaacgccctctttcgttccctacctcagtcccattcttcggaggggaacagagttttccttctagaaaggtttactttttaagcgcagatacgtgtaccttttttctttttttctttttggtttgtttgttttttgagacggagtcttgctctgtctgcctcctgggttcaagcaattctcctgtctcagcctccctagtagctgggactacaggcgcatgccaccacgccgggctaattttttgtatttttagtagcgatggggtttcactgtgttagccaggctggtccccatctcctgacctcgtgatccacccggctcggccttccaaagtgctcggattacaggcgtgagccaccgcgcccggccaacgtgtatcttttcttgtatgtaatatgtgagcatactatgtgtatatactctgcactagtgtggtttcactttgtgtctgggatatatttcacatgaaaacggacaaatccatttcattctgtttttgtagtatgtattttctgaatctagtatgatttatttaaccagttcacacttgtaatcccagcactttgtgaggtcaaggcgggcggatcacttgaccttagcagttctagaccagcctgggctacttggtgaaactgcgtctctataaaaaattcaaaaacaattagcgaggcgcagtggcaggcacctgtgatcctagctactcgggaggctgaggagagagaatcgcttgaacctgggaggcggaggttgctgtgagtcgagattgcaacgctgcactccagcctgagcaagaccccatctcgaaaaaaaagaaagaaagaacagagattgtttgacttgcttgctaaatgttgttaatgcgacatactgaagtagttaggtaacattaaacagtcccagatactgctactggttggggtcaggttaaccaaagtctaggagagtaggcctggcgcaatggctcatgcttgtaatcccagcactttgggggctgagtcgggcaggtcacttgaggtcaggaattcaagaccagcctaggcaacatgacgaaacccccgtctctaccaaaaatacaaaaaattagctgggcatggtggct

SEQ ID NO: 47992 - DNA, 1052 bp, Homo sapiens
tcatgttccagatcttagagcaaaggccttcagtttttccacagtcaatattatattagctgtgggtgtgttgtacatgtttttttttcttcttcttttggtttctttcaaaattttctgtctttgattttctacagtttgaatatgttgtatctagctgtagattagtatttatcctctttgacattctctgcacttcctggatttgtggtttggtgtctgacatttatttgggcaaattattagtcattatttcttaaatgtttctcagttcttttctcctttccttctctttgtggcattcctacaattcatatgttataccttttgtgctcgttctacagttcttgtatattgtattccattctttaaagtttcttttttatttttgccttatcatttgagaggtttctatgacatatccttaaggccctggtactttccttgactgcattcaatctatgataagtgtatcaaaagcatttttaaatttctgttagtgttttaaatttctgtcatttaaaaaatctttcttagagcatctatcactttacttacattatgcttctgtgcatgcatgtagtcgactccattagagaccttagtacagtaatcacagttattttaaattcccagtctgatatttccaaaatttctgccatatctgggtctggtctgatgctttttgtattttcaaattgtattttttgccttttagtatactttgtaatgtttgttaaaagccaaacatgatgggtaaaggacctgatgtaaataggtctttggtatatttaacttatgttgtagctgtaagtctcagaggctaaaattctctgatgtctttgcttttgtctcccctgttatctttgaatattcccaaagacttcttaaataaggtctgaggcttacagttcttttgcttgtaagccactgttattatttagggtgcaattgatgtgattgcaaggtaggtgtgtggggggaggagatatgggttttatagtcctagaattaggtctcttatttttagtgagcccattctgctttctact

SEQ ID NO: 47993 - DNA, 1031 bp, Homo sapiens
aatgatggtttccaacttcatccatgtccctgcaaaggacatgaactcatccttttttatggctgcatagtattccatggtgtatatgtgccacgttttcttaatccagtctatcattgatggacatttgggttggtctttgctattgtgaatagtgccacaataaacatatgtgtgcatgtgtctttatagtagcgtgatttattgaggattttctcatcgatgttcatcagggtattggcctaaaatctctttttttattgtgtctctaccaggctttcaggatgatgctagccccataaaatgagttagggaggattccctctttttctgttgatggaaatagtttcagaaggaatggtaccagctcctttttatacctctggtagaatttggctgtgaatccatctggtcctggacattttttggtcggtaggctattaattattgcctcaatttcagaacctgttattggtgtattcagagattcaacttcttcctggtttagtcttgggagggtatacatgtccaggaatttatccatttcttctagattttctagtttatttgcgtagaggtgttcatagtattctctgatggtagtttgtatttctgtgggatcagtggtgataccccctttatcatttttcattgcatctctttgattcttctctcttttcttcttaattagtgttgctagtggtctatctattttgttgatcttttcaaaaaaccagctcctggattcattgatgttttgaaggttttttttttttttttgtctctctatctccttcagttctgctctgatcttagttatttcttgccttctgctagctagcttttgaatttgtttgctcttgcctctctaattcttcttcttcttttttcttttttttttttttttttgagatggagtcttgctctgtcgcccaggctggagtgcagtggtgtgatcttggctcactgcaagctctgcctccccagttcatgccgttctcctgcctcagcctccagagtagctgggacta

SEQ ID NO: 47994 - DNA, 1096 bp, Homo sapiens
tccatcttgtgcatcccttgcccttttggctgatttgtaaaatttgtatgcactaaggttcactctgtgctgtaaagttttatgagttttgacaaatgcagaatgtcatgtatccaccacgatagtaccatacagattaactccatcaccctgaaagcccctctgctcacaatcttttgagagttcccaggtaatctctttcaggttgatatctcaggttgatcttttgtgggaaaaaaaatatgagctatgagtctttcatttcaggtgacggttctcagtcccggctgcacacgggaactatctggaagcctttagaaattatggatgcctgattttacctccagatcctgacttaattgatcccacttggtttagttggtctgggaggtatatctggttactagacctttgaaaatctccccagatgctcatgatgtgcagcaaaggtttagaaccagtctggactcctctatttcttgtttgctgccttttgataaaaacacaaataattaattgctgtatttacatcactttgggggatatgatgaatcagtatgtaagttttgtaaataagtaatgtggcaaggatgaatttcacacactaatcttgtgcaaaaacacatctatttttaaactctaattgaactcaaaatgaacctcagtttctcttggtgacagcaaatttaattttgacaagtcaaagttactcaattacttctagtttaaaactcggttctttgggagaaaatagttgaattcagctttcctcctccccttctccgttcatcttttccctggtatgacctaggcttgggtccaggtgatctcaggtggcaccagcatcagggaaggcacatctagccagatgcatctggggatccccagacagagaattatggccctgcttcctgtggagaatgttgggagggagcaggtactgcagagcataaatggtttcagagcagacctcacagagagcatgcctaagagaggccacttccgtctccctcagcggccaaggggtgtgaagaaagtctgcaaggttctcacatcagctggagagggccagagaaggtagctgaagattgagagc

SEQ ID NO: 47995 - DNA, 1030 bp, Homo sapiens
ctgaaatgtcttcaaggccttttctttattgtcttgactattagacttggctcctctttacttatgcaaattgatgcagcctgcttgaattcttcacccagaaatgggcttttcttttctaccacatggctatgctacaaattttgtaaacttttatgctcccttttaaatataagttccagttttaggtcatttctttgcttgtgcatatgagcctaggctgctagaagcagccagtctacatctcaaatgttttgctggttagaaatttcttccaccagataccgtaaatcatcactctcaagctcgaagttgcgcatatcccttggcaggggcacagtgcagccaggctctttgctaaagcttaagagaagtgactgctccgcttcccataggtttttcatttccatctgagacctcatccacctggccatctctgtccatatcactatcagcatttgggtcacaaccattcagcaagtctctaggaagatccaactttccgtcatccttctgtcttcctctgagccctccacactcttccaacctctgcccatttcacagttcgaaagccactttcagtgtgaacaagataatatgattttatagcaaaatataatctaaaataaaactttttttcttgcccctccaaatttagaccagttattccctcagagaaaatttctacatgtctttggtgggcttctgttaaattccatgtcctggacttacaatagagttgtctatatacagattaggcaatgaaacactaaacctttgtagtagtacttgaaaatggcagcattaaatgctaatatcagtcatacacacacagacacacacacacatagttacagatgcaattaagagtggcaatagcattttgcttttcttttaaaattatggttttaaggtcaaatgttactatttttaagccaattatttcaagatcctatctaacttggttcctagggtttttagggtaaagtctccaaattctccacttctcctgttcttgagttatcacttt

SEQ ID NO: 47996 - DNA, 1029 bp, Homo sapiens
ctggaattatagacgcatgccactgtggcccggctaatttttgtatttttagtagagacggggtttcaccatattggccaggctgatctcaaactcccgacctcaggtggtccacctgcctcggcctcccaaagtgttgggattacaggcgtgagtcaccgcaactggcctgtttccatcttttcttgtctgctttcttttctcttatttgctcatgatgactactccattttttctttcatctctagtttcattatatacataaccagagagtaagttaagctaaatattatcatacaaatacccattttgtttagccatataacaattaatattatatcaagctgaagtaaataatgctgatttatttcatctagagtgttgtgtattggtctcaaggtaaaaggctgtgctttaaaaaatggagacaaaattttattgttcatttgtaaacgcttatttgatatactgatgccatttctaatctttctctgtggtacaggccataaacctgtactagaagtgaaacgttttaattttctactgtggatctgccttattccaagagctatgcaacagacaatagtgttagacaaagtttcagtatgaacaaattaattcattttttatagagaagcataatctaaaacataattttcccaaccctgcctgcttaaactgcttattgccttaattatgatttcaacatgattttggtgacttctgttaatttctttttcttttttctttctttttcctttttttttttttttgagacagagtcttgctctgttacccaggctgatgtgcagtggcacgatcttggcccactgctcactgcaacctctgcctcctgggttcaagtgagcatgtcagctaatttttgaacttttttttagtatagatgggggtttcaccatgttgcctaggctggtcttaaactcctgacctcaagtgatccacttgactcagcctcccaaagtgccgggattacaggcatgagccactgtgcccacccacttctgttaa

SEQ ID NO: 47997 - DNA, 1048 bp, Homo sapiens
gactggcgtcccaggctcaacatgagggcctagaagggaagaggctggctgtgtgcagctgtggctaaggcagggacctcctcctacctcatcaacccataggggtcctgctttgggaccaatgacagagcatgtgttggggaaccataagaactgtaatcttgtagcactgtggtctgtgtggggatcggaaccagcaaggttacctttgcacagtggatggagacatctggaaggaccagagattctgcatggccggagtagacagcaactgctcaaaaccagggccctctggaggactaacctagctgcctagcactggccctgtgggctaagtaagctttctggcagtttgtgggaggtggagaagtacatgctataagagggagacactgaacttcttgctaagatgggcatgtgggtacttgaggaatcaattggaaaattaaaagggatgcaatttaattggtagtccaagctattaaaacagatcctagacatgtgattgtgtgctgagtatactgaaagaagaagtaggtgctatggaaacatataataaggggatttaatgtaatgggtgtggtgcgtggaggtagaattaggaaagacttgatgaagtataagcttagctgagatttaaaagatgactccaactcaggtggacaacaagaaaaaatattttaagaagagacaatattgtatgagaaaactcggaattgaaagactgccatgcctctgaggactagaaaatcctgtgtggttagagctttagacaatgaaggtgatggtgatgcagttaaagctggagacatgagtcaaaccatcctgggctcgttggaacttcatccagtgagcaataagaagccatggagaaggtctggacagaggacacatggtagatttatgatttttaaaagcctattatagcaaaaagtgagaacagaccaagttggaggtagcaggagtgaatacagggaaaccagttaggaagatttctctgtagtccaagttgaaccacactagcggcagtgaagttcggccaataagc

SEQ ID NO: 47998 - DNA, 1045 bp, Homo sapiens
agatctactatcagttgtgcctcagttatattaactataattcccagttatgaaaaacagagacatgagaagaatttaacttgcccataacaactggcaaaattaaaacggaaggaagagaatgcagaatgcagactcctctgcttccctttccttttctctccatctttttttcttacgacccagtctcgcttaacctgaatctccacctgggagttgtagcattcctaggctagctatcactaaggttggaaaaaggaatgatcaagaaggcttcagcctggagatagtgactgaaaatcaccctggggcagctggaaaataaaaagaaataacccttaaaaaagatgctaggaggaaagaaaggtaatcccatctctacctgtcctagcttcactttcatcttttctgctttttttcttttgccaattcactgtaccattcggttatataatgtatatattgagcacctactgtctgtcaggcactgatacctgcattttcctagtaacgacagggctttctacacactttctgatctcccttgagaccctggcccttctccaaagcccgtaaaagccactgtctttcctgtgttaaatcttctcccgctgtggcctcaggtggctcattggaacagcaggaacagttaaatctggaaggcttcagggtttctgttatctgctcactcctctacatgtgggattctctgattctttttctctaaaggggatattaagggggaaaatatccaggttcaactggggttttagcacctgtggaaaataattattgaacttgactgagtgaagggctggctgattttggtggatccctgaggtcagagctcagttgattccctaaaaaccattgagtaatttccctcaaaagaagattaggttaaagagtaagtttgaggtgcacagagggaaactttgtgggagggaaaacagaagagaaataacaccattaccccaatctatttctgataaatcagcatagaaaatccataatgttgtaattctattatcaatggatgatagag

SEQ ID NO: 47999 - DNA, 1048 bp, Homo sapiens
taaggtgtgctttatgatacaggatgtggtctctcttgatgaatgttccatttcaagcagtatgcttgaaaataatgtgcatactgttgctgttggaagaaggctttatgaatgtcacttagatctaatcgattgatgatgatgttcagttcaattatatttttactgattttctgcctattgaatttttcagtgatggaggggtgttgaagtctctgactgtaattgtgaatttgtctttctcctttagttgtatgagtttgccaactattttgacactttattgttagctacatacaaattaaagattgttatgtcttcttagagaactgaccctttatcattatgcattgcccctctttatcgctgctaattttccttgctttaaaagtcagctttgtctaaaattaatattgctctcctactttcttttgattagtgttagcatggtataatgttctccatccactgactcttaatttatgtgccttcatagttaaaatgggttttctgtagacaacacatagtggggtcttgttttttgatccaccctgacgctctgtcttttaatttgtatgtttagacattgacattcaaagtgattattaatatagttgaattaatagctaccatattagttaactattttctatttgttgcccttgttttttcttcctgtttttgtcttccactctttttctgcctttagtagttttaattggacattttatatgatgtggttttctctcctttcttagcatgtcagttacactactattttttttttaaccttttttaatggctgccctgtcgtttgcagtacacatttacagctatgcaagcccacttttaaataatactattctgcatcacagggattatgaataacttaataacaaaataatcctaatttctccttccagtctcttgtaacattgctagcatttatctctcttatacagaagcgtgtgtgcacatatgcagtatgtacacacaatgcacacatataagtatacataaccacatacattgttgctattattttgaa

SEQ ID NO: 48000 - DNA, 1023 bp, Homo sapiens
aaatcagtcttcctcttcatatggactttgacgacccagagcagcatctcccagtgtccaagtagtttcccacctcccacactgggcaccccaccaggcctccagcacctggatctaacccaggtctttaggagcctctcaagtgtgtgcccacaggaactctgctaattggcatggcccaggcacccaagttccaggtatgagaagtgccatagtaactggtctttatgtggacaatgtatttattggggctaaattatcttttcttctcatcaggctgttttaaaacattttctccaactcagcccacaaagagaaaatagaaattaacactgactcatctactaaaagccaggtgctgtgctaaacattcattagcttattcaattctcacatcaacactggagggtagacacaatttatcatcccctattttcacagaagaggaaataaaaggcagaggatacatgactcgctggtgatcatacagagctagcacaaaacagaggctggatttgaacctgaatccgtctcaattatgttcgtgccctcccttccctaaactccccgctttgctccttgcagccctagggagaagtgtctgggctgaacctacagcaaagctgtggcattacttattgagaaggatcttgtctaagcagcagggtgccaatctgggggtctacaccagcctcttgggccctgtgttcagtgacccctgggaagcattacagttaccacaaagttaccacaaagaccctggaaacagggcctggagctgttcactccgggcaagcatcatcaattagctaacatctgcctgatcacagcatgatcaaaatcgacagaactgactctgttatctgtggttgtcaactcgctaagaaagtttctgcagagctgagtgacttacaagagactgagcagctacaggagaagcaaggtttaactaaggcttctgctggagagacttttgctcagtaccatctactggacaacttctgtctcaaggctgaggagaca

SEQ ID NO: 48001 - DNA, 1049 bp, Homo sapiens
gcagagcgagtgaagagaaatgtggtaacaggcaagagtcagagaggtaaggaggaaggaagccagatcatgtagatctttaagaattggagtttttacactgagttaggtgagaagccattgaagggttttaagcagggaagggacatgatttgatttatgttttaaagcaatcactctgttgggtggagataaatgtaataggacaaagatgaaagcagggaaaccagtatactatagcagtaatccaggagaaaaatggtagaggcttggactaggatagtagcagtgcagataccaaggagtggctggattctggatataccttgaaagtaggattggtagaatttgcttaaggattggatatgtggagtatgagagaaagtgaggaatgaaaaagatgatacccactatttttggtctaaacaactggaataatggaattgccattaactgagataggggaaactcaaggagtagcaaatttgagaggtagaggggattgaagagttggatttgaacatgttaactttgatatgctctttagacatataattggtgttattgaataagcagttcagtataggagtctgagttcaagggagtctggaggtacaaatttgggagctgtcagcatcttgattgtatttaaagacataaggctggtagaaatcacttagtatatgagcatagatagagaagaaaagaaaagcgagcattagaccttccagcatgtagaagtggccaagatgagtaggactcagtagaagagactttgaaggagtgctcagtaaaacaggaagatagtcaaggaagagaagtgttttggaaaccaggtaaagaaaatgtttcataaaggagggctgctcatgatgggttgaggaaatgagaaataagaatttattatttaatttggcaacatgaggatcatattaatgaccttggtgagctgtggtagtagaagagtggataaaagtcttagaagtctattcaggagaattaggggagagaaatggaagagtcctctttcatggagttttgctataagg

SEQ ID NO: 48002 - DNA, 1050 bp, Homo sapiens
aatttcctaggaagtttgttaaaaagactgcttttagacatgataacaaacctaccttttctcccttttccccagtctttgggaaagttacagtaactttactgaaatgacccatgtcatacttacttaatgaatttatataaatgtttgtgtttttacatatatttaacaaatgatttattaaaacatttacaattgatgcaattttaaaacatttttaaaatttttatcttccagttggatgaaacaggtttcagatttctctggtagaattgagaattgttacatatattgaataaaatttattacaggatattttccccctttctgcaagcttctgaagaagaaatacgtttttatggagtattggtgtttttgtattttactcagaaaataagttttgacatttacttttagaataaatctaagggatttactttaaacattatttttagggaaaatggtatcatcggaggcaagctgtaaaagaattacatagtacattgatacgtcttttaaatgaattgctgccatgggaaccaaagttaatgaaggctttccaaagaaacaggtaattttaatgttataatctgttttacttattttatggtccttaatttacgatttttggatgatgtcctggaatcatttagtagttttccagtcatttgtaattcggcagatatttttgactgcccactgtgtgcaaggctctttctaagccctgagaaaatattgttgactaaacaaagtctccactctgtgacttacattctcatggaaaaaaacacactcaaatgtcagatggcaaaaaaaagtgctgtgaagaaaaataaagcaaggtaagggggttaagaaatggctgatttgggcagggtgaaggttactctttgatcaggtgtcagggaaagcttccctgatgagttggtgtttgaacagagaccttaaagaaatgaggaagggagctctgtggatttctgaggggaaagcagagggaatagaaggtactaaagccctagagttgatagcatgtttggcgtttagtggaga

SEQ ID NO: 48003 - DNA, 1033 bp, Homo sapiens
gcccagctaactcagtcagtagagcacgagacccttaaataagacttctttttgtagggatccatttagcttttctaaaaggtatttgtgttttaattaaaaaacataatatggccgggcgcagtggctcgtgtctgtaatcccactacttcaggaggccaaggcaggtggatcacttgaggtcagaagttcaagaccagcctggtcaatatggtgaagcctcatctctactgaaaaaacaaaaatttaaaattagttgggcgtggtggcaggcatctgtaattctagctactagggagactgaggcaggagaattgcttgaacccaggaggtggaggttgccatgagccgacatcgtacctctgcactccagcctgggcaacagagcaagaccctgtctccaaaaaaaaaaaaaaaaagaaaagcgtaatatattgatatttaataccttctctaccacagaatttatgtctgtgacaagaattaaacttgtaacaaaaaatgttctgtgcttcatgtgtctgtgatctaacaacatatttgtaaataaaagcatataggaaaaaagcattcatacttttgttgtatatgttttgtactgttcttttaaataaaaatgttatctccacaataataccatctccattttaaaaagcattctttgtatatttttatatgattttaattttttcttcatatgactgccgatacctgttttgtttagatataatattacaagaaaaatctatgtaagtaactgtatggcttgtataaacaagtgactttcacctaagtttaatgtacaaagtatctaaattaaagtgtgcaaaatatatttgttgttatgagacatttaatatagaatttatttatgtccctctttttttcctttttaggtatccaatgtccccagcatcagtagattgccaactccctctccttgccacactccagccagtgttatgctggtgctgtcatacccatcccagattactgtagcagaatgcagttgttctttagttgtgaggtaagt

SEQ ID NO: 48004 - DNA, 1038 bp, Homo sapiens
acggataccgagggacgactgtatattgtaaagggtctaaccaaatgtgtgccactttttcctaagagttatgtcagtggttctcaaactttagatagtataaaaataatgtgatacctttatttaaaatgaagattgttggtttcatcctccaaaagaccttgattcagtgggtaccagtaatctgcatagtggttaaacacaagggttctgcaaccaggctacctacttgggtttgaatgccagctctaccactgattaactctgtggggtaaggtatttaacttctccatgattccagtttctcatttgtacagtggggtaataatagtaccttccttgtagagttgtgaggattgaatgatacagcttactgttttagccatttttattgttttcaaataagcaggtcagtcgcttctggtgaaaaacactgaattatgaataggaaaatcaattaaaaatggcataaaaacatctattattgacccttagcactctttccatttacttaaaaccttgaaataaatcttggatttggtcttaatgaaagtggcacatgattaagcctacaagaatttgaaaagtggaaaaccaagtaatagtatttgcatcattatgtttgatgagagtgaaaacttacgtttatccctgttgtattgttatgatgcattatatatttgtcatgtaggggaaattgttggattttttagtgataattatagaatattggtgatttaagcttttatatcaactttaacatttacttacgactttgttaaattggtaaaattctttttcctttatctgttttgtaatcaaagaaagactattagactgaaaagtgaatatcagttttcctaatagttactttttcctaaaaagtcttttcatttaacatttaagagagaaatctaatgttatatgacttatcttttgtacataattatgacagaaagttacaggaagtatttttaaaaactaatgtgttgagtctcaataacataagttttaaaaataatttaacagccttagtta

SEQ ID NO: 48005 - DNA, 1049 bp, Homo sapiens
attttatatttaatccacacctttacccttcccaacattctgcctgcctttatattgatccatgataccatctgatatcatttttctactgtctaaagagctcttttagcatttcttgtaatataggtctgccaacaatgaattctgaggtttttttttgactgaaaaagtttttatttttccttacatcttgaaggatggagaggggtgtgtgtgtgtgtgtgtgtgtgtgtgtgtgtgtgtgtgtgtgtaatgcatatacatatatgactctgtattgacaggttttttcctatcagcactttaagtatgacgtgttttactatgcatagttttttaaaagaagcctgctgacttccttatctttgttcctataggggtggtctatcttatttctcttaactgcctttaagattttctctttataattagctttcatcaatttgtcatgtgcatttggtgtgagcttatgtgtgtgtgtttgtgtttatcttgcttgaggttcatttcgcttctttgatccatagactttcagtcttctctgtgctcttttcaaggctgctcatattttcttctgcagtgtctaatccagtgaactgtttactgaatataattttttatctctaaaagttacatttagttctgttttttatatatcttcatttctctcattatcttcatgttttaatttctaatctctaacttaatcatctttgtaatttctaagtctttctgttgtttttctcctagttatattcttttgcttcttggcatgtccagtaatttttattggaaattagacattgtgaacattgctttgttgagtctggagttttatttacttcctttgaggaggattaggctttgttctggcaagcagttaaatttcttgtagaacagtttgaaaagtccaggttttaagctgttttagggtgtgtctgagatagccttcactccagttcagccctacaatagcataatgcctctcaggcctctgctaaatgcccctaagtggtggctgaagactttctgcttcagctggtcagaac

SEQ ID NO: 48006 - DNA, 1031 bp, Homo sapiens
aattttttgtattcttagtagaaacggggtttcaccatgttagccaggctggtctagaactcctgacctcaggtgatctgtccacctcagcctcccaaagtgcagggattacaggtgtcagccaccgtgcccagcccatatttcttgtgtaatagagtttcttttttaagatcaaggacccgatcctactttcattatagttaagttgctatcatcttgacctcttcataacctagagttgaggttccttctactcacccacacctttctcttttatataatcttaattaagaaaccctttatcaacatttctagcaattccctacacttttatgtatgaggaattagaaattctgccagatgacttggaattaggcacctggagtttttgaagtatgacagacctagattttaactttgtttaacaactttcttaaactaagaggcagtttcctcatctgaaaaataaggttaatacctagctgataggcttgttgtgagattaaaggagacaatgaatataaagtgcttagtggcacagggttcaataatgtaagctaatattgtccaagagtcatgaaatagagctgatgactaaagaggagtagaggatgtttgcttgggtacgttgggcttcagattcctgggctttgtcgaaagaaaggaggaatgtctagtcagacacacgttttggttgccaggtgctgaagtaagactgatccctgcatttttctttctgtgagctgaggttctgtggactcttcagagtccacagactcttctctgaggggagagaaccctgtaaatgcgttatatattacaaatgtctgatgagaggagacctcgaatactagataaaaggtatgtgtggaggacagtgtgaataccctaacagagcgttcccgcttcactattttacttaagagtgatacttaacttactggacaaaaacagctttgaggttaaaaaaaaattttatcactgctttaaagttcacattaatgagaagtaaacaattgcaagagtcagag

SEQ ID NO: 48007 - DNA, 1047 bp, Homo sapiens
tgtgtaaatgtagatgaagttcttccacactggttatcatggcttccactgcatgaagataaagaggaagctattcagactttgagttttctctgtgacctaattgaaagtaaccacccagttgtaattggtccaaataattccaatcttcccaaaataatcagtataattgcagaaggaaaaattaatgagactattaactatgaggatccttgtgccaaacgcctagctaatgtcgtgcgtcaggtacagacttctgaagatttatggttggaatgtgtatcacaacttgatgatgaacagcaggaagccttacaggagttgctaaattttgcttgaagcactttaatataacttgaatattatctattataaaagtaactacaaataagtgttgtgaatagattttattataaatcagagaactgttttctccctgctaagcagtttatagttcttctccatgtttctccagaattaatcagtgttagtcctctgtttatctcgcatgttttatcttccaaacacagaccttggtgataacctgtgcttcaaactgtcttaaacaatgtttgtcacctttcccctagttgatgtaaagtatataaattgttgctatttgtttgaactattattgatgctagccaagcagtatacttgatgtgaagatgtcatgctatcacaatatgctaagagctcacaaaaataagatagaatttccaggacaaacatctttggaattgtgagtgaaggatatagtggcaggcttgtccctctttaattaatactcttggtatttgtggtgatgggaggatgctgttactaggagagttttgagatactgcagtggatgtgggatgtatatgaacttcttcataatgtactcctgggaactgggtaggacatatccatattgtagttcccaaggtgtctggttgagagttagagaacttttaaatttctttagccagacaggtctctatttttttaagttatccaggactccaagaaccatagttactgaaaagggagtcctgatacatctaa

SEQ ID NO: 48008 - DNA, 1031 bp, Homo sapiens
gccttatctgccattggagaaggatgccatcaacaaatggaatcaattctagatgaaacagttaactccgttttgctttttcttcaggatcctcatccaagggtgagggctgcagcctgtactacacttggacagatggctacagattttgcacctaatttccaaaagaaatttcatgaaacagtgattgcagctctgttacgtaccatggaaaatcaaggtaatcagcgtgtgcaatcacatgcagcttctgctcttattatttttattgaagactgccctaaatcattgctagttctatatgtggatagtatggtgaaaaatctacattccgtcttggtgattaaacttcaagagttgattcggaatggaactaagttggctttggaacaacttgtgacaaccattgcatcagttgcagatacaatagaagaaaaatttgtcccatattatgatatattcatgccctcactaaagcacattgttgagcttgctgttcagaaggaactcaagcttctgagaggaaaaactatcgagtgcattagccatattggtcttgctgttgggaaggaaaaatttatgcaagatgcatcaaatgtgatgcagctgttgttgaagacacaatcagacttaaataatatggaagatgatgaccctcagacctcttacatggtttcagcatgggctagaatgtgtaaaattcttggaaaagattttcaacagtaccttccactggttatcgagcctcttattaagactgcttcagctaaacctgatgttgctctcttagacacacaggatgtggaaaatatgagtgacgatgatggctggcaatttgtaaatcttggagaccagcagagttttggaattaaaacttcaggacttgaagcaaaagcaactgcttgccaaatgttggtttactatgctaaggagttaagggaagggtttgtggaatatacagaacaagttgtgaagctgatggttcctttactgaaattttatttccatgacaatgttcgagtggcagcagc

SEQ ID NO: 48009 - DNA, 1026 bp, Homo sapiens
gtatggtgcggaggcaagcagaggaaatctatgaaaatatcccaggtctgtgtaagactaccttcctcttagatgccgtcagaaatagaagagcaggttatgaggtgagacaaatggctgccgcactgctacgacggcttttgtcctctgggtttgaggaggtttatccaaatctgcctgctgatgttcagagagatgtcaagattgaactgattctggctgttaagttagaaacacatgctagcatgaggaaaaaactttgtgatatttttgcagtgctggccaggaatttgatagatgaggatggcactaaccactggccggaaggtctgaagtttcttattgattcaatctactccaaaaatgtggttctatgggaagttgcacttcacgttttctggcactttcctgggatttttgggacccaagagcggcatgatttggatatcatcaaacggttgttggaccagtgtattcaagatcaagaacatccagcaatcaggacattatccgctagagctgcagctgcatttgtacttgctaatgagaataatattgctcttttcaaagactttgcagacttgcttcctggaatcttacaggctgtgaatgactcatgctaccaggatgatgattcagtgctagaatcccttgttgagattgcagataccgtacctaagtacttgggtccttatttagaagatactctacagttgagtttgaagttatgtggagactctaggcttagtaatctgcagcgccagctggccctcgaagttatagtgaccttgtctgaaactgccactccgatgttgaaaaaacatacaaatattattgcacaggcagttcctcatatattagcaatgatggttgatctacaagatgatgaggactgggtaaatgctgatgaaatggaagaagatgattttgacagcaatgcagttgctgcggagagtgcactagacagactggcttgtgggcttggtggaaaagttgttttaccaatgaccaaggagcatatcatgc

SEQ ID NO: 48010 - DNA, 1052 bp, Homo sapiens
aagttattttatttttaaattttcatttgtttaaagtttaaatttttgtatctttttttagtatttaatttttgccttcagcttcgcagacatacacattttgaatgggactgatacatctattactcatttcccttcccttcctgcacagggtactgggaacatgaaataacagtctacgattgagtcagcattgctcaccggaatgttagtcatggcatatgccctgaaagtggtgccttccaggaccgttgagatgaggatggccagcccctaacagccatctgcatccggggcctgggagagccgaacctgagactgccaggaatggtgtcacattaaaagtgcctcattcttttggggctgatcaggcccttgactcgatatttggtaatactaagaaattatagagtgatgatttgttttcacctcataggtgtgtcttccttaaaccttgttaagatgttgacacattacccatttaaagggggaaagaaaagggaaaaaaaaaggaaaaaactgaagttcattgttctaggtgtgacaattgtgtttgtagttatttatttattttttgagacgggatctcactctgtcacccaggttggagtgcagtggcaccatctcggcttactgcagtctccgcctcacagactccagtgatccttccatgtcagcctgcccagtagctggtactacagatgcatgctatcacaccaggctaattttttgtacttttagtggagacactgttccgccatgctgcccaggctgatcttgaacttctgagctcgaatgctctgcccacatcggccccccaaagtgctaggattacaggcatgagccattgcacccggcctgtagttatatttttaaaaacaatacttatctttgaaggctgcatattgacatttgaactgatgataggatgtttgaagtttgcttcaaaatatatagttcagcatgaaagtggttagtgagaaatataataggaaacaagattgaccgtaaaccaaattgttacagctggctgacacacacgtcgtagttcc

SEQ ID NO: 48011 - DNA, 1025 bp, Homo sapiens
tttagtagagatggggtttcaccatattatccaggctggtctcgaactcctgaccttgtgatccacccacctcggcctcccaaagtgctgggattacaggagtgagccaccacgcccggcacaacatccatttctaattctcagtatgtttggctagggttcttagtaaagggaaagataaattaatttttaaaatctttaaaatttgttttttctttgaactcccgttccaaccttggcaaaggaacttttagctcttctgaactatcaccctcaccctatctctgccatgtcatctacaaattctttttttttttaagtttacattgagtattgctcctgaacttgcacacctgtgatgatacactgatactgaaagggcctgggttatagtcatcacaatactgttgaattccatcaactccagctgttttcaccttgtgggctcttatacctgttattcagttgttctactttttctggtctattgaatttcttgtggattctttgtagaatgaatctgagttttggaagaagttgtctgctcaatttccccattctgcattaagcagcagctccttaatcagcctgagtaaatgccatacactggagggtcttgtttttcttttcttcttttttttcttgaggtggagtctcactctgtggcccaggctgcagtgcagtggtgtgatctcggatcactgcaacctccacctcccaggttcaagtgattctcccacttcagcctcccaagtagtctggattacaggcatgcaccaccacgcccggctaattttttgtatgtttagtagaaatggggtttcaccatgttggccaggctggtctcgaactcctgatctcaggtgatccgcccaccttggcctcccaaagtgttaggattacaggtgtgagccaccacgcccggcatggagggccttgtttttctaggacagtttaagctgtgctcacataaacttggtgtttctgaggctccccgttcactggccagccctgcagctccagac

SEQ ID NO: 48012 - DNA, 1032 bp, Homo sapiens
tatggagatccacaaaccctgagacgaaaggcagttgtctgaaggaatgttcctgggtcgaaggtctctctggccttcagggtgcttcaggggaaatgaagagtggggccaggtcttccgtagttctgagactgtgtggattctagcctttgtagatgaggagattctcccagtgatgctcccactgcccccaacagaggactgacagcttgcagactggttctgctgctgaagatgttgcagcaacctgaactcagccctaagggtgaatggagccgtagccagcaaagggaaaattttagttgcacacttcactggacccagcaacagagaggaagcacagggagagtgctcagaacaggttgcccgggcagccagcgttataggcactggcgtgaggcaaagtcagctagttatagcaatacaacttcgatctcagagctggctgacattcagtattaagtaaaaaggacattctgcaactaaaaccatgagtttcaattttaaacaatcaggactgggcacggtggctcacagtcccagcactttgggaggctgagataggaggatcacgtaaggccaggagtttgagaacagcctgggtgacatagtaagaccccatctacaaaaaaaataataaaattatcaaataaataatcaggatgggatactcttgaaaacaaaattagtgacttggaaaggtacttggaggaaatattccaaaacaaaaacccaaaatatacagattaaggctgtgagggaaaagttaaggaactcagaagacagattcagaagattcagcatttggggatgagaacatggaagagttaattaatattcatctgaggaagtgaaaaaaaattgtataaccaaaatgatggtaaaaaatgaaatgattaaagataaaagctagaatgaatgacctagaagataaaatagtcacaaggattaataaatacaaaaactgattatttgaaagatccagtgaaatcagttaactcttttcttgcctaaggaaaaaatatatatata

SEQ ID NO: 48013 - DNA, 1026 bp, Homo sapiens
ttctgtgtctacaacagggcttacatattggctaatttgtcatgatttactgctggctagagtccagtgaaatctaggggacctatatgcacgtcacattttttgtaagaagaaacacaggtttcttgacaactctgcacagagggagaatttcgaataccatgtcagccactgatgttatactcaaaatagcaggtgcagtcacaggtgtcatcaaggaaccatttcctggtaatttcatttatacctgactaattagagtcagtcaatgtgtctgtagagttctgtagtcacaaaaagttttgaatctgaatgtttcctttccctttcattattgtatgatatttcagatataaccatagcataatttttaggaagtagccttagtagtatttcacaactctaaagtattttttattgtggtaaaatatacataacacaaaatttactgctttacgtatttttaagtgtacagttcagaggcattaagtatattcacactgttgtacagccatcaccattatccgtctgagagctttttgattttctcaaattcaagctcaggacctgttaaacagtaactcttcggttcctctttccctttttccctggcccctggcggcctccattctactttctggctccatgaatttgactactttaggaacctcgtataagtggatcatacaatatttgtccttttgtgtctggcttatttcacttagcataatgtcttcaaggttcatcaatgttgtggcatgtgtcagaatttacttccttttttctttttttcagacagggtctcattcttttgctcaggctggagtgcagtagcaggatcttggctcactgcaaccttggcctcccaggctcaagtgatcttcctgcttcagcctcccgcttagctgggactactggcacgcatcactatgcctggcgatttttaaaagtttttgtagagacaggagtctcactacattgcccaggctggtctggaactcctgacctgaagtgatcctcctgcct

SEQ ID NO: 48014 - DNA, 2695 bp, Homo sapiens
ataggtgtgaaccactgtacctggccttcccatttacttttgtgtttgtttcttgttccacttagtgaagaaagagaacaatctattgctatataagagtttatgccaaccatacctgaagcaactcattgtgtttcatggaaagaaatctgttttgggggcttttcttccctgaaaagttagcaaaacattgtatttttgtgtaagttccctttttggacaactatgtcccacttttaaatgaagacagtaacggtacttaccttataaggttgtggtggaacttaaataaattaacatatgtatagcgcttagaacagtgcctggcacatagcttttctcatcatcgtcattattattaaagttattattgctattgctattataatatgtatatatgcatttttgttttctttcttttcagcctatcacatggaaagaatttgcaaacatccacccctttgtgcctctggatcaagctcaaggatatcagcagcttttccgagagcttgagaaggatttgtgtgaactcacaggttatgaccaggtctgtttccagccaaacaggtaagggcatttcttttcttattgtttcagcaatctattcttgtatagcatacaccacaaaacttaaaggcttagaacaacaacttttttgtgttattctgtgacttgctagacagttccactccactggggagagcatggctagaaggtgcatcgtgttctccctcacatagctggtgaggagctgtgggctgggagtgcatttgaggatgttcactagggccatagtttttctccatatggggctttccttgtagttccttgagcttccttgttccttacagcacaatgtcggggttcagaatgcgtgttcccagatgaagcatggagaagctgcaaatctctaatggccgaacctcctaagttacactgcatcccttccagattagtctatctattaaagcaagtcacgaggcgagcccagattgaatcggggaggggacaacacctgggtgtgaattttggtagatgtcgttcattgcggactgtctttggaagctagcttactacacctgtcagtgacacagcataagaagaaggatcaagcacacatgctgaattccaacaagtgtctcagtttagcagggccaggagaacctggatcctgctttggtaatgtcactaactttgaaaggtcccttctcctcttccagcctcaatttctttgtaaaggaaagactttgaagaagaacagtgattttcaaaagcaacagcctccagcaaaatctcctgagcacttgttaaaaatacaaactccgggccccgctccagacgcactgatcataacctccagggggtgagactaagactctttatttttatttttatttatttatttgtttttttagatggagttttgctcttgttgcccaggctggagtgcaatggcgtgatctcggctcaccgcaacctctgcctcctgcattcaagagattctcctgcctcagcctcccgagtagctgggattacaggcatgtgctaccacacctggctaattttgtatttttagtagagatggggtttctccatgttggtcaggctggtctctaactcctgacctcaggtgatccgcctggctcggcctcccaaagtgttgggattacaggtgtgagccaccacgcctggcctagaatctttatttttaagacaagaccaagtgattctaatacacagtcaatttggaatcccctggatttgtggtctctctgccttcatgatgatagatgacagatggaccgatggacagatgatagatagatagatagatagatacatacatacatacatacatacatacatacatacatagatgaatgatagatgggcaggaatcatgttatcggtatgtgagtttacattttagaatatctttagaaaatgagttatggtatctgcccctaggttcttcacctcctgctgctcaaagtatagttctctaccagcagcctcagagttgacccctctgggagctggttagtaatgcaaaatttctgtttcaagatgccctaccttctgttttgtaacatagactacacagcaaagccatttactttgtaaaaacaatacaccctataaaatacaaaccctttgggaagagggtatgtggcaatgaaaggatacagtgctctcaattgcgtcttaaagtctcacttcataaataggtaggagctgatagcatgaaagtcaagctttagtataccttctttagaacttcattacttatttttgttttgttttaagagacaaacctcagtgaattctgaaccttgagtctatgatagttattaaatgttgaaaattaagaaatttcgccctctagtgacggaatataatcacattttcactgtcatattggagagtgatttttcaagactattttaattctggttattagctcttgcagtaaattgtgatcccagccaggatcccagaagactgacctaagaatcaggaaatttgtcttcttaaagcagtggtttacagccttggctaggaattagatcccatggtgactttataacatccctgatgcccacatcacaatcccagattgaatcataatctcaatggagaatgactggggtgagggaagggacccaggcgtgagtatttctttaaagttccctac

SEQ ID NO: 48015 - DNA, 1047 bp, Homo sapiens
gtccttttgtattatgttttgcctcaggaaggtgccacctcttttcaaatatgagctcttccagtatgataggaaggaaaggtggttggcacaggcttttcctctgttgaacagcaagctgatctttatttatttatttgtttttttggttgttttttttttttttgagatggagtcttgctctgtcacccaggctggcatgcagcggcccaatctcagctcactgcaacctctgccttccagtttccagcgattctcttgcctcagcctcctgagtagctgggattacaggcgcctgccaccatgcccaactaatttttctatttttagtagagacagggtttcaccatgttggtcaggctggtctcgaactcctgatctcatgatctgcccacctcggcctcccaaagtgctgggattacaggcataagccgccatgcctggccacatggtgatctttatatggtggcctcactttctgtagcttaccctccatttgttgaattctctgcttacgttttccctttcggtgcagctgactgctcctgtcttgctgtttctcctcaggttcctccaggtttccgtctgatcataagtccatttagggcctcagttttctgcctctaggttcattttccaggtgaatttgggctgtctgcagtgaaccagttatgttcctgtttctttcttttttttttttttgagacggagtctttctcttgttgcccaggctggagtgcaatggcgtgatgtcggctcactgcaacctccgtcttccgggttcaagcgatactcctgcctcagcctcctgagtagctgggattacaggcacccacgaccatgcctggctaatattttttgtatttttagtagagatggggtttcaccatgctggccaggctggtctcgaactcctgacctcaggtgatccgcccgccttggcctcccaaagtgctgggattacaggcatgagccattgtgcccggccttatgttcctgttgcttaatttcttccagttcatgtatagctgataatttattatttaa

SEQ ID NO: 48016 - DNA, 1044 bp, Homo sapiens
ggcgtgaacccgggaggcacagcttgcagtgagctgagatcgtgccactggactccagcctgagcgacagagtgagactccgtctcaaaaaaaaaaaaaaaaaaaaaaaaaagattctcctgcctcagcctcccaagtagctgggattacacgcctagctcatttttgtatttttagtagagatggagttttgctgtgttggccaggctggtctcgagctcctgacctcaggtgatccaccctccttggccttccaagtgctgggattacagttgtgagccactgtgcctggccagaagcatggtttttgtacagacgtggtggttgatccagagaggcaggagatgaggctgtcagtcagtttctagatggggtagtgatgttgatgtcattgattaacagagggggaacagggagaagtggaagaagagattgggtcttgcttgagcagaattgggtttgaggtattcgtggaacatgcatttggaaaagttgaagcaaaagttgcaaagtagagtctagagatccagagagagaagagatggagttgcagatttagtgagttttccgacaaattcatgagaattagtgaaatttcccagggatggagtgtggggaagaaagaaaagccaggatataaggaaataaaacatgcagaaggagagaggcagggcagtctgagatgaagtcatcagaggcagaaggatatattttcaggcagggagttacggacccctgtgtcgtattctcgacctttcttaggcagaagagggaagaaagtctgcataaagacataaggatcctccgaggtgggaggagttgaggggctgcatttctgacgatctctctgcatgagagacaggaaggctgagactgagtactagggaaaagtgaatttcagaagagctattgtgtgcatctgggtggcgaggacccttgatcggtctgcagggagggtctgctgagagcatctgggtggcgaggaccctcgatcggcctgcagggagggtctgctgagattgaatagcgggaatttgtaaggcc

SEQ ID NO: 48017 - DNA, 1031 bp, Homo sapiens
atgtacctcaagaaaccagaaaactaagaacaaatcaatggaaaatcagcagaagaaaagaaacaataaagatcagagcaaacgtaaatgaaatagagactgataaaaatataaaggatcaattaaataaaaagtttgttcttcacaaagataagcaaaattgataaacctctagctagactaaccaagaaaagaagacccaataaacaactgataccacagaaatgcaaaggatcatcagaggctcttatgaacaactatatgctaacaaactggaaaacctagaggaaattgataaattcctacacaaatacaacctaccaagattgcatgaggaagaaaccgaaaacctgaatagactaaaaacaagcagcaacattgaatcagtaataaaatacctcccaacaaagaaaagctcaggacaagatggattcactgctgaattcagccaaatgtataaaggataactgatctggtttagctgtgtccctggactcaaatctcatctgaattgtagttcccataatccccatgtgtcatggaagggaccaggtggagataattgaatcatggaggcagtttccctgaacctgttctcgtgatagtgagttcgttcttatgagatctgatggtttcataacgggcttcccccttcactgggcactcattgttctccttcctgctacaatgtgaagaagggcatgtttgcttcccctgccaccatgattgtaagtttcctgaagcctccctagccatgcagaactgtgagccaattaaaccttttccctttataaattacatagtctttgttatgtctttattagcagtgtgagaacggactaatacaacaactaatacctatcctcctcaaactattccaaaaagttgaagagaacagaattctccctaactcattctatgaggccaacattaccctgataccaaaactggacaaggatacaacaaaaaaatgaaactacaggccaatatccctgatgaacatagatgcaaaaattctcaacaaaatacta

SEQ ID NO: 48018 - DNA, 1027 bp, Homo sapiens
ctgttacctcttggtatctgttgtatcagccttaattggggcagttgcactggacctaccagcgctaacattctaccctgtcacattctgtagtaacctctaagaggacccccaacctcaagtggcttagaggggtcacaaaaataagaagaagctccatgtaagagaacatagagcagtgaggcctgtggcatggccttcccaaaatcttcaaatattcaaatgttcattattttaagttactgtgctggaaaaccaaaacatatctgtagtctcattcacctccaccctcaagagccagaccacgtttcattcagtttgcatactgcagcatctttgtcacatatttgataggatgcaaagattttgtttgtttccttgcctcttggtgaagttatatcttcctttattctgctccaagcattcaggagaacattttcaatgctaggaaaattcacaccggattgcacgttgtcttcttttctcaaatggtcgcagcttatttctttcctgctcttcctcttgatcagaatagctcctttaaaattatgcagtatcctttaaaacactttctatagtttctaatttagggcttagggctccatagtgagtttagagaaaataaggcaaatcataaatagcacctggggcaccataaaaaactcttagttatgtcaatttttatgaaccagaaatctttcatcactccaacctactttttattgttatatgattcttattattttgccatgtgatattttttcatagccctgctttaattatttatttttgattataagttatgtaatgggttacaaattacggaaatatgatagctcgacctgttagtaagccgttaattcactctccaccaatataactttaaaccatgggcaataatatagtcatgcaccacttgatgacagggatacctttggagaaatgtgttcttgggtgattttgtcactgtgtaaacatcgtggagtatagcaaacctagatagtatagtctattatacacttaagct

SEQ ID NO: 48019 - DNA, 1079 bp, Homo sapiens
aactaattacctaccttaattttagacagaactattctgtttggtttgtagctggttaaacttgcatgcaaatccctagtatttctatatttactatccatatgcctttgtgacccctgctcttcacaccaaagaaacattttaagaattcctttgagtcattcatttgtttgaaaacatccattctgttcatacctagtgccagttagtgaacacagtgtctttttggtttttgggttgcaagatgggaaagtagctacaggcttcaaatgtaaaaatataatctctaggaagagaaggacaggaaacttgataatcctatcacccataagtgaaagagactaaggcatgtaaaacttgattggttgcaactttctacccaccctctgataagtcttctgcacacttgaattttaggatatagcacacaaccatgcagcgttctccaaataaaataccttggaagacgtaattaacttagttcagaacaagtcattattattcttggatatccacacttatattacctccgcagagctcttatgtcatatttagaacttcattcattttttcttgagctattttcaaccctagcttaaggaagtctatatttgattcagatacttggaccatctggtttctattatcagctttaataaaatcaattccagctcatattatgactgtactatatctatacagattgtatagatataatatctatgtacccttaagtatggcctaggtcataatccttggaacctcgtgaacattgcaaaaaccgacgttcataaccccagaaatctttgttaccgaggttcagtcattattagttgaccaagtgaacgcaagcaatttctgttatttccagcataattttcttccagaaaatttcctaatttacattttccaaatttgcaaatatacgtttgaaattgaacgtagccactgtgagacttcagcagtattcactgcaatctacaaaacattataacaggttgtgtaggcacagttcaggaatcagaggaatgtgtcaagtttctcattcaaacggaagcatgactttgttgatttctgag

SEQ ID NO: 48020 - DNA, 1030 bp, Homo sapiens
tcctttcataccagccacataaaaacatcctgagcttcccaaatgtactgcccttatttatgtctgttggaaattgctttcatatttgtttatattgtccttcttgattctttctgtcaaacctctacctatccttcacgattcaacttaggtgctaccacctgtctttgacttcgttcagtaaagttagttatcttctcgttgagtctatattatgtaatagctgcattaacacgcagcatgttatattacaattatttgttatcttttaagcactaatttagtgaaaatcttcaagcacagcaacccttatgtgcttcgagacaccaattatctcaatatctgccactcagtaaccacgatattcaacctttgtcatgtgaataaagaaaagacatcaggaagcctgcttattattttggtgagacactttaaagaactgtagaatcaggacagtcagtatctcaagtgtgaatgcctttggtgtcgactgtaatcaaaatgaaagatgtagaatccttggaatttctactctgcaagtaaagagctgtgcacgttcccagagctattcaagtccttgtatgtcagtggcaagcagttactcacttaggagtcaactctaactccctataggccatatgcactattgttcattatcactgacacaccaggtgcttagattggttttaaagtttagtcagctaaagcggaaaggatattttacatgatcaagtcaggtttgtgtgagtgggttgaatttgggggtgtactttgagtctgagtagttgtttgaagagtgaaactttaagaagagctagaaggagggcattgagtttagctgaaagggtttagtatcaagacaaatctgtctgattaagtgtattgtcaatatgtcttatttttaatttttccacatagttcttttaaaatttaaatttccatgttaaagtcaccatattttgatactttttgaccccgtacattttatttcaaagttattttaataaatatatgcgattacaaggctgga

SEQ ID NO: 48021 - DNA, 1058 bp, Homo sapiens
ggcacagtctccgctcactgcaacctccacttcctgggctcaagtcatcctctcacctcagcctccctagtagctggaactacaggcacgcgccaccatgcttagctaatcttttttttttttttttcttgagatggagtctcactctgtcaccgaggctggagtgcagtggcaccatgttggctcactgcaaactccatctcctgggttcaagcaattctcctgccttagcctcccaagtagctgggattacaggtgcccaccaccacacctggctgtcatatatatatatatatatatatatatatatatatatatatatatatatatatatatatatattttttttttttttttttttagtagagaccgagtttctccatgttggccaggctggtctcgaactcctgacttcaggggatccacctgcctcagcctcccaaagtgctggaattataggcgttagccaccacacccggccttcttggctaatttttatatttttttgtagagatggttttaccatcttgcccaggctggtctcgaactcctgagctcaagtgatctgccagccttggcttcccaaagtgctgggattatagtcgtgagccaccacacccagctgtacctgacccatttcaagtaaccttgacttggttgggagccccatcccctcctgcctacgtagatgtgtttcttgttaattcagaaactccaagccagcctctatcatgaagtgaagaattaaagagaaaggtcctgtgattggatggagataccattttagaaccaattctttaacctaaaatttagtatattcttttttcttcagtttgctttagcttcacttatttcttcactaaactgtgtgtgtgtgtgtgtgtgtgtgtgtgtgtgtgtgtgtctgtctgtctgtctgtctgctatgtggaaagctctgtgtgaagtggtgggaatataaaaattttaaacagtgtgggcctacaccagcctgtaatctatcttcagaattcatagctagtgtttaggatgctctcaagcaatcttctcagactttg

SEQ ID NO: 48022 - DNA, 1037 bp, Homo sapiens
atgtttgtcctcctttgaaaaagaagaccatatggggatgggaatggaaagaaaccactctagtttgccatgttaatttaatgtgtccaactcactctcttttgaaatgattaactccaaaaagcctgagagtcagggttataatctgctgtatagaatgtcatagcaaagtactgggtgtgatgttgcattaaggaggagggctcttataagccttggttcaaacctaggttggaaaattgtgataatatccctcagcagaaaattatagtctttgccattgccagtttaaaatgccttgtatatccactattatttgaaaaagctagacgtgtgtttgtatctgatttctgttcattccggtgtcttgaatggcccagatgattttgcttgttgtttcttgaatgcatgtctggacagtagagctgtgatctcagggaagggcatatgcgacttctgttcgagcagcatgagtaagctcttcttcagggctggccaaccagttttgtggtttaggtagtgctccgagaaccattcggctgtaagatgcatgcagattaaagattcatatagattatagtaatgtaatcctcaggtgaatgtttttcttctggatgagttttcataatagcttctgttagttgtatttcatacataaatttcgtttgctatttaccagtctttaaaaaagaaaaactaaatgcagaccaagaacctactgttagcatcttctttgtcagaccagtttcactctaacgaaatcacttgtagcatactgttacattctagacctgagtttacactgtggtcattataattaaacctgaatgtttacctgatctcagaaatagaacattttttttaaattgtagagacacactcttcataatttaattcctcagatggtttagttcatccatttacttgttgctttttgtcatttttccacttcagattgtgaatacttcttcattctccttccttattgttaaagagccttgctgtagtcactatatactcgcaatatttctttcttt

SEQ ID NO: 48023 - DNA, 1059 bp, Homo sapiens
gcctcctgagtagatgggattacaggcacgcaccactatacccggttaattttcgtattttagtagagatggggtttcaccatgttggccaggctagtcttgaactcctgaccttgtgatccacccaccttggccttcctaagtgctgggattgtaggagtgagccaccatgcctggctcaaataacccattctttagagtgtcccataatggtccgtatttttagtgtcagatccatgatccctaaaatcttaatgcctaaattccagatgttttaaatctctaaactgtcagggtgttactgggaacataaggtaaatgccttgaaaccaaacaataatgtgtttttaatgaagaggcctttctgtattgctgaaatctgaatcaagagttttcctctcttgcaatagccttttcataccaccctttgtaatgaaacatatggctcacatcacagtaaaatatgtagagtaggaagaagaaaaagcatgtttcacatacgtgtcatatctgatgtaatgccatatgtacaacaaccatagaggactgagacttaactgcagtcctggaataattagagtgagagtgtccttaatttattttaaatactgcaaatggtttcacattttgaagtaattaacactcccttcacttataatatttgcatttcattattaagaaacaatccctcaataatttttaatgaactcttgaaactgatatttaaaaagcattaattttctgaaaataaattatcaagagaatagttcagtcttgtcttgaatttaccatatttagtaagctaatgagagagaatttttaaaaaggaaatacattttgtggctttttatgaagtgtgtatgactagctgtctttgtgctcatggtctcattttgatgtgggacatttttatttgatataagagaggggtaacttatgatcattctcttctagaaaacgaaaaacttttctcaaaaatagcaaaattccaaaagaagattgtgaccttttttttttttgttttagggaacatcactttctcttaggtgtgctatttct

SEQ ID NO: 48024 - DNA, 1066 bp, Homo sapiens
aacttggcaattaagaattggggcagttcatctctaattatcccttcatctatatgtttttaaacatgcagatatagataaacatgtatattcctaaacatctattggcctatagcattttctgctgtggctaccaacagtatgcatagattatttggaaaggcttaacttcatacgtttttgttagaaacctaaacctgcctttgtggtcatcatagtttatcatttggcacttaatttcttcagaagtgttttcttatcgaagttaaaagaactttgctccatagtgtaactatacaaggtaaaaagtgccttttctttttttttgaacatgcgacttggtgcatacttttatgcattttgtttgagcttatttttcaaaatgagagtatattaacaaataatcttctcctctagatcttatatgttacatagtgaacagtagcatagattgctttagataactttgactttagaattttacgcgtttccacttcataaataagactttgtaataattttctaactctaaaatttttggactgtcttaaaaggacattgcaatctattcttacgtgggctatgatgaaaatattactgagatagtgataaatgatatattgattgctgttactccgtctccacaacccaaaagttttcatctatcagtccagtgactgtggtattggtggtggtatccaatgtgtgaaattaattctccatcatactttcttttgtgtaattcctaagtaggctatttaattttttcattggctgggtgtggtggctcacacctgtaatcccaccactttgggaggctgaggtgggcgaattgcctgaggtcaggagttcgagatcagcatggccaaccgtggtgaaacgctgtctctactaaaaaatagaaaaaaattatctgggagtagtagtggtgcctgtgatcccagctacttgggaggctgaggcaggagaattgtttgaacctgggaggcggaggttgcagtgagccgagatcatgccattgcactccagcctgggtgacagagtgagactcatctcaaaaaaaatt

SEQ ID NO: 48025 - DNA, 1049 bp, Homo sapiens
tgttgttcacctctcacaccattcccctttaactaaagaaacctctattccagtggtatggtggcatccttgactcatgtgtgcttctaaatcctaaatcggttagacatgtgaacaggatgttgatgaaagaaaaagacaaaacacgatgatacttttgagtttaaagtggtgtcaatgatgaagagcagggggaaatcaattggggactttcatgaccttgtgcaaaatgcatagcattttcattttgtagagcatacatgtccccaagcagtgtttgaaatttaggtttctaatttatgtagaacttaacatacaagagtgagtacactagactgaattagtgcattcagtggaatacagattctctttagacccattttgccttgtctcgccatacataccactgttgcccaccttcattgtatattttattaaaggttcatctctaagttgaaatggaaggactgtggatatgaaacaaatttcaggaaaggagcagaccacactcgttggaactgttagtaagatcaagttctgaataaccatgaaagacgttttgtgttttatttcataaacttatatctaaaagggtgatgattaagatatgaggtgagctctaaccaaatccatattagagaaagcaaaatccttaaaaaaaaaaaaaaagctattcaaagttctttaaccattcacaaataaaattacccacacagaaaactagtgaaactttctaaataatagtttaattctctcctcatgtgtagttgctttgtttgtttgattatagtgattatagtgttcattagtattgattgggtaggtaggtgcagtggtttgtatctccaaataagctggagtctgtgaaaactcccagcttctattttcatctttttaaagccttacttctaactttgttgttgttgttgttgagatggagtctcgctctgtcacccaggctggagtgcagtggtgcgatctcggctcactgcaacctctgcctcccgggttcaagcgattctcctgcctcagcctcacaagtagctggg

SEQ ID NO: 48026 - DNA, 1028 bp, Homo sapiens
cagctggcatatttgatggcttgtatttcctattgttagaaatttgcctcactgatttcacagggccttgtaaagtcttgaatatcgccagagctagccaggagaggagtatgtcaggttgcaaccaagagctaatatttaaatactgtattcaaatgacatgtacgatttggcgactttttttctttataggacactgactgaaggaaagctttgccatcaaaggagataacctcttgacaactggccttgcaaactttttcaaaagtataagtggtgttaactgttaggaccaggtctcagaggaacacagaattgtgtgtttttttttgtttttgtttttttttcctgcaaggattttagagacctcattttattcactcactcacttgtgttcccatttatacatccattctttaaagcaccagacattaaactatgctaaatgcaaagtactgtgggaatataaggctgagtaaagcactattatacttgtcagtgcaagtataatttgcactgacaaattttagagatctggatttttaagattttagaaaacttgtgccggtaatgtccatttttaattggagagctttatgttgtcatgtggaaaaaagctactcaaattccaccatgatagtagagcttactggtttcattaaataataacaccaactaccaaagtaggagatgggggttagagccttagctgcctagccacacttcactttgctccacagttaattgagctcatgtaatttcctgtgacctagcatatagaatagctcttagcttgggatttggctattattggaccatctttttgtattatttatacccatcttccttgaaaaaggatttgtggcagctattaaatcatatgcttcattatccttaataaatcaccttggtagagcagacaatggattattgtacagatggttagtttctatgagaaattttttaaaatatgcataatcttggcctcattttgagtgatattttatttcaaggcttttaaaaatgat

SEQ ID NO: 48027 - DNA, 1024 bp, Homo sapiens
tggtatatttgtactcatcaagctaatcgtaaaataaaatattggccgggcacggtggctcacccttgtaatctcagaactctgggaggctgaggcaggaggattgcttgagcccaggagttcgagaccagcctgggcaacacggcaaaaccccgtctctacaaaaaatagaaaaattagctgggcatggtgacatatgcctatcgtcccagctacttgggggcctgaggcaggaaggttgctcgagcacaggcagtcaaggctgcggtgagcaaagattgcactcctgcactccagcctggtttgacagagtgacaccctgtctctcctgcctcacttcaaaaagaaatatgttttttctaaaagattgacacagttcatttttcatctgtgtaattgattatgatcccctttggtgattgccattcgaaccaataaattctatttcgatgttgacagcaaagtttcagcaacacaaggagactgtcggtcatttctttctaggacttatgttgaattcgagtacatatatatgagtctctttgtatactgaatatagatctccacagatcccataatattgaacccttgtaaatcatacctctgtagattatgaaaatattgtttatgcatgtactgtagaaggatcctcaaatcatgtattgcacaagagagagtgatcaccataatgaatgactatctcaaaatgtaggctattcttatgtatacataatctaaaatggaattgaaagaatttaagcagcatgggactgaattcaaggtcaaacgaaaaatttacttatgggacttatattaggaaatcaacagcattttataaacaatgactatttggtttgggattatctaaattgttttatgtataccttggattttctaagtaattaatcgtcttcaaaataaaatcaaacatcttgcttagggtatttcttaattttttataaattaactagctatctaccttcctcttattcataaaattaaaaaatataattgaaacagattt

SEQ ID NO: 48028 - DNA, 1022 bp, Homo sapiens
tgtgttccaagtaaatagtttgtttctattcaggtatctgtcccattctgaatttgaggttagttgtttgccatgtgactccagttttttgatggattcaaggaatattattaaacgtgctttgacccacttttttctggttatgaaggtataagttatgatacatatatatacaatttatgtggctttttattttttgtaggtatttcagtacagtgttaattacggtgatactaaacatctttatattcttttctcatttcaaggagtaagctttaaatatttcttcataagctggaaagccttttcctatttattttctagaagagtttgtgtaaattggtgttagttatcccttccttaaataattagtggaactcaatgatacagttttctgtgtctagattttttttagtgtgtgtaaatatttattattaagtgtataattaagttaataaatacaaaactattttcattgtagttcttttgaatggattttgtggtgttttctagaaagactgtcatttcatttaaaattcatttcatttgaaaataatttttcataatatcctacaactttctgattaatacctaaaaaatgtataatggtgatacttttttctttttttctttcctgatattaatttctgcctttctctttcttatcatatttgccactggtttattaatttcattctttttttaaaaaacaactttgggctttgttgatacttattttacatttgtattatagtttattgttatttttatacttatttccatagttttgtgggaaacaggtggtatttggttacatgagtacaatttagtatgttttgctattttctttgttatttaatattttctaatacctttagtttttgagatcaatacactcctcaatatattagttttcagccattcattttcacaaatttgtttatggatgtaaattttcctctaaacacttgatttgtagcattgtataggtattgatataacattttttcattatctttcaa

SEQ ID NO: 48029 - DNA, 1067 bp, Homo sapiens
tgagcaagaagcaaaatcgaaaacccctgataaactcatcaggtctggtgagacttactatcacaagaatagcacaggaaagactggcccccatgattcaattacctccccctggtaacctcccaccacacatgggaattctgagagatacaattcaagttgagatttgggtggggacacagccaaaccatataagcatcttataaaatgaattaattggctttgattttgggtattgcaacttaaataactgctcttttgaacttaaaatgcatttattcatttatccaatcattctacataatttgcctacctacaaactttctgcttttatagatactggaacaaataaaggtgaataagacaccacctctgctaaaaggcacacatagctttgataattcattgtatatatgactagaaaaaggtgacgctagagtacattcaaatgagggaatgtttcataccaaaggctgcatttaagttgtctcttaatgaattagtagtagtctattaaattcagaatatgctgaggaaaaatcttgaggcatagaaaatgccatgaacaaagagagagaggaaaaaaatgtttataactctggtctatttcagaaaacttgtggtggaagaatggttttcgcatttgtcgttgcagcagtgggttaaaagttgcaagatatctgtttttttcttcaaaatcaactggcaaacagcagaagacgttttatctttcatgcatgaatgcagcaaggggtgcttagaagcgaagcatcctgctagttcctcttcctgagaatcatcagctgccaggttctccagcactgtgttcccaggttgttgttttttcctccgatatggcactgacgggaactaattccttcctgccagtacaatgcagtttcttaagggaaaacatttcgtctttttcaagtgaaagtagaaaaagaaagtctggaaatgaacatgagaggaaacatcgtagcgcttccctggtagtttgccttgcacaggactgtagatggaaactagaggcaaacaaaaagggcaatttgagaggggtgattggg

SEQ ID NO: 48030 - DNA, 1027 bp, Homo sapiens
ctatagccactaaaggtattcccacacaaacagcagcaaatcaacaagctatcttgattaattactgtgtatcgattaagaggatcagagcaactgggaatacagaaacctgaaattccgcaacatttctggatttccatgtaattgacatattactaattgggttgagacaaacaaaaaatattggcaagagtaattgaaatatcttcttttttaatgaaatgctatcatatagtagacaagaatctgtggcaggtggagatcaataggaaacatgaaaatgaactccaggagttttacttatacatctatttttaaaaaattagaagttgaccaaaattaacatagtctatttttattgtgatgtgctattattccttgttgatattgaggagagatgcaagcatgtgtctgaaatgtacgtaattaatttcctttgaaaaattgcaagaaaagcaaaaaaaaagagcagaagacatatacctttaatcttagtcaccatggtagcctgaacatccttttgggatagatatgacaagaaaaagcctatagcttaagaataagagttatggctttggatccatttcaaggggtggcttaaattacctatctactcttccagtcatcataaatcatacatctggtgtggcgttgctgaatgtatgattttagggatgcttcatatgacttttaggagagagccaggattggaaaaagataaaataaacaaaataatataaattcctcattaggcaattctgcaactgtgttttagggttttttgtttgcttttgttatttttgtcacttctttatgggattactggactaaaattaacttcaattgtgaagtccatatgcagtcagctctctgttcttgtttgcagaaattattaagaggaagtcaatttttctggtgacttaaaagttactcagatgattcattcatttgttaaaatatttattatctgctattgcattgggcactcggttgagattagagatactagtggttaaggaaggccaca

SEQ ID NO: 48031 - DNA, 1031 bp, Homo sapiens
atttaggaatagcaaaaatgaagttttctctgcaagtaatgtaatttattccattatttattcactatctactgatctactgaacacccaaaatgtgatagacattatgccttttttcactgtacacctttaaaaaaatcaacccttcaaattacttattaaaaattttaattcaatgtaatttattgaaaactgcataactctaaggagggtgggaaaaattcaccttaaaaattagggatattgtattatttggacatactaggtagggtctatgagatttgcatgacctgagatgatatttggcatcagaaaaaaatgcatggctctaaaaataaaattaatatttaataatgaacaccaataaatgtttaattagatgattattaaacagtattatagtaactagccaacaagaattcaacttatttagttcagaaataaaactaaaatcacaaggataaaattggtaaattatttttaaaagcaaacattattttaaaagaccattttaacatgtaatgtaaggacttcagaaataaatacccagagcctacttaaaatttaaaatggtaaatatattcttaccaattatgttttaacagaatgttagatatcatgtactttgttaaccaaaacagactatatttcatatgatgattagaggaagaaggcaaatatacatggagcagagatcaacatataatatgagtatttctacgatgaatggtagttagaaaaataataaaaatttacaaaccagtgacttaccaaactaagaaacatatctgaagagggtggacggctggttggtaaagagatagtttttaaacacactttagactacctcattcatcgcttattttaccataatgtgacacttcccaagtagacatcaatgactatggaagtaaaagcaacacaagttgaatgaggaacgtaagaggaaaacctgaaagtgtttttactaagactgtacacctaagtaatcaataagaggaatttatcaaagctctctcttgtccaacata

SEQ ID NO: 48032 - DNA, 1051 bp, Homo sapiens
ttgagaaacaatgacctacacttacccattgagagcttttctccaatcacaggaaatggttcagaaatgaatatatgaggattaagagggcatttgctgggggcactagaagaggcagtgtctcttcctctgaatgttgctgtgtttgaatgtgaggctcagaactgatggtatcattttttttttctcaccagccaaaggactaagcaaaccctttgagaagagtagggccaagagaatttcagagaagtggagactgagctctaattgaatcacagctaaccagtgccctacctctggattttaatcagttatgttaatcttaacaagccactcaatactgtttaagtggtttgagttggctcttctttttcttttggttgaatccatcaaagctgatactttacagagggaaatactacaaacattctagatacccaccaagagaaacggttatataattgcaactacaatggcatagtaagaaggagataagggtgacactgtagaagaaactataatgtcatagaattatattcatactatttttgtgtaaaaagtaatttaaaaaacaatatatgtactataatctatttttactcacaatatatatttatacttaaaaattatgcgaagactggaaaagcagtagtacagtgtctggaatatagtaaatatgcagtacatttttgctattatttttatttaacaaaattttagcagttgtatttaggtgacgggataacaaataacattttcttatcttggcttagctttattttctcgattaaactcacttcgttttttaacaaaaagaaaaaacatctctttcaaaatgatgaaatcttaatgcactattgtatcttcatcattaatttttaaaggatcaatagatcattatgattacctcataaagaattcttttttccccagctttatggagatttaattgacaaataaaatggcatatatttaggtgtatatatttgatatatgtatacattgtgaaacgattactataatgaagttaattaacatattcctcatcttg

SEQ ID NO: 48033 - DNA, 1030 bp, Homo sapiens
cctgatataatgaagacagtgtagtaaatggtatcccagtcagttggacaccctataaaaagacatgatttggattttggatctcagatgactggggttgatatgttattcttctactaattaactcttggatttttgtcagttggatatgttacttaacattttctctataccaattttctaatccaaaaagtggtatacattatgtacatgacaaggcaatgcagttgggaaaactgaataagataacatatgcatgtagcataaagcttcactagacagtgcttaataaaatttagttatctcctctacttttaaattgacataaataggtcaaagggtacaaagttgcagctctgttggataaatagttctaggaatctaatgcacagcatgaggactatagttaataatattgtattgcattctgaaaatttactgagagtaggttttaggtgctactaccccaaaaagagaatgtaaaagttaactatgtgagataatatatatgttaattcatctgactgtagtaaccagtaaccatttccctatgtatatcaaaacattatgctgtgtaaataaatacatagaatatatatcataaaatggcttttttttttttttttttgagacggagtctcgctctgtcgcccaggctggagtgcagtggcacgatctcagctcactgcaagctccgcctcccaggttcacgccattctcctgcctcagcctcccaagtagctggggctacagacgcctgccacctggctaatttttgtatttttagtagagatgaggtttcaccatgttagccacagtggtctcgatctcctgacctcgtgatccatccacctcggcctcccaaagtgctgggattacaggcgtgagccaccacacccggcctaattttttaaaatgtcttccacattcaaggatgttgaaatataatgtaattaagtaggttaattaaactgacaatttgttttcagtaatgatctggttgttctcttgttcaaaatgattatttata

SEQ ID NO: 48034 - DNA, 1039 bp, Homo sapiens
tgtgtaggccagggttttctcataaagatgaagtttctaggtagcaggcttcagagagaatagattgtaaatgtttcttgtcagacctaatctgttctatcagtaattccaaaagggaggagggtataataaggcatgtctggctaccccttcttatcatggcctgaactcattattcaggttaactttggaatgcccttggctgagaggaggagtccattcagatggttggggggccttagaatttctatttttggtgtacagtagttaattttttctaaagcttttcctttctgtacattacagttattcatatagcaaagttatcaatgttttatccttcactttgcctgtcttgctcttgcatttaatgtaaatcatagctgataaatgtcatataaggaaggaactctagatttctctgaaatgtagtgtgaagggcatgggccttcagagctcagggccctgagttcgtaacctggctgggctcctgattagcaggcaactgacttctctgagcctctgcctgctttgttggtaaaatggaaataataacatttttcctcacagcactcttagtatcaaatgagatgaggtggttgcatatgatagcacctgataaatgctagaaatattgttaccactgcgaaagtcagtgtaacttcagagctgtggtgatacatatagtggaattgtggggggccatctgaaagagtgttctaacactactatgaatttgtatcccgactttcaaaataaacttgtaaagtgccttcctactttcttattctagagatttcctcataatttctgccagaaagggaagctaaaaacaaaaaggattctaggagaattgagagctgcaaggtctcattgattggtgaagtgaatgtgccactccttaacattttaaataagagatgttttggatgggagatatttaaacctagtgagaggttttatcaatcaaaaccccagcacttgtataataagccaagtatctagttttcaagataatgggaaattgcaaaatatccat

SEQ ID NO: 48035 - DNA, 1087 bp, Homo sapiens
gaggaattatcatgtgttcattcccattttagagcgtgaaactcctacattagaatatataaagtcactttaaatatctatatttgtaacagaagtagtgtacagatattttattacagcatttttgtgtaaatgcagaattaaagtgaataaataagaattttcagtggtgcacaaataagcagcaagcattttttttgttctttttactgtggaaaagctttgttatatactgttcaagatttacaacttaaaattggtttttatcatgtctaactgcacatatggtgtccatagttacagctaaaggaactttggacaacatcattatggaaagcttaatattttttacctccacaattttttctagcactaaagattcatagactcctcatagatgagaggaagatgacattgtagaaagagaagtatcctgcctgtatatgtttttctcaaatgctgttaatgcagtaatattgtaagttgctcttttgtgtggtcaagaactattcaagtgtattcagatggacaaaatcataatcaaaattatttgtattaataaacatgacaagtccaacttgaacactgagcaaggaatgaggggaactctgttctactagttttgtaccaaattagctaacaaacgtgcatttccctctcattcatcttatctgtaaaatgatagattattttatcacaaaggttctatttagttctaaaatataagaattccgtgattcttagttacacaaaacgaatagaagaaactgcatattgtaacaactcaaagttgttaaccaatcattgtaaatttaggcgctcaatgtaacaaaactcattttagtatcccagtgacacatctaccttcttagccatcatttagtggctctccataacgaaagatgccattatttcatggtaggctgctggaagatgaactaacctcacatctgagtttgagctagcaaagaatttttatagaggatgctccataccagactgtatgggagaaagccacccaaccccttcaagtttcataatgtctaagtgcccccaacaagaacagcccagtttaaatagtgtcttc

SEQ ID NO: 48036 - DNA, 1927 bp, Homo sapiens
tgtctactgatgatggaaacccattttcatcagtctgtccttaaagaccccatactaactttctaaattactaccatgagtttcctattagctggccctaattctacagtttttgtttaagtcctagtcttcctacaacatcagtttaaatttaaagaagattagtttgaatgagattatgactatccactaaaattttaggtagattggaatcaatttcatctacccttttagcttcaatttatttatgtcactagacacattctctgtttaaaagaaaaaaaatcagtaggaactgtgtttaaattgctcatcaaattatcaaatgccactgttgcttaacaggtatctgtctctagattaaattctgaaataagtggtatttagggagtatgttacttgcaaaaccttctgaaataattgttgtatatttgtaggtgagtgaaggcagcctgtcatctttcacttttccactctctggatccagtacatctgagtcactggaaagtagctcaaagaagaatgcatgtaagattggttcagtattttaaacatggtttgaatttggctgtcaacactgatttttttgtcttgtttacctctgagctttcttttcccccaaatcatcccatatccaaatataggtacaaaaacacgtgttagcaaaaagtctgaacaacatgaagttctgcctatggcagcttttcccatttgatgtttaccctacaagatacactaaacattataatcaggattctgtaatttttttttcttactaagcagattggtgtttttgattttattccttttctgtgtttaatgtaacaccagtaaatcagaagatgccattaagtgaagccttctttttccatgaagattgcaaaaatttgagaaaattaatgtgatcctcctgtgttttaattacgtgaaatcatgctgcagagggatttttggcttggtgcattggttgagagttgttcaaattgaagaaactaacaatatggcaatctctgtttgcagtatgactaatattctagaaatttaggcacttaaatttgtgaatttttttaatgcatccatgactttattcctctcagccgtgcacatgtgcctttctatgcaaaacacattctgcccttgactcattcaaagtggattacatagttatataatcaacacttaaaatgagaaggaagaatgggatggtatacacgtttttccaactggaaaaataaatagttctgtgtaagacagatctaatcatgtgtactagcagctttgagcacccccttaaaaaaagaaacctaggttatcatttagtcccatccagctttagatattttaacgaacataaaaagtgaatgaacataaaataaccctattttatcttttttgcctttacagtggcatctgaaatacagggattaagaacagtcgaaatgaaaaaggtaacttggggagagaaaacaatataaaccctggcgttttaagagacatcttcatatgtgttttcttgttaactttcttacggttttaaagtattcatctcaaaaagtatgtattcttacatattacatgtgaaataacataatgtagtccttaatgaatttcctgatcacagcacctcatttgaaaaatcgttgtttgcatgctctgttttgctgaaaatagcataaaattgaccccacacaaaataataccatgcctctcacttcttataagtaaacctttctcttcaacagatacttattagttctgaaacagattcccttgacagccatgcacaagagacaaagtaaaagcagctgtgatttattgagcttttactattgttctgagcactcttatagacacttcatgtcatcatcatgtcatttaatattcactgcagccctctgtgagaggcactgttgtctccattttgtaa

SEQ ID NO: 48037 - DNA, 1028 bp, Homo sapiens
acattgttataattgttctattttattatcctcttatgtctaatttataaattaaaccttattttatgtttataaattaaaccttatatataggaaaaaacatagtatatatagagttcagcactatccatagtgtcaggcatccactggcggggggtcttagaacatattcccccctataataaagggggactactgtaattagtggggaatataagacagaggattgtatttaccgcatagatgcaactatgtaaaatacaatcttataagttttttaaacaataattatgaggtaattgttggacttatgggtccttttcttcccccatcttttttcattttatttccaaaattttctttttactgggcgtaaatcacttttgtattggaaaaattaacacttttttaaataatcaaaacccttgatatttgaaagagaagtgttacaggtaggtgaaagggtcgcaacattacacagtgaataacgtatggacttgttaaccttacagttatgtaaactgaaaatataaatagtttcaagaagagtttggtaagaaaccccaaaccaaacaaataaaaaaaccaacttatggatattacaagtcaagttttgacctttcagagtatgattcatgatcaacatcttcagaataacacatccctttgtactctcatcactgaataataatatcagtgcccaatatttatattaatcttactccattctagacactgtcataagcattgttcatggtttatttatctcaacaacctataatgatgtacatttttaaaattcagagtaaaagatttattaaggttaaacatccattacagtcacacagctaataaatcacatagtctggatttaatccagtgactccaaaacaggatctcaaacaccttcttgtgctacttcatattagactgtgcggcatttcttgcatgcctatggtttatttgtaaaggggtgcaagaaagattgtcttcagttcatgttttgtgttgatagcagtatttatcta

SEQ ID NO: 48038 - DNA, 1048 bp, Homo sapiens
atggctctgggagtaaaaattaagcaaagaagggagaaagaaacagcttttaacactcatgaatcagctgaaatcttttgtcatttttactatcctatatatttttaaattatagttatttgacaaagtaatttaatggtaatgtaacatttgttcattatgttatttacttcttagcaaccctgtgagcttgctattattttctccactttgaactgttcccataactccaaatagtagagctggaattgaactctggtcttctgcctccaagtcccatttcccatccattacctgtttcaacttgctactgggccccatctgcctttctgaaatgcctgtatgttccttctaggaatcctgtacttcagtcaaactgatttgaatcaagagctcatggagaaggttttgagaatttatccctctttgccttggtttatatcacttggtctttctgatttcttttaacttatataaatcctacatacactaaagatccaacttaaatctcacctctgtttattttgaaatattacttcaatattctggcttatatagtgcttactattaatgtcttcattttatttgtcacttaaccatgtttgaccctagagcttgtctcctgtgatgaactttgatgtgggtatcttttctgtacatctaaaacatacacatgctgagagaagaaattctcacttttttttccattactcagtgtcatcaacatagttcagactgtaagtatctgcgaaggaagagtgaatgaacggttatgtgccgtacatgcataaggggaaaaatgttgagatcaggagagtcaggaagagaatgatttttgcattgtctaaaagtgggagctctaataacagctcatttctagttctgttttgactccttagaaactcctgagaagtgaattatctttttttaatcttttatattttttaaaaatgggaaaatagaatataagcagaaagctctcatacatagaatctaaacccacagtagctgactgaaatgcaaattcaattgatcagaaaacattttt

SEQ ID NO: 48039 - DNA, 1035 bp, Homo sapiens
gtttatccaacaaatattttctgagtactctgccttataccagatactgctctttggactggagaataaaacaggtaggatatacaaggttttcagatatctgacttagtgacatgagggatggctgtcttttactgaatagaaaatacagaaagatatttgcaaaaatatggtacattctatttggggcaggttaagaacgaagtgcctgttggatagcctggtaaaaatgtacattgggacatttggtctccagtttagagatgatttcctgtatatgcagatttggcatttcttagccatggaggctgaggtgcttgctacagagagcatttagagagaaagagggccaagggcagaatcatgtggtagcaacagtaaggaggaaggctaaccaagagatcagagactatgaagaaccaggagggcatgtggcagagcagcggagaagagtgtccttcaagggtacactccacagctctacatgctgccatgtagcaagaatccagtgagaagatgagtagaaagagtcccttgggtgtggtaactaggagactgttagtggtttttgagaaagcaaatgatggacaagaagtcaaggagagagagaggcagtggctagagggtgacagagaattgggagagtggttttgttttgatttaggaaagctttggatacatgtgtatgatgaataaaaggagttagtagagaatgaaaagcttaaaattagaggaactttggtgattatcagtgggggtacctgtaggaagagaaacattctttcctaaatgaatatataaacatagagcttatgtatacataagatagatgtacaaatcattgtctcattccggctgctcctaacgttccactaagccacgtggttatttaagataattaggttataaggtaatatattttcttttcatattagttgtactaaatatgtctcttaaggaaatggagtattttaataacgttcattaaagttttcaattcacttgataaataacacagtaaagaataatgaatgg

SEQ ID NO: 48040 - DNA, 1070 bp, Homo sapiens
ttataatttgcattctagacagattatttaaaaaaaattagcttttagatgtagataaaaaattttgtggttttaattttgaacatgtttactggtattcataaaacatgtattaatatataagatgggcaaaatatatgtgcctctgttagtaataccgaagacattgagcaaaaataaaagaaatttgggatcagtttgacaactagtttcctttgtggtttgtggcctgatttagactcaggtatagattcaggtcattagagacaaatctttagttccagactgttttaagatgttgctattaatgactggatctgataggatctagtttcacacaggcagttctttaaatcggtatgtactttgcttttaaaactgagttgttttcaatacatttcctttgcgttcagcgcctcttatgtttccttttagaaatcccctttgccttccttgctgcacaacctttaccctaagtacaacttcagcagcactaacccatttgctgactctctacaaatcaacgccgacaaggttggataatgcccattgtcttgctgttggttgccttttgcaaatgttttgttctttgttactactgtgtctttgtcccagttcactatttgctacatttgggcagggaaaaaaaaacaaaaaaacaaagctgtttggagtgggcatgcagatcctttcttaagcacattttcctgccagagaatatttatttttattgctgaaattaaatggcccttctgaagagtaagggagaatcatgagtccagtgcctttctttcattttggtgtcatttaaaatttctgatatttaaatttttgttagttgccaaatgtatgatactttcacacataatttctttaaaaccatgtgttgatttaaatccttttcatacttctacaaggtgatcataaaagctcttccatgagttaatcactgcacaaataattgtgtatgtgtacatgcaggagtctgttgaatattcatgaagcatgcccatgtaattgcctgaatcaggaaacgtaactgtttcaatgctcgtaaatctatacttgga

SEQ ID NO: 48041 - DNA, 1031 bp, Homo sapiens
agaatttaagatgttaaggttcaaatgatgaaaataaccaacagctctttagatgagctctgtcaaagtaacttatcaatattctatgccatggactgtaaagtgaccagatttattttaatggcccttccttctgttgtgaagacaggtgtaactgtggtctgggtttactgtaaagagtgaatctagtagtttttaatgtaagcacttcaacatctgcaatttttaatcattcagttgtttattgttaggtaataattatccattcagaaagaaaatttgccaaatggtagggctgcatcatgctgcattctttacaaagctattccatttgtttaaataactataaatccttttacatttattcccatttgtgtgttaaacatagacacagcataataatgttaaatgggtgtttaagttaaagctattttttttgtgtgtgggtggattttagtcctttttttgttttatttataatttacaatttttacatcatttgggacaatactataaattgctgaatagtgattctcaatattgctttaaaaacttaaaactacaaatattcctttcaatgtcaggcacattttccaatgagccgggaagatcttgtctcatacacctggaaaatactcttattttgctctctgaggtataatgatacctgattttatagcaattgttccaggataaatcttgttatgaatgacatgtttagtcaagtcatacttattttgctttagaaaattaaagttaattttgcatttaaaatgagatatgttttgtttcaatgatttacttccttatggaaataattaggtctccagtaatctaaaaggaacaatcacaaatgcacatacttaaaagtctcttactggtaattgtgttatctgtagatataggataaagctcctaggaaatcttaaacataagctgaaaaaccagtgagttgctttggcccttaggctcttcaagaatcagaaatttccagaactagccctggtaatttcaccagtatgacccttcac

SEQ ID NO: 48042 - DNA, 1057 bp, Homo sapiens
acaggagggaaattcaaacacaaaaccaatgggtaggacctatagcaaagagattttattctaatagcttaaaaacaaaaacttaacattcaggtccaagaaagaatgagatgttcttggagagcctggacatttgcttgccagaaatgttgcaaagcgcattcaagctcagatggatgactggattagatgacttctgatctttaattcaacatattatatcagttgagacagttcagtattcctgtcaggggagaatggctgtaattttacatactttcttttgattcttcagtttctgtaaatatcaactgaaaacatttattgaatcagagtttttatagccttctctgctttaagaggaatatgtggacatatttctttagaaatccaatttttaccaacagccaaggcacaggccataatcagtttaaccattctctattgtcctctcagcctcatttattgatacaaagtattcctttggactaacaaaatatttcttgatgttgttattattgtacagttttctttacagtcaatcagtagactggacacattttgttacatgcctggcatttggcaaaatctaaattgctacataaacggaaggtgaccttgaacacagacgcgttgtaaactgcttcttccattaagaagtattctgtgccaggttcctctggatggggtgaagctggaccaaagtctttcacttaatttttcaaaaatggaaagaaaatcattggtccatccttaggaagcagagatactaaactcttggcaaacttgattagaaattcattcaggacaaggttcagggctgtgcatacatgcttaaaacctacatggtgcttctagcttcctgcacattataggaatttaagacatgcttgttcaatgggttttctttacaaacttggtatttatcctattttccccattcctttcctttatgctcctatgtctcatcaaggaaaaaacagactagacaagagtcttagtgttcagctctacgctatggtacgttgattctaaagcaaggttttaattttgtttg

SEQ ID NO: 48043 - DNA, 1045 bp, Homo sapiens
gggttctgctgcagattgtatggtttttttccagatgttttaagaattgacaaagtgacagggaaggggaaagtttaaatttactgtagcttcacttgattcatttgtagattaacaaaatgaagaggaaaccagtggtagaggatcacactgggggattttgcctgtttttgttttctgtgtttgctctgatagccaggagttatttggagttgtgtgtgtgcttgtatgcacacatgtgtggttaaggtaatttttattacaaataaagtaattctgtgctattacatgcaacccagcttagtatggcctttagtacttggtgtgtttcttggagttactggttaggatccacatataccatctgattgcctcacttaatgagagggtgttttttgttttttgctgaagtttcttcttacagaccagacaggctattcccacacatacagagattcagttggcctgcctttgatctggccatgcgcagaccatttctagtagaaattcctccaagttgctggtctaaggaccttggtgcttctttggtttccagttttgttgcagtgttttctctgttctattttgttagtttttctaacagggaatcagcagggtggagatagggagaaagaacagagccagatacttatgttcaagtcaccatccagctcagaagtatcatagaaggtttaaggaactgacagagtatgagattttcatctagatcagaggtttctggatttttgattgaatattccctctagtaaaaataactactcattttccctctttcttcctcactatatattcatatatattgttgttatatatattatatatatatatcctatataaacttagacattatatgctgtttacatatgtgtacatatacataattacatatatacacacctacatatacacatatttacaaagcaaatgagtttttaaaatgtttatttagaggttttattatattctttcagaaacctttgcagtaagggtactccatcttggagacaactgatctaggtctttt

SEQ ID NO: 48044 - DNA, 1035 bp, Homo sapiens
acttgatgtaattgaaagcttagaaaaatatctgttctgtgcatatcatcatttctgaagcttgtgccccttttaaaaccattcgatagtcaaattgccactctctaaaatagcactcgcataagtcttattaaaaatagaaaacacatttgtttcaattgaagcagatttcatcctgtcattttcttgtaattatctaaactttaaacttttgctaagtttgcacagataattatgtgcaatgaaaaaaataaatcaaactttactgtaaaattatatctcatttaagtggactgtcagagtttgtttaaagaaattagaaaacatcagctagccccaacctgactgtccattagaatctatagctttgatttctttgtgctcttcttaaggttctctgtaggatctgctgacaccatgctaatacatagtaccaatagcttattgatgatatattgtaccaatcaactaatgcttaattttagggagacttgctcttcagtccaacatagaatttgtaacaactctacacattagagaaggtggcatctgagaaacccactttcagttatcattcaggatgctgaattatgaggaattatgaggaataatgaattaagacatgtagagtcttaatcctgagttacacacaaactgctcaataaatggtagctggtctagttgttgttattcttttcctgatagttgaccaaagtgatattttctttctagatgaagtggcaaagctagatttaacttgttgatctgaattcataacattagttctttcagatgtactgcatcctgacttctccagaaattaagatgagccatctctgaaaatagaatttgctaaaaaaaacctgtttgatttaaaatttattgtacgcaaacaataatgtattctctgataagggaaggttcaaccttattcctgcctgatatccctttctgagcaaaaatatgatgatgcctatccctgttttcaggattaaaggaatcgtctctgctataattctttgctagagaattaaa

SEQ ID NO: 48045 - DNA, 1049 bp, Homo sapiens
ctggggcaggagaatcgcttgaacccgggaggcagcggttgcattgagccgagatcgcgccactgcactccggcctgggtgacagagcgagactctgactcaataaataagtaaataaataaaaaataaaaataaaagcctagcaaaacgttccttgacttgatcttctaatacaatactaagctttggatggaggcacctgtacccttgtgtgcaatgtaggcaaaactagttttgggtaccccttgactctccgttcttcttccctatctcatttgccaaaacaaacaaactaatgaagattattctcaacatattactaatagattatggtgtaccttatttcttacatatgttcctttttttttcctttgatcctttctgtgtttattcttttcacttaccttctctagttctggttttctttgtccctttaccacactcctttttattgactaggcctgaaggttgtggcttggaaagggagggatctttagtcaatttttagtgtgcttcaaagtcctatcacctagacattgctctgcttgacccttaaagacatctttccttttcagatgcatttaaatgtacctaactgtgaggaatagaggctggtctcagagtttagtatatttctacaagttgaagctattcagagagactcttggaaatccttgatatgtaactttacatggatttaggtctagttggccacttttagtttttaactgctagggtggagagattttgcttgacaaatgatcaagtgaatccattgtctagaattgagattaagggatttaaaagctggagaggaacaatgaattgcctggaaggtaactatcctcacttagaggtagattattttctccagattacatcccagatctgacatagtcttgtctctctcaggttgagttgcaggttggctacattttgtatatttggaaacgtacaaagtactctgaatttcatgaaatattttgaggcaaagttggactggaatgtccccaaatatggtagagcaaatagcacatctgccagagaaa

SEQ ID NO: 48046 - DNA, 1030 bp, Homo sapiens
aggacacacagtattttttaaaggcagactcgctctcttttttgccagtgagcagttctagctaaccaagttacacactgtgggtattcctgcctgcctcttgaatacaaaggcctagttcaagtgttgctttttttatttcaaatcaattttttcttctttcctttttgagataaaactattaaaagtactactatatatataaaatctcaaatcaacttttcggcctcctcctcgtgtaccaggaagtatattctgacgaagggccccacttttgcaggtcttgcacgcccctcccttacccagaactgcagagcttcaggatggcgaaggtcacccaagggcatgagtagggagtggtgtctccaaccatcagttccgtggcactgttcagcctttgtgtgctgccctgccacccaccactcacagtgcctctgaagcgtgttacccctggagtgacgtgagcatttgaggcttgtctaaggaaaaaaataaaaggcagtgaaggagactgtacataaagacatggcaaaaatcttaattatagcaatatagttatcgggtaatgttcgggtgggcagctccattaaaaaatatgtgaatgaatctgtgaagctgcaagtagcgagaagagcgaaaggtcttcttaatgaaccgcctaccttgtagacagtaatttgtacactgtatagttttgttaagaattttttttaaattaaaattcccatgtttgtaaagctaactttttaacaattataatggaactatatgttgtttccatttttaaagtaaacaagaatattccttgtttagagactggacttgagttaaaactctccagtctcttaagttatgtattaaaaagaaaatctgtccatgttaggagttatttcacagattcctgtgcttgaaaagcataggatactaatcctttaaaaaagtgtaaatggagaaaagttatattttatgaaggttattttgttgtatttagtattggaaaagttggtttccagagcatttcagaatgtcg

SEQ ID NO: 48047 - DNA, 1041 bp, Homo sapiens
aggaaaaatgggtctttatagttaactgcagattttttttttaaggaacagtgtatctgctttgatttttaactccaactcaaaaccaattaatttgcatttcaaattagaattcttggtatttaccattttagctttagaaatggaaaaacatcagtattccttcaccattcacttctagtcagctgttgcttcccaatattctccagcactgcactgattttgatttttaagataagcaactgagatgccttttcctccccacagcaattttgagattaattgcattactgctgcaccaattatagtgagacagtcatgctattcaatggaatattttgaataaaattagtttaaagatgtaactctcccataggtttccatattggaaaactctggtcaattttcctgacatcaagttaaatacttaaaattacccatgatgaataatcaggatattcaggaagtccattttctttatagaataaataatgtggcctctgaggagcctaaccgaagacttagttcatgtctctaagtcacaatatttaagtgttattagctgttcatctttttctctaaataaatgtctacttgtaatttatgtgcagatatttagaaaaatattctgcttcattttttttttgcctttaacagttcagattataaagactatatacttgccgagaatagcctcccagcaaattgcgatgaacaccgtgcagtggagaattccaacatgggtataatcaaaaataacattctcagtctagaaaaatatattccactatttcttcaaagagtgtatccttaggattttgtttcctaccacggaaactatttttgtacccaggagctaaaactcagatagtaacatcttttctatcattgcccaggggattttctcagttaattctcacaaatgtcaacaagaaatgttttgtgtaactctccatgcaccaccatggatgtaagagtaactcaaataacaatgctcatttgcttgtcctctgcttcccctcagtacagtttaatttactt

SEQ ID NO: 48048 - DNA, 1069 bp, Homo sapiens
ctaccaattgttgtagttatttatatgacttaattcaagtatgtaaaacaaaaacgtagaaaggatagaattttgcttcttgtattaaataaaaagcatttttgtaatttatgatccagccctcaccaagtgaatgcctaagcaaccaggttttttttaggaaaaaaaaaaataatcaggaaaagcagttctagtcatttaaaatgtatcctgtacttttgggtttcacagtgggcaagtttacccagaggcagtgtgacagcctattagcaaaataaatagatcttccaaacttgtagtcctctgctcttttccctccacttttaagtaaattagcttttcagtgcgtctgggcttgggttgtggtaggatgcattaacttctccccacactgttctgattgcgcagcaaagcgtccattaccaataccatatccaaagtgacgtttccatacaggctgcctgctgtttcattcataaccacaaaacaaactgaaatgactttacttctttttacaacttgcaaagagttaatggactgtgctggccccctgccaaaacctttaagaaactttattaatgtgttatgaggctgggacaccatagtgtgggattttattggttattcatcttaatgaataaaaatatgtatgcacaattaaagccacattctctagcaattgccttctaataaatgttgagtctttgtcagtgcccgtcattgcatttgcttatcgattgtgatccttttccttccaaatcctaaagttaccagtagtgcaattacgtgaactttaaagaaataccagcttagtattggaaacgagcaattattcagtgatgaaaagaacataagcatgtcataaaaatgaattaaaaatatctccatgtcagaaacagtagttataatctgcagcatttttcccactatatatgaaaaaggctgggctgtgatgtattgatgattcataagacagaggcaacataattttgctgtagatcatgtaagaaagtgatagtggaaaaaaataacttgtttactctgacatgctacttatcagaaaacattt

SEQ ID NO: 48049 - DNA, 1045 bp, Homo sapiens
aacctgcccaaagcgtttttacaagtaggtggtacatataataatgattataataaaaacaactacctgaaaatttaaaaagaagtaaaagagataaaggaatttctaagattccaaaaagataagatctttttatgtgtccccatttcatattgagtcacctggaacatggcattaaattagttttggtttgggttcatgtgaaagagaaaccacatgagtaacacactctaataaaattaaaatacagttacaaagagacatctcagatggactgaaaaagccaaacagtcagatcctttcttacgtagtggtaaagcctggctagaaaggaagctttttcattagaatattttcaaaatcaagcatacctcaatttgcaagcaatttgaatttatgtggaattaatatagcccaaataaattaaatgaacaattaaatgtttactgttttgaccactaaaatggagtgtggcttttgtaaatgggttcgagtggaacattgtatagtttagatgtgggaattactattaagaatcgtggccggatgcggttctgggaggctttgggaggctgaggcgggtagatgacctgaggtcaggagttcgagaccagcctggccaacgtggtgaaaccttatctctactaaacatgcaaaaaattagccaggcgtggtggtgtgctcctgtaatcccagctactcgagaggctgaggtgggaaaattgcttaaacctgggaggcggaggctgcagtgagccgagattgcgccactgcactcctgcctggatgacagtgagaccctgtctcaaaaaaaaaaaaaaaaagaatcataaagtttattatttcaataatctaatatctttgatgcatatgattctgttcctatataattatttttaaagtcagtagtttaacacaatagctttagattccttctactggttactatatgtcttcaaaagatagaaaatgcaaagttgtatgagtcatctgattaaaggaagagtaaatgaattattaatgagttaaaaataaaaacttggat

SEQ ID NO: 48050 - DNA, 1007 bp, Homo sapiens
tgccactacagcttgggatcctcagttactcatcttgcgaactccatttctccgctccccctttgcctttcgccaccagaatccacatgccactgcctcagaactgttctgagggatgattgtggaaagttcaatccaagctgggctttccagggcagtaggctagtcagtctcaggaaaaatgtctccaattctttgcacattgtgaaaggcccagtttgatctggattttacccacctttccaaacttgtttctcacttttctctctggaacttctgcctcatcgtctgtacaacctgcttcctctttaaatttgtcaaaaagtgctacttttttctacctaaatgccttcacttctattaatcccatttcctccagctaatttttattcaccctttaagtctaagcttaagctaatcttccttttctctttcatgtatttttagttaagtgcgtactatgtgcctgaaattattctgggttcttgaaattcagggttcatttggatatagactatatctctgctctcatgggacttacattctaggagaagccttcaacaaagaagtcttccttgacattccattctgttagcgccctttattttgcatttctgttgctctctaagtttcttcatagcattttattcactctgttaaacaaatatttgttaatacccattggaaatagtcatatagcttggacaagttctgccttccctgatgaactcaaagctctatgaggacatgatctctgacatatgtctatccaggaagatagaaggcaattcatagaacctgaatgaattaataaatgaatggctttctccctgtccccaaatattataattgtactctgcctgaattattttataccattcttttatactgtcttaaaaataccactaattagaaattcatcaggtcaggccaggcacagtggctcacgcctgtaatctcagcacattgggaggctaaggcgggctgatcacctgaggtcgggagtt

SEQ ID NO: 48051 - DNA, 1051 bp, Homo sapiens
ctgcttcagcagacagtgcttgctttcttcctagcacaaaaaggcctgaaagatttatggagcagctttgtttgtgctctgtgatgcttaatcaatttttattaaattctaaagtaaaacttggctttcacttcagtgacatctctgatgtatagaacaaggggagagatcatgatgccctgaaaaagttaggcatgggtgatctaaatccccaatctgtttcttcctgcaggacttcttgcaataacttttgtaagtctgaaggaatccttgtaggtttgcaatggaaaaagcaaatacagcccaaactttagacttttcaaacttctagagagtggatatttgtaatttgttttttaatactcatgcatatttccatatgtgggaaaaaacacataaattctttcaatgtgcagataatgtgctcattttgcattcagaatcatctgaaaaataaagactcactagttatgtttacagagaatcttaaaacttttggtaattgaggtttaacatattaaatatctgatagacatgtggactctgtcgccttttgctggctggtttgccttataggcttaacttctggaattttttttgccttttcaaacaaattcttctggttgaatatcagcatatggtaggaggctcactctgagacaggataatttataaatgaccatttcttgtcttgtgatcttatgtatataaagaatctagagtcatgagtcaaattgggatttttgttcaggaaaaaggttaaaaaattagacatacaattggctttctttgattctgtgtctataaggagaggaagaatgggatttaatttaaaatatatttctgcattgaatactgatatttctgtttttgaatttgcttttttttaacatctggtacacaccagactaacctgtacatattattcctttggaagcatatggttgtgggccctgatccaaaagtagcttatgtatctacatttcagagtgtaaagtttcttgaagaaaggtggggagggaacaactatgagatatgttgttaattattg

SEQ ID NO: 48052 - DNA, 1031 bp, Homo sapiens
aattattcagcataatcctgaaagcattgttcccttactaataagtatccaaggttaaacagcctattggttaaattgcatgttggaataaattgctctgttagatcagagcagttataaaactgtggtagatctgaatgaatgttctcagtgatgataagcagtacctttgcttctattaaattcatgttctaatacgagtcatcaaaaggttcttttatgctaactatgttcataaaagaacactcaatgtttgaccaccacaacagctacagccactaaaaacataaatatgggggaagtccacactgctcagacagtttagtaaattgtattatttaaacaaaatctatttataggagatactgagatactgatatgatgctttaagaaaaccttgtccgttaaaaaaaaatctcattttttctttagcatgataacaaataattctgcctacttatattaataaattcaatgacaaggaaaccatagctggcacattattggtcttagtcttagaattatgtttctttctttcgttttttttcttttttgagatggagtctcgctctgtcgctcaggctaaagtgctgtgaagcgatcttggcacaccacaacctctgtcccccgggttcaagcgattctcctgcctcagcctcccaagtagctgggattacaggtgcccgcaaccatgcccggctaattttttgtatttttagaagagacagggtttcgccacgttggccaggctggtctcaaactcccgactcaggtgatccacccaccttggcctcccaaagtgctggcattacaggtgtgagccactgcacctgtccagaattatctttctattactgaaagatttttgaggttttctctcttgttcattcagcactgagctaggcattgggaatgctgggttttgctggtcctggggaattcacagtctaatatccagcttgtagaagagtgactttcagtgtttcacagtttttttcagctgtgcagtagctgtaataaggcacagctgt

SEQ ID NO: 48053 - DNA, 1021 bp, Homo sapiens
gtcttccactccacctcagacactggcccatgttaccttaaaggatacaaggcctattgtagtttgacatgtagagttacacagataatacacagagaagctgagtttctttttgggattgatgagggggaaagagacggaaaatgtacttattaaaaagagtgccttgatttgctgtggagtttaaaactgggaacatgttttcccagacgagcaaaagctttgtagcattgctggctcgttaatgagtgatcttctttctccctggcgtgccctggctgggcatgttttcttgacttaggactgacactctcaatataatcttaattcatttttagtctaggctgactaaatcttctgatttggcaaagcagactgtcgggattgccattgttatgtttactctggatttatatcttaagttgaggctaagtaacacatttacataaatcaactcagcattagactctaacacaaaattgtttaccgagagaaaagactaattgtattgcttcctgagatttgctttcataatatattaaacctcaaaggatttaaaaatgtagcatgttctgttttaaaattaactcttctgggggttttgcttttataaaaagatagaatttttttttttttttttttttttttttgcgagaattgattatagctgttgctactgtggatgactttcctggaggtagaagataaagtggagcaggccgatgttatttagcaagagtcatatgctttcatagaaggatttatgttttatgaaactggcagcacaaatgctagaaaagaatttaaaaagttcttttaatactaaagatattgcaggaagatgaagaggctttaaatttatagctgcaaacattttcagtaggagtgtttttaaatgatagcattttatgattcatgcaaatatcatgttataatttatttcctttaaaataatggcaaggaaaaatgtcatggctctattgcatgggtcatcatcctattaagtcatgttctatttaaa

SEQ ID NO: 48054 - DNA, 1085 bp, Homo sapiens
gttgtgacagtttaggattaatttttctgaacttagcaccaaaactcatggtcgtaagatgctggtctctgaagtttagagtgactacagcatgaggcagggtggcagggacatagcttcccccagagatcatcacaggagacagaaacatctttgtgagcgctttgccatgtagaagtctactgttgtgcatggtaatttcaagtcacgagaaacagaaatctcaagtgaccttttatctctttaggtaatttctatctgtactttttgtgagaaaaaaggagggtacactggatgttcaagtacaatggggaactcagaaaagcagagttatagccttagagtaaggatgagtaaaagttcaagttccagcttaaatgtacttgacatttgaaccccctgtttgaagcccttactttaggtctatctgcagaggacatctgaaattcctttggcttctaatctatggcaagtgaacaggaatggatgacaaagggatataaagatagagctcaaacaagttgttgttaattctttctttcacctacgaggactaatgaaaagcttaaattactaaattcagactagaccattgtcgctacttgccaaacagtacatgcttgtgcgtctgtctaatccatatttgaaagccacaaacagaagcacataatttggcaaaacaccaaaaacatgcctcggcacacttctggagattcttccaaatgacttaatgattcaaaaatgtgtgtgtgtgtgtgtgtgtgtgtctgtgtgtgcgtgcacgtgtgtgcgcgggtgcacatgcatattgcctggagatgcttggaataaattctgccagcaaaccatgtgtattacacttgtttggaggatttgaggatttctttcaaaattctgaattgtagaaagcaaaagataaggctgtttcttgggcagttactttctcttttattttaaagatgagtaagtaaaaacttgttatttaaaaaaaatctcctcaaaatacaacatgtaaaacattctgtcttttaagaaagtttaagcattctatttgtttttgaaatgtgttttgagctttttttaac

SEQ ID NO: 48055 - DNA, 1032 bp, Homo sapiens
aactatataacatataaaagaatcctagtcttcctccaaggaaaccagttatcagttcggtctgtagtctccctggccaccttctatacctgaggattcttttccctattttactactcgtaaaatagtaaatttcattatttacaaaataggtgcatcctccaaggaaccacagacacctcctatgcacccacactgagctgtcatcctgagtccccccttgcctaacgttgtctcctgtggaagtggaattccctgggagctacttgttacaggagaagactagtcaatgaattgccttattcttttaaggtgtgttataaattgaatactgaccacaggagcactaatctgatagaaaatactgcctctaatctagttttaaaataagtaaagtgtgagtgtagggttagagaagattgaggtatttaaaaaatgattaggataggtcctccttggtaaggcaacatttaagtaaaggcttgaagggggtggtgaatgtagatactcttttaaacacttgaatgtgtgtgtgtgtgcgtattttcatctattccttacatcagccccatgaggcaagatctattagtatctcctttgtacatgtgagggaacgaaagaacagaaaaattatgcccagggtcacacaactagcaagtggtggaatcagcctttggacacaggcattttgttaaactattattttagatcagcccctaagctggcttagtgaggctgatccaggataggactaacctccttagcagactttgtactaaactagatatacaggactcagattaattcctcttcctgggaaataaaatcctggattctacctgtcatttccaaagtgtgtcattttgaagtaccatcttggatcaagttaatacgattggaatgggcacttcagctgctatcagagcaatcccgctggttgtgttgtcattgtgttttggtgctttaatcaaagcacgaaagatgtgagggaaggaaaattgttttagatgagaaatatgcaaaaggaatcta

SEQ ID NO: 48056 - DNA, 1045 bp, Homo sapiens
tttttttttgacggagtctcggtctgtcacccaggctggagtgcagtggcgtgatctcagctcactgcaagccgcctcccgggttcacaccattctcctgcctcagcctccctagtagctgggactacaggtgcccgccaccacgcccagctaattttttgtatttttagtagagacggggtttcaccgtgttagccaggatggtctcgatctcctgacctcgtgatccgcccgcctcggcctcccagagtgctgggattacaggtgtgagccaccgcgcccggcctataatagctcttttaaagtagctttcaatcttttaaggttacaaatcatatacccaaagatagatttgaacctagtttgtgaaattctcagttcctctgtacttccccatctcctcaggcaaataaaaagtgaatgaaagttcttagatgacagtgatcaggttttcttattttcatacttctcttccccttgttctcttataaggtgatatacagtgggttttgttgattctttagttcagtgttgattatgttgtgcacatgtagggagattatgaacactgacatttaaaaagaaatctttctcagtttgcccctttatgatggcatttaaaagccattctgtctgcagtgaagcggcttattcattcaacaactattcactgagcacctactatgtatcaggcactctgccaggtcctaaaattgcaatatagagaagacagacattttacagattttatagtagtgagagacagtttaagaagaattacccaatttttgttgttcttttttcttaagtgttcccattaagtgcttaataagttataaaaagagtaatggtagtgattatacaaacatcatctgaaagaaatgacatgaaaacttgtgacaacttctgagaaaatagtgagatcatgagaatggattattgtgatgaacaagtataattttctctgtatgacaaaaaatatttttgtagtgtgtacatggtagttatacataacaagcatacaagcatgcttgttatgacatct

SEQ ID NO: 48057 - DNA, 1033 bp, Homo sapiens
tggcattgatatatactgttttgggaatgtttgttttggtgacaaatttggtgttctgttaaaaaaaagttaataaaagaatctaataggaattttaacacagatgccaaaatatttaatactaaatggctttgattgattaatctcttttttattattgaatcgtaacattgaactctgatatctaaattattcttaaatatagtttagctcttagatttcagtgtatgtcctatacacattgtcttaaaatgtttcgtaaagtatcttttaaaactaattctggtatttcaattgtttatgttatataatcttgaatcaaaattgtcaatatatatttgtcatgtgtcaataatttgttttaagatattttggaattgagaagataattctataggcaattaaaaaatctagaaagcaaaatattctgcaaatatactgtatttaaaaatattcttaagttagctgagttgagttttgcatccagtttacatgactatcattattattttaaaaatcaagcgtggctgttgaactcagcagaagaaaaaatggtttttgtttgatgaggtatgttttattgtcagactaaaatatctgacctgatgcaaatttatacttttttgctgctaaaagcaatgggctgatctagtgacacacccaacaataaaataacacccagctttaaatattttgttctctgtaaatgatgcctcttccagaatataggtgtttcctcataggtaattgcagaaaaaagtgtaaaatgaaaactgtgggccgggcgcagtggctcatgcctgtaatcccagcactgtgggaggctgaggcaggcggatcacgaggtcagtagttcaagaccagcctggccatggtgaaaccccgtctctactaaaaaatacaaaaaattagccgggcctggtggtgcgcacctgtaatcccagctactcgggaagctgaggcagaagatcgtttgaacccgggaggcagaggttgcagtgagccgagatcgcgccattgcgctgcggcctga

SEQ ID NO: 48058 - DNA, 1008 bp, Homo sapiens
cattaaaaaaagaaaaattagactctaaattatttagtgacctgataatggaattaccttcttccattcctttgtttactgatgtagagattcactctacgccatatagtgattgaagcagcttgctgaagtggaagagaaaaacattgctggtcctactgtttgcaggtgcttgggaaactttgtccctctcagtaactcagtttctgtatctgtcagggaagagaattggcctagaggacatccactatccctgttagctctagcatcctaggaatttggtttctggttatcttggcagagagcagtcctcttcatagtaagcaatacttaataaagtttagcacatgcttgttaaatttagggttttaatacattttatttattaaagagaaatagaaaatgtgtaacctgactcttgagtaacactttcatgttgctcatttcaaagtccaatagttaactcatttggttcaatgtagataaaagcttactttttaagaaagaggtctttaacttgtagaattttagagccgggaaaatccctacagatcttctcactttacagtttgggatactgagtctaagagaggcccagtgcttctttggatgcgttacttttactgctgtaggaggaaaaataaacgtaaattatcaaaaaataatgaaaggttattatttcgtgaaaacatggcagcaatttttaaaggaaaatagaagaaaaataatgattaaacatcttgtattatcatttgtaattaagataaattaattcaagagactaggttttttcttttatacattttcataggaagtattctaacgaaatcaatctgcagccatggtctttctctttttttgtgtgtggatggaagatacactaaattgcactcaactaataccaaaatttgatgctggttgaaaaacagaaaggacccattaaaaatatatggccaattttccaataacataagaaaagatgattgagatttgttataagaaaacttt

SEQ ID NO: 48059 - DNA, 1089 bp, Homo sapiens
aaacctcattgctatcctgaaaaagtagtttcctttagccttgttgaacccttaaaattatgatctcttgttgggtggccacttttgttgctttattgttaaatgttataataattgaagtacattttgaagttgtgaaaaatgtgacttatttacaggggaagtcataatcattattactgtttttgaaatagaagccttcctggttgtcacatatcattagtgaggaagcaaatgctaagaattattttcttcctacagttactgaatttcagaatccttttgggtaacaattatttctttatgaaaagcttaagtagataattgtttgcaagttggcagtgtattttaacattttaatagatttcacttcatctgcaggtatttcccattatgggaaaaaataagctttcataattgattaaaatgaggctgctctctaggatgatttggtgtgtctgcactgtgaaatgctctgggaacataagagtttgtgtgtaggagaaatacttggtatgcatgtttgatttaggggagcactgttaagttttcccatctagcaacttgtccttgactgaacttgtgaactctagtgcacatttgtttgcattctggctcatacacaattcacaagataaagaagggctcttattggcatgtcttgctcctaggcttaatgagacctttgtgggaacatatattgtgagataagatacttagcaattttctcactgataagaaaacacagtctcccaccagaagttcaccctctatgccatgaggtctctgccacaagatagctttaacagacaatttaagagttaaactctgaggccccagttgccagctggggaagcttggcatctgtgttccgatatggcaaactaagctcttgcattgcagttaatatgatctcatttttcaaagggaagggtggggggagagaaggagagagggagggagggatgggacgcttatttgttacatcaattatgattttcaaatatttaaaaatatatagtgccccactttctggaggcagcaaaggttggtaaaatattctactgacagcattaggcatccttcccc

SEQ ID NO: 48060 - DNA, 1041 bp, Homo sapiens
ttttcatgtataactttttgtactgaattggaaacgggttgtggtcttcttttcttattttttgagcttttaaaattaaactgactatgcacatcttttcctcacccctctgtcttccacaggatgaatttcacccattcatcgaggcacttcttccacatgtccgtgcaattgcctatacttggttcaacctgcaggctcgaaaacgcaagtactttaaaaagcatgagaagcgaatgtcaaaggatgaagaaagagcagtcaaagatgagcttctcagtgaaaagcctgaaatcaaacagaagtgggcatccaggctccttgccaaactgcgcaaagatattcgccaggagtatcgagaggactttgtgctcaccgtgactggcaagaagcacccgtgctgtgtcttatccaatcccgaccagaagggtaagattaggagaatcgactgcctgcgacaggcagacaaagtctggcgtctggatctagtcatggtgatcctgttcaaaggcatccccttggaaagtaccgatggagagcggctcatgaaatccccacattgcacaaacccagcactttgtgtccagccacatcatatcacagtatcagttaaggagcttgatttgtttttggcatactacgtgcaggagcaaggtaggagcagattgttcttttttctagcacggcaaacaccgcctacaaatctccgtagacagagtatctggcttgagttagatggtcctcaaggcccctagatatcctccaccctctctgggtatagtagggtgtccgctttcactcacatgtccgctgccatgtgcgagccatgtaaatagacacagagctttcgtacctggataggcttggatatttaagaaagaccacaaagaggtgcgttttcaagtatctttaaaataatactgtttttcaaagacatagggtagtctaacaaatatagttcattacactatactttctgtcgtaggctacatttttgcatctaatctagtaatcttttcctgatttgaaaatataacttta

SEQ ID NO: 48061 - DNA, 1320 bp, Homo sapiens
gctttcccaagaggaaatgcatatgtaccttgatttaagcaaaactgataacagaaaattgaacttaatgaaagaaaaaagtctggatatggttactcactttacatagagtaagatttttaaaactaattttgcttagtagttaattttacaaaaatgaagagaaacaccctttaagtgtactcgtaatttaaaacacctttgaaatgtaattgtccaaatgtaatgctgctatgtatattatttgggttccagatttttccctttaaaattctcaaaacactcagtgtccttacaactgcagctaaaatggttaatcattctggcaagaaggtgacagtgtgtatattggaaaggcagacattcacatttgaaaatattttgcattattgttagctaaaatcaacctctccttgaatgtagatacaatatatggttttgcagtcaattctgaatggaaaaaaagaatcaagtctgaaatttatgtgaaatgtggcttcagatcatttgaacgatatgtagaaatctagatgaacatatcattagaggtgaaagcaaaatttgaaagcctaatgagatgaagcaacattatctctctctaatctgccaacaatattccctagattgtgttgccactgtattgattctgagtaatttggcttgtttatgcgtgatttaaatgcatgtggctgaatgcagtaatttttcaagttattgagtagtagagaattcaccactattcactgtctcccagagatgaacatataaaagaaaaaaaattctacttcatatatgtaagaataaagcaactaaatgatacaaaagtaaaaacttccaccagaatcagagatattccgacaagtgaattgtgagtctaacacgggaggacaaagctaggctcttgcaaggacagagcacacgtggatcatgctgtatgagctcactttgtgtccctggaattagtgtttttttgtgtgtgatctaactggcaagtttaatgaatagccaaaatctatgttattcttgaggctcctaaaattatgtgtgaaccccaagttctgtctagtattatatccctaaaatgcttttaatagtggtatgttacaagtggcataagaagatcctgtttttaaatttgtcaggcattttattattcagtacataatatgtatagatctgagtgctgttttccttgcattgtctattatttttaccttgtctttcccctaagagaatttgaagaaaatcttcaccaatatttctagtgttgatggtaattaggaaaatagtagttgagagatgtaagaatagtttgagaag

SEQ ID NO: 48062 - DNA, 1010 bp, Homo sapiens
taagggtggctttcactttaacatttgggatattttggagttcttgatacctcgaaggtctccatttctattggtattttgaatatctgtaacatgtaatgtcgttcttataacagttcaacactgatttttttggtatcgatagctttatatataaacaaagatgcggacaaaatagcttaacagaagttgtgggcttttttgtggctttgcctgcctgtttgaccaaatacagggtttaattgtttgcaggctgttaactaaagggaaagcttacctgcgtattgcaagctatatattcttgccagtatacattggatgatattttaacctactggtgcctgaagttcgtgttttataacctcaacaactataaaacatcctggtgctattcactttagcattgagtgacatttttaattcctgtaccaaagagttaattttctttttggttgactgagttttcttctcacatcgttgtgtatttataaagtagaatttaatgttactaagaacagtttgattaacagatcttattttttgcatgctgctctggcaatttaatggattttaaatgtttctcatttggatttttttttaggtaggcatgtatggattttaattttgtattttaatatagcttggctactttaaaaggtagtttgataggctgaaattacaaaagataattgaagcacttttcacaagttgttttatttctgcaacaatgaataaaaaggtaagaactctaatttatataaatgaactatatagcttattgggcactttagtgaatactgaaacaaaatactaagatgaagagttaaggttcgttctcattacaaatcgagttcagcgtgtgtgtgtgtgtgtgtgtgtgtgtgtgtgtgtgtgtaatctttagtggctttaaagaataatattgccatttgtctactttgcaaataaagataacagaacacctttaaaatatatgtatgtgtacatatgtgtgtgtagatatatagaga

SEQ ID NO: 48063 - DNA, 1209 bp, Homo sapiens
acatatcaaaagtacaaacttaggaggagtgtatgtacaaaaatgtaaaattttatgaaaatgaacatgtttttatgatgttatttctagttcataagaatgtgatgactgctttgcttcatttatgtacgttcccattatattcttgctgtcaatcaatcacaaatttatatcagattaggataaactaagccattttatgtattttattttaaaccttattttggcagagtaattccttagaattggaaaagctgttactttgaaattaccaatttattacaaaacatagaaatgtattgtagctacaaagacaaccaagcattttctgtgttttaatgaatatctaaaaaactacatttagtttattttactcagttttgaaatgatttttttactggctctattgccttaaaataactaagagattaatgattctttgtataattttccttttctttgttcttttttttacatttcgcagagttatatctatagttttagtaacaatttcttatgtattctggataactgaaaacaactaaaggtgttgggcattagaaaataattgtgagcagtaagattactgatgtaatatgtatgttggactgaagtatttctttataaacattctatttgattttaagcaaaatgtatgttaaagcatgtttttacatcagtaaagtcatttgtcgaccttctggaaatgaaaggtttttacctagatactgtaagttacacctccttaacaatcatatttgtcattgttgttttctgcaaacaaaaatgtttatgggcttcatgtaggcttaagattgtaggcaaaaatggactgagttcaggacccttcaagcagtaggcattcagttacagagcagttggtactttgtaacccagacttacagtttaaaaatatcaagttagctgatgtttcattataataaaaatactattttgcttaagagttgtattacaaatatttgtgcttaacattagaaatagctgttttaaattgtagttaacatattaactttttcagaaaaaaagcatggtttatttttaataatgaaatagagaacataatacgtaatgttcagtataacagctgagttaaaacatctgccaggattaacatcagtgcgtttttgccaatgcatagaggcatttttctctaagtatgatggctaatgataactattctttgttaca

SEQ ID NO: 48064 - DNA, 2467 bp, Homo sapiens
gcaattattctgtgattctatgatgtgctttggtattgttttctttgcacttttttctgttggagagtttatgtaactttgaatctgtggcctgatgtcattcttaagttgtggaaatttcttggcctttgtcacttcaaatattacctctgctcaattttttctcctgcagttctgggattctacttacatgtacgtgaagtctcattgtgctgcatatgttctgaatttatttcttaactttccttttttattccccctctgtgcttcattctggatatttcctattaatttatcctctggtttactaatcacctcttctgccatgtctaacctacccttaaatccttctaatgagttcttaattcagttattatatttttcacttttagaatttccatttgatactttctttcattgataatttctgtggtgaaatcatctattttgtcatctatttttttaaacgtgttaatcacagtttttaatgtctgtgtttgataactttaactttgagatccccttgtgggtccgtttctgttgactctttttttcttctcaatttccagatatttggccctgtcttctgacatgtctaagttagaatactgagcattttgcatgacaaattgtagaaagtgtgattgtgttctttcctcagatttgatttactctttttttttgataggatataagagaagcctcatttttatccaatcaggggtttgtataacaagaatttctaatgctaaataacagaacattggtcttaatatagcagtttttggaaagatgctatttattgcatttattggtattttgtaaggaatcttgattgctggatttgtctttgtgaaagactagtttcaatttgcctttattccaatagtctagtccttcggggtctcagctgaaaaactgaggtgtttattgtggattgtgccctacagttactgttttcctggccttggagattttgcaggatgttctgagtctccggttctacttgacttttcattcagtactgaatgtgaattgacaggtactttcagataaaaagcagtgcagaatatatggctcaccttaacgcctgtctactttctctgagattttggcctcttaagttctggggagtttggctacttgccagtatctttaaacagctgtgtatttattaattaattggattttatctggcttttaatagtgtttttggtgtgagtgttggtctcatacgaactgtttcctcataggtgtcaatggcaatagcattttgtttaaaaaatttcttcccaggtgattttaatcattgctgcctaattgcataactccaggaggcaacactcacatcatagtctatgtaaacagtatcctgtggagttgtgcagtgcaaaacttctgtggccataaggtctgagaagtgctgtagagtagggaatgagactcatggtggacttcataggtgagatagagattaaccaaatggggagatgaaggaggtcattgctgggcaaaaaaaacaacaaaacccttgaggctgtaactggaataattggttttaagggcaaatctttagtaaaattccagcagtataacaaacttctctaaagctaaataataaaataatgttcttacttcagcagttcttttgtaaattacatttactgtgtttttcataaaggtagaaaaaaattaccaataatttcagaaccaaagtcaccattattaccattgacatttaaaaaaataatgttttatggtggaatattcttcaaaaaatactgcctcatcagtgttttttgcaagtcttttcctgtgtttctttcatttttctctaaaacaagcaaaaatctgtatccagctgttgattatgtgtataaaactatgtgtgaataaagacagtatcaggaacttcatcttattatcctttctattattcaggatatggaataagatccccgaaggtccctaactatctttggatattgcattaatgattattatacatattttttgtgggagtaatgatgcagttaaagcatgtggtggactttgaccctgtgttcttctgtcagccagactgaagcaaaagctgtagtctgcattttctttctaccctttcacgtagataggtggcagcatagtatcttttctagcccatctttaaattccaaagctgaatggaattgcctgggtcagaagagaaagtgttaactttcttgtttttcttttcttgttttttaaggcgaaagtgtttattcattaaacaacaacaacaaaaaaaatgagttgcactttgaccattgatgtaatggcacttaacctgtattcagtagaaaactggtacgttgtatgttatgctcatggtaaagacagttgagagaaagcaggttgttcacaaattctgggaaatgaacagattgggagcctgattttcttccatttctctcttctcctcgccttctgt

SEQ ID NO: 48065 - DNA, 1047 bp, Homo sapiens
gacaactgattcttgttagggaatctctgttaggacccaaactttgtattgatttaggtaatttcaagtaatgtttttcttctcaaagcattacatagtgattttaaatgtattaattgagtgagggtcccttaaaatgagagtcttttaaaagactcatgtagaaggtgattccttcctttctgagggtcaaacaaaccaagcattgcattatattcattcaagcattcacagcattagtaaatctccaggttaaacaaaatgatgtatttactcacattaaacagcctcagtcatggagtttgccttttttttggttttgttttatattttgatttttctctcccttaaaaatgtatctgttagcttttaattttttaaagctatcataaattttcagttgaattctttttctcatagtctttttaaaaacattattacttggctagtacaaaaatcactagacatcagaatgtatcagtcgccaagatcctttgtggacatgagtaaaggaaggaaagggaaatgactaagaaaggctttagagatatgtagggtgtgttaagatggatggattttttttcttgctacacaaggcaaaagcaccttctagatgatcaattaaattgctggatttttgacaatagtgatttctcctctgttccctaaacatatagatatgtatgtgttcatatagatatgtgaaactgtgagtttttacaggtatttctcattttagatacttatgtaatatcttcatgttatcaaaggaatgactcaagttctttctttaaatcaatttatggtccagaccatagattagcaaataaattcttctttactataaaggcccgtagtaaatattttcagctttatgggccatacagtctctattacaactcctcagctctgccactgaaacacaaaagcagccatagacaatatgtaaatgatgggtacatcaaactttgtttatggacccagaaatttgaattttatgattttacatgtcacaaattgttattttcaataatttaaaattgtaaa

SEQ ID NO: 48066 - DNA, 1050 bp, Homo sapiens
taagtaacctgcccaaagatgctcatctagcaagtaagtggtagagctagaattggactgggatttgtttgaccgtttgtgtcttagagtattccaagttcctatcccttgttttagaacctgggcccacacttgcatgtgataactgagcttagagcaacagctggatatgatatctaagtataaacgcaataaaagtaattggtacattcttttggttcacattaggtttgaacgaccaagtgcatgctggccactgggagtggatcggtggtgaacctgttgccttcaccaatgggagaagagggccctctcaacgctccaagcttggaaagagctgtgttttggttcaaagacaagggaaatggcaaacaaaagactgtaggagagccaaacctcataattatgtgtgttccagaaaactctaaatataacagaccctacagggggccacctggagtttgtcacctatttattcacaggatctgtgaatattgctccatagaaaacaaattgttatgattgagtgggtatacctttgtgattctgtctagtgaaaatgggacatttttaatagtgccagaaagattgataaataaatattttttacaagataagatacaatttttgtatctcaataccttttaaaataaatgccagcagtattataaagtgtaaggtttgtttattccagaagaccctcacccttaccccattccaaatctcagggagcaccagtctcatagtccttggatttttttaaaaaaaatttttggtcccgttacctctaatgaatttattctgaaatatgtatcgtaggtgctcctaccactttagtctgagtgaagctaactctactagttcattaaaccaaagttgaaccgcaaagttgtccctttggagccctttaaatgtgaaatctaagattagaggctggggttgaaaaagagaattttctatgatgaaaaagaaagactttagatgaaagaatcttgtaggtggaggctcatctacaaagctgtagttcaggtaagaattcggggggctggc

SEQ ID NO: 48067 - DNA, 1034 bp, Homo sapiens
gctaagatcatgccactgcactccaccccaggtgacagagtgagaccctgtctcaaaaaaaaaaaaaaaaaaaaaaaaaatatatatatatatatatatatatatatatatatatatatatatataaaataaaggtttgtggacacatgttacccatttagagaataatttatttttgaatgtgtatgatacctaagtgatatgcatatatataattaagacattttaaatctcttcagatatttcttcataagatacatgtatctatagatagctatatacaaaactacttacaaataataaatagacattgttttatacagttctttccaaagaaatgcaggatttcttatcctagtccttcctccccgagtccagttatttacatatttttgtctttaagtgttagattgcttgtttctgctgcctattgttggtagttttgtcttttacacatttgctgttagatttagttattttgaaatgttgaacttgaaatgtaatgaaaaggacacatcagaatttatcatcagggaagatatcttttatgttgagcagctgctatctgatcttgacagactgtcctcttagaggactgttgaagtccattctagtcattttgtaacttcataactgcagaaagaaatgatgcaaggactgtttagtggactgagatggctgagcaggttcttggcctgaattatccagaggagataggtggatctagcttcagaggaagtctacaccccattcccttctgcttacaatgtacccatgatatgtgtttagcacagtaatactgtaacaggacatcacatggaaaaatcaaagcagctggctcactgtatttaactgaaaagaatgcctacagattggatatttaatagggaaaattaaggcactttaataacaaacttcattatgtgaaacttgttgaatattaacatacaatataccttgtatattaatgccatagtttttagaaacactaatttaaacaacaaatttaaggggtgctggcatatcccagtgac

SEQ ID NO: 48068 - DNA, 1031 bp, Homo sapiens
tgggtagttaaacttcagagatattttgttgcctgtatttaaatttcagaagataaataaatatcattgcatttaaaatagcttaacagtgaccttcagaagacttctgaaaaagacagtctgagaacatgaacacggatcgatataatgtacttcatgggttgaagagacctttctctataaaggatgatgcagtattcagttagtggttttttactcttcatttgattaaaggtggtgacgttttggagagactgattttgaatgtacttaagtctattataataacaaaattcaaaacccctgtgtatctaaagggaaggaagtgtcatattttaggaatttttcttaaccttagcaatgagagcctaaaatacatacatggattatttttcttctaggaagtaaatttcctgctgctttaaatgatatgtaaaatatcaataatttttacacttaagatgttggtaagacctagttttctaatctctctagcactgtgatgtctccttgtagataatctggaccttgcttagtcctttagttgggaaacagaatcagggcatagagcagaagagagcttgacactccatatggtcctggttctgctacccattagcgattagtgaggagacctttagggagtccactgtgccctgtgtgtcaccacattttcttctgtgaaatcaagattaaagaacagatgactttcaaggtctttttcagttttataactgtgagtctatgtattaggtatttattttcaacaaatgactttaaaatgtcgaatgcaaaccattcccacttggagtgttttatttttcaatcatcatcattgcccccaactccccacatgtatgtgttgtggcatccagagtgagaaaagacaatttatgagttgatgaatctgggccttatttctatttccattttgaagaataacttgtcatagaagcctctgcagtttaacagaaggagccacatattgggagtcacgagttcatctctgtgggttaatagttccatgacac

SEQ ID NO: 48069 - DNA, 1056 bp, Homo sapiens
cttgagggggatgctatgctgatgagcctcttgcaaaaaatgctggagtgctttttttttttttttttttttgagacagagtctcgctctgttgccagactggaatgcagtggcgcgatctcagctcactgcaacctccgcagtggttgggattacaggtgtgagccaccatgcccagctaatttttgtattttgagtagagacggggtttcaccatgttggccaggctggtctggagctcctgacctcgtgatccacccacctcggcctcccaaagtgctgggattacaggcgtgagccaccgcacctggctatactgggctgtttttaaattgccttgctcatcattccggtctggttggacaggtatggtgagccaatttccagttcatgtggtaggtgtgggtagctactttaggttcttaatctgaggaggcagaatgatgagcatctgttttaggaagagaagagtaacctgagagtggtatcccagtgtgtctgatgtgtgctggagtttgagaaccatggagtcaaagcagtagtaggaaggcattcttggagagcatttcagaattcagatctgaagtgatgagagtctcaattaatgtgatggcagtggaaatgaagaggaacacgtgtgtccgagagatacttgacagaagtcttggccatggtgaaagttgctctcctggtcattccttacagaacccatggtagccctagtgtgctggagaggggtgttaattccaggtgagcatcatcgtaaaccactcagaagagctgagtttatgtgctcggaggtgctgagctcccactttgtgtatctaagtgggggtgtgtatagtgtatcctcccaggtgacagtgtggccagctgagatgcagaggtggatgtttggcaagaggactagtatctgttcacagtctgtttcctggtaatgaaggatgaggtgtaaccttagcgagaattggcaggagttaaaatgggaacacctaatattcgaagggaacggatgttgagaaaaagagtgaggatttcagagctgatgtattttct

SEQ ID NO: 48070 - DNA, 1067 bp, Homo sapiens
ttaacctccggcaaggtaataaaaccataatcttaccacacagaaattatttgcatatctaccagattaaaaaatctacaagttaacataattttacagagtataggttttaatagtaaatagcaagccaaacaagatatatactccctagggaattaaatgttccttgggtgggcctgtcagacagtgctccaaggtgaccttgagaggacatgcagtcttccttttgccttgtttccaagctcttataacaagtagatgagttatttcttgcttatccatgcaggaaagaattaaatgtagctcagactgtacacaaaaatggattctagattatatttgtgtgtttgcaatagtattttctctactttatgtatttgaagcatttcttattaatgaaatgagaaaatgcattcttaaaacactagacagtactttcaataaatgggttatgtctatatctaaaaaaatcctgtttaataaaaaaattagtttgtggcatgatatgcttattgtgatattaacataaatctagaaatactgtagaatttccatgaattcgtgtacatgtgtatacaaacataaagaacttgaagaatctgaatctaatcttttatacctcagaaaagatgaataaaatgtaacattattttgttaataattattatattctgctaaagtcaagtctgttgtgccaggtaaagatacaataattttagcttttattaacagattaatttaggcacagtaatattttaactagtttgtttgagcataagtgattcctgaattgaatatcattagaacacaagcagttcagtgttctacttaaggagtgggagggggaaacttatgaagtatttaaagaagcaagacaaataaaatacttgactggaacaagtgggaagttcttagttagaggtgagttggcggtttctgattggctaagcttaagttttgtttttactgtttacggtgagttgagtttccatttgctcgtataggaaccatctttgctgaaggcctcccaattcattattactgtttttattttttgagatggagtg

SEQ ID NO: 48071 - DNA, 1050 bp, Homo sapiens
aaatccctaatgggctttatataaattgcattgtattttaagcataatcaagtgaacttgcttgagttgtttatgtttaatgctcattaattatttgatggtgtcaaattttagtacacttgctgaaagctggatgctttcccatttcagacaaatcccttggttaaacataaggaaaagcaggtgtttggggactggagagcagaggagttatcatatgcagactatttattttaggaaaaacgcagccaagtggtggttttgtgcttttacactgcatgttgcttttctcaaccactaaaaatggcaataagtacttattcttagttaagctattgtgcatatctttgagcttcttagtaaagattactaagaacattttttttttaagtccactaattcattatacttagcctgtatatagaaatactggttttggaaaaactgttcactgtttttcacatattttaatttgtagaaacatcaatggattctcgacttcaaaggatacatgctgagattaaaaattcactcaaaattgataatcttgtaagtgtttaacttcatttaatacttcagtactgcatttatagcttcatcttttattttctcacatgatcttatgagtatgtaaatttaagggataattactggtcattttgcactacctctttttttttggaaacgatctttagaaacagattgtttaagtgttaagataattaacagctatgaaattactgttttgtcatgaaggatgtgaacagatgcattgaggccttggatgaacttgcttcacttcaggtcacaatgcaacaagctcagaaacacacagagatgattactacactgaaaaaagtaagtgatttcaagtcatgtggattctttgaattttgtcattacttcatttaaaaattgtttaaaaaatcaattaggaaaacaattatgatgaatgtatattgttttctcagatacggcgattcaaagttagtcaggtaatcatggaaaagtctacaatgttgtataacaagtttaagaacatgttcttgg

SEQ ID NO: 48072 - DNA, 1160 bp, Homo sapiens
taattcaaagactatttttaggttgctaatttgagtattcatcccttttttaaaaactagctgctgcttttcccccaagattataattccataagcactagtcactgactttatagttaaataaaaccatcctaattctcaaaacagaagagaaaaggtgggaggaactttcagactgctcacagaaggaatatgctgaaaggccaacatgagaaagaagcagcagatcgaaaacgcaagcaagaggaacaaatggaaactgagcagtaagtatttttttttttctaaattttgggttctttttaaaggctagcatggaatttttaaataatagactttcattttccagactttatgaagccttttgaagaagtgacttttcccatgtgttagaaaaatcttcaatatatgatgatgatcttatttcaggcttcattctcttctgagaggatgaaattgactgaggcagtcactctgtgaattatttttgaatttaaacgaagtgcagataggatttaattgatactggctttgcaagaagtgtactcatcctcaaccatttgtttgtataatataatacatatagatagaggggcgataatatactggtagacaaagaatgcaggaaatgcccttattcatcacaccaccaagcaggcctcaccctaaagaccagcaaaagtaacaaaagcacatttggaaacccaggaagccagtaaaagtaaatctaaaggctgacagggtgtacattattatgtatgtgcaatataaatcaaattcaaagctgttttctcttaaattttgatacttatagagacaggacttgccatggggaatttctttccccttactatataattttattactagaaggaaaagtaatagcaatgataataatgaacagacttcgtgtctttattacatttgctttcctagttacctttagactgtcacttctgagttctttctctgacatgcttttcttttctcgtgaagcgtcttacattctgactaaattttgtttttttgttgttgttttagtgaggtgatttttaaaacatgctctaggtcaataagacaaagttaatgatgagcagtaaaacaattcttgaacaattttgtactttttttctttatataatatatccgtaagccaaagt

SEQ ID NO: 48073 - DNA, 1031 bp, Homo sapiens
aatagcatttgattaaagtcattaatattttaaatttgtgcgttctttattgatagggattttgatttttacagtttgcagctctcttcagcattgcctatttaaaagtattttcttaatttggcaaattggaaatattttggaaaaatcttcgtaaaacaaaaccaaaattgagtgaattttttttctactttttaataggattcttactgaaaatggggggtaagatgagtaatacccagaaaagaaaaaagatttttatttatatattttggagtttaatattgcagtggataaaattaatagtgctagggaaactcagtgaattttgatatgaacttccaaagatatgtaactgcataagtaatataatatgtatatgaatattaaatataagtgctgtttcctattctaaaagttgaattttgtgacattactgttaaaacgatagtgaaaaatgttttaagccctctcagtcataataaggacaaattgaggattactctgtttacctctttataaattttttgttgttgctcattttaaccatggtgggggaggtattattttttcaatttagcaataattgtatctgtaataagctactaatattcttaaatagtatgtatcatttctaatatttatatctgagatttgtatcttaaatagaaactagtagttactgattttttttccatgtgtatattagctacagaagtcaagattccaaaaccaagaggcagacccaaaatggtaaaacagccctgtccttcagagagtgacatgtgagtttatttttaatgtataattatgcaataaatgagacatttgactttaaacaagcacatatctctgcgattttatcagttttctcttacaggatgtttgttattattttgatctttcttaaaattacaggaaaaactgggaaaattttgtaaagtaaaaattggtaaggaatggctatttatcatttcattaattaagactcttgggtatatcaatttatatagatacttagataatacaac

SEQ ID NO: 48074 - DNA, 1027 bp, Homo sapiens
tcccattgattattaagattgccttgcatggtcctttttaagaactgctttttttgaggttaagaaaaatgattcatgtaaaaaaatttatcttttatacagtaactttgtggtagatcagtcttctgtggcttttagacttagagccatatctttaaaaaaaaataaatatttgaggttttaaaacattttcctgtaattatttttgaggtcttttcctactcctgaagttcctggtcaccccaattttgagccctttggggattttaaattgtaaatgagggtgcttaagattcaacttctttagttgtctttttagcttccaaattttatttttgccttgtttggttttaagagtttatacttttaaaataatctctttactgttgtttttctggtttttcaggagggagaatttgtgttgaattgggtttgttctgaccagaaatacgttttcatggaggtttaactcaagtcatttacttggaatttgaaacctgttacataagaggaatgttatactgttagagctaaatgtgttaatttttctaatttgagattatggacaggaattaatgatgtctagtaaaatcttcagtttttgatggaatgagatgatttcagtttaactccaaagtaaatttggtaaattattggtttgccttaatcctagcataataatattactttgaaaatgggatgtgcagttaaaatacatggatacaatgaatgttacagaatttaaataataaagctgacttttatataccctgattttttatatatgtgtgtgtgtgtattttttttttttttttttttttttttttgagatgcagttttgctcttgttgcccaggctggagtgcaatggtgtgatcttggctcaccacaacctccgcctcccgggttcaagcgattctattgcctcagcctcccaagtagctgggattacaggtgtgtgccaccacgcctggctaattttgtatttttagtagagacggcattttgccacattggccaggctggtt

SEQ ID NO: 48075 - DNA, 1032 bp, Homo sapiens
ttatgagtttagctacaccaaataaccagtgatgccattggggtgcctgcctcttcctgcagctcagcagagtgaactgtgaaacataattgtattcctgttttagccttttattgttattttgtcaatgaatgtcaacctgtgatttaatctcattattcacaaagcctcttggattacatctctgatctgtctcttagacttaccttctcctgtctcttcacttttactttgttagtcacgagaaccccaggaattttatctccttggtttttcccttttaatttgctgtgaagctaagacaagttttcttacctttttcttgagccaacagaccttctcaaacagaaaccctcctttgtctttaatcctgctgtcctcaggcccatttctttcctctccccagagtctcagtttcatccatccttgactccacaatgtcttccttgtgcaaataaagcattagaggggattttgagtgggggctgaagtgtgcagggctatagggtttctaggattcctgtcataaagctaacagaattgccctcttccttctgtttacgaaagcagacttcttcatgattcgaacaccttggaggagttttacacaggtctgcctgggcttctcccaaagtggttatacatgaggtagttgcatttttggtctccagataggcatgttagtaagatggaaagcagaaagatgttaaatagtgtcttttaggtttggcagttaattagcaaagatttccaggtctttgtttatggtccttctagattttataagatcaagttgaagatttttcaaaagcaagaatgctctttgtgtaaagtgacacagaggaaggggagagacacatgcaagatttgttagggctgaagattccaagcaacagtgtcaaagctattcttttctatatagttgtaaatgagtgtgtgtttaacaaattcagaagccaagaggaccattccacactgacaaagagcaagctaatacacacaaaatctgattcatctttgttactaggtagc

SEQ ID NO: 48076 - DNA, 1108 bp, Homo sapiens
gtatgtttcattctgcctacaaatattacagttgttccagctggcctcctagaaacattagcccgaagttctggaaaagcacagtcacataaaagagctttgtgtgaatagagaatggtgtaattttgtttacttacacaagcaaagtgctctgatgtatattgtgtatgctagcggtgcatcttcctccgtcagtgcccagcaagaaatatgtgtttaatgtaaatctgctaaaacaaataaacatgccaagttctttttccacgattttaagtgtttctcagaaattatcaaaacattgcttgaaaaatttccctaaatgcttcccagaatctattgttttcaatgagaattttttttgtgtggccatttttattcttctccccatcttgcctgctcatacttacacacttgcaggcacatagacacacaacattgatccatgcacactttggaaagccaagtcttataaattagagagataaacataatctaacaaaaaagggaaaaaatgactctgaaatagtagggagcagtcagatcagttaaactttttgactgagggtttaaatactggctttagaatgacaatttaaggttgaaatatctgcttattacatatggacccatctcagttacaaaacaggtaaatagcgggagaatgagagagaagaggactgcacatattatgtataagtgttttcttcagaactgtttgtaatgctcaaaggtttctcttccacagaatatctccctgaaactcctgctttcagcactcagagccacctctttccaacccacatgtgggatctaggagttttccatttgctgacccctagctagaagtttgttgaatgcccctgttcatattacctgagataatggtctgagcctatcactcactcctgaggtgatccagaagttagatggtatatctcctaatttctgggtcacattctgatacatgtccacctaaccaagaggtcagcacaccggcaggtgtaggcaagcaaaggcggattatcagtgtcttgcagagtgtctgcgaaggtgtgtgtgcatagcacatacctgctatatattggtgttagctctgtagggaggtagt

SEQ ID NO: 48077 - DNA, 1061 bp, Homo sapiens
ttttccatctttctgctctctctaaacacgccatgctttcctccactctctgtgcctttctacttactgctgcatctatttagatggttcatcttcacctgtttggctcttcaggcatggctcagaagtcacctctgctagaaggactgccttagccccctgctgtgcaagtagagtaccctttcccagcatgggagcaacctgaatgccttacttttatccttttgcctagctcttccattaaaccacataagctccttgagggtcttatttggatttgtagtctcagtctgcacatagcacagtataggcatgtcttaaatgtttattaactggagaaaggagggacagaggccagcatagaactggaagattatttcaggatttcatccatccttagtctacctagtctacctaccatgttgccacgtttattacagtaggtgctcaagacagctctgaatgaatgagttgtttgttccctcttacacatacccacccctaattaaaaattcaaatcatttttgtatcaatattgtactttgaaaagatcttctgaattgatggcttctaacttcaggttgttggccagatctggatgtggtcagataaggtagatgtaactgtttcctgagtctaaaacctatcaggatgcactggttgggaaatggatagagcaccttagtgtattttctgagaaacacagatcagtggttttgcttacctgtgtgttgataatgagtgctttttctgcgtgcgtactttatttcttcgaaataggacttacgtgaaaacaaagtggcttaatcattcaattacagtttcctctatgaaatttttcaataaaaatgaaataaagcaggggagctctaagtctgtttcatactctgcagtatggatgatcaccaggaaacattttcttaatggcatcataatattctgaatgttatttatactaatgatcacgaatttcatcttagtgatgcctgtaaaaaacttaacctacatgttaagttgacttaagacacaacgtttcagactacccagactgaagacacacc

SEQ ID NO: 48078 - DNA, 1046 bp, Homo sapiens
aatttcttatttattaagaaccttttcggcctggcgcggtggctcatgcctgtgatcccagcacttgggaggccgaggcgggaggatcacgaggtcaggaaatcgagaccatcctggctaatatggtgaaacccgtctccactaaaaatacaaaaaattagcggggcatggtggcaggcacctgtagccccagctactcgggaggctgaggcaggagaatggtgtgaacccaggaggcagagcttgcagtgagccgagatcgtgccactgcactccagcctgggcaacagagcgagactctgtctcaaaaaaaaaaaaaaaaaaaaaaaaagaaccttttctcatgtcttagacccgtgtcttcataaaagctatttactttaataaagttttcacattttgaggggaaaatagtaataaataacattctatacctttcatttgcatgaacactttatttcattattatgtttttcttttcttttcttttttatttcatttgagacagagtctcattctgtcacccaggctggagtgcactggtgtgatctcagctccctgcaacctctgcaggttcaagcgattctcatgtctcagcctcccaagtagctgggattacaaacatgcgccaaaatacccagctaatttttctatttttagtggagacgggtttcaccatgttggccaggctggtctcgaaatcctggcctcaagtgatcttcccccctcagcctcccaaagtgtttggatttcaggcatgagccaccacgcccagccatatctcattattttttaaaagtttattttgtatgaagaaagttatgctttatgccagtgctacccttctccagtaaaacaactaattgatggttgagatgattgttttatttgatgaaaaatgatacttttatatcaaaaagattcttactagttttttatagaaaccccttaaaacatcaaagttttatagtgtacataaaagatgtgtttgtccacatactaacctcgcaaataaatgtataaagtaaaacaacaaagtagtttta

SEQ ID NO: 48079 - DNA, 1025 bp, Homo sapiens
tctgctaatgttttgtccttgtagaacattatgcttcctctttgcttatgagctgtggttttcctgactcagactaggttccagctccagctggaatggctgttgctcttcccctctcctcctgccccccttttcagggagtgctgggagctaaggaggagtagtggggcctgcacaatggagctctttattaaaatacctgacatctgcatgcaatgcaccaaaatcatctcagctcaagcagaggaatgtgctgggcattactagtcactttttgtctagtgctgtgtgcttgtttgatttatataatgagtgagtgcctctggcaaaagaggatgttgagcatattattggaggaagggagctttttaattttttccaagaacattgtcacagacaggcctaatactcatacaaaaatatgagtatttaaaaacggttgcagctatcccatggatttcttgctgtggcttaaaaaatgttacacccccctctgctccatttaaggtaaaattagaactcagtaatccaatttaacatgatatggagttttaatgttggtgactactgttagtaggaagtagcacttttaaggaatctcacgttacaaagaatctctggaaggaaaacgtaaaatacatgtcaaaaaaccataaaggcacacacatagaaagaattattggtgagtctttaattcccgtcccctccctcagaagagtacattactcttttcatactgcaggaaataggtatatgtgcgcaaattatattttcttctctaatgatgtaaaccattcacgttttacctatttatggccagtatatgacgaatactgccatgctaacacgttatatcataaagcactgaagtgtcatgacattgctgctcacattgccaaatcagcaacattgtccccattcccacttagaccttttatttccggtggaaatttaacttaagatttcagttgggttgtgggtacattcggagcaccagacaggggaggtagagggagatagagctt

SEQ ID NO: 48080 - DNA, 1056 bp, Homo sapiens
taaatttccttagggaacttgtcagaagtgcttacctagaaatcttgcctgtttgcactctggcgtctccttaccacctaggatgttctcttactctgaaactcctaacgacctaggcaaatgagagacctgagctgaagccccattcactctcaggttaaatctggtgtctactagtagctcatactgtacttcattacagtttcatcagtcattaacactggtagcagtttcaaaggggtcacagtcaactctgttgctactggtttccttgtcattttatttaacttttttgtctttattataattcgcttcttttaccatgcatggtgttctcaccccaagtgctcattaggtagtaaagaggaaaaggtggagattgaagaagcagcttatttcacagcataatctcatatggtggtgttttgtttttttgggtgaagctaaaatctgttagagttgtaaaatagaacagttattaaaatattcttttttgagatggaattgttgtccaggctggagtgcagtagcacaatctcagctcactgcaatctctgcctcctggacgatctcagttcactgcaatctctgcctcctgggttcaagcgattctcctgcctcagcctcccaagtagctgggattacaggcgtctgccaccatgcctggctaattttttgtatttttagtagagacagggtttcaccatgttggccaggctggtctcgaactattgacctcaggtgatccgcccgcctcggcctctggtgttgggattataggtgtgagccaccgcgctgggccaaaagattcttttaatctttttttgtattctttttccagaaagtttatacctttcttctctttagtcatactttgaagagggtttaacaagattcaccttcacagttgtttttcaaggcagcgttaggacctgacattaattgtttttttttgttttgttttttttttttgttttgagacggggtcttgctatttcgtccaggctggagtgcagtggcgctatctcggctcactgcaagctccgcctcccgggt

SEQ ID NO: 48081 - DNA, 1045 bp, Homo sapiens
agaccaaacctctatcgtttctttgtcatgatttttcttctcattttgtcattctaaccccacagctcttcaatctttcctcacttccaagtccattttactgttgataatacaagatgcatttggcatctgttctgttgttaaagccctcaggaaaaattataaagctgttcttgcaaattcatcattattgttaagaaccgtaatttacctcatggttatctcatcctttttccacctcttacctgagctccaggatgacattgccttcctgggtgaggcagcgttgcagcatctcatctctcccaccttaatttgtagcgatgcgttgcatttgggtgacaggcagttgttcgtgcttgaataactcaggatttgaattctacagtttgtggcatccgtgtaatgcttagcagtaggtacagctgttaactattcgcttataaataatcttttttgcctctcaacctgtctcccaggtagtgtacctgtcaccattaataactctttagccgctccctagtgatttgacctatcagttgtcgttcacagaaaagtggtgctctggcctgctattgaagcttatgcaggttctttcagctcctcagtcaccccagcagccatatacttgtaggaagttgtgttggtgggcttcacaagcaggcagctgaacacttcgtacagtttgataaaggtggcattacattttgaacaatagatgataagactcccatttagaccgcaaaacagtgccacaggggtagacaggggtctgggggagataagatgggtggtgaagatgaccaacagcaaataaactttcctgtctctttgatgctaattatctctttgcacctaattatcatggcatcatcatcatcctctgatgtttgcaaactaagagttgatgtgtttgatcaggttagtgaatctgtcaggtatggcattctgcctgtttctgaagcttaagaatgagaagccagtagctatcatgcggaagatgtgaactgccccccagtccttgtcctttagcagtgtgtcattc

SEQ ID NO: 48082 - DNA, 1070 bp, Homo sapiens
ctcaagccatctgcccaccttggcctgccaaagtgttggggttaggggttacagacgtgagccaacacgcccagtcgtatttatttttccccacaaatattctatttgtttttttccccctgttttgaggattcaggaaaatgtatttattcaagagataactggtatattacaagtagtaaacagacagacaacatgcccctctgttacagctttcaatttagtggaagtggtatattataagtggtaaacacacacacaccatggtatattacaagtggtaaacagacagacaccatgcccctctgttacagctttcagtttagtggaagttggtgactcaggctaaattaagggaaaggggagatcactgggtatgttttctaatgaaaacgtaagtatgatctataattattgcagtcattaattatatgtaaatagactctttggacatactaccaatttacttgaaaagtcaatgctttaaggaattttaaacatttttcaactgtcttggttgtattttaataatattaattcaaactctgcaattaaatgactgactaacgtaaatttcaacctggcccccactttttgaattaaaaacatttatattagtttcagttactgagattttgctgtccattatggaaaacccacttatttattagattatagaaggtaagcagcaaaagatatatttccttcccattccttaaaatgtttcgacaagttaatgaaaacttattttaaaatttccttttagtgagaaatcaaagatgatcatttttagccccatcaggatcattttagaaaaactgcctgtgaagtcactcatttagaacgagacgatctctgtggaattgctgttgccagtgccacgtggggagtaattgggccaattaaaatgtagatgttttatattaagttgtggtgcctgttaaagtagagtaccagatttagaattagtctgtattccctttgttagtttccttcactcagtacatagaattttagttcatctgatagcttgactgataagtaatatatgtatataattaagaaggtga

SEQ ID NO: 48083 - DNA, 1038 bp, Homo sapiens
actagatggtttttatgtcaagatgcttttccttatatttgttcaaacccaaacattggacacgatggtaggccacggaaatcagttaataagtatttgccaaatgattgttcataccagccctctcagttgcagaatgaaaaactttgaatgcttctttaataataaatcttcttgactattggctgtgattctaagtcccttgttataggagtatggttattaacctagttatttctgccatgtttcaatgtggataagcgtatttaacagattcgctctgttgcattgatcctgtgatggtgttatatactactccagtgccctggactgtgcgctacagggcagcctctagactttgggattaagtaatggtgattcggtgggggtatgggttcttattttatgggagtgttttggcaattaagtgctatttaaaggtattatttttgttagaaagataaggatttagatctgtggttcattaattatgtaaaagttgaattagcaaaggctagtttttggctcaaattatgaaagaatactcttgggaaactgggtatcggggagaggataagtaagtttggttatttgtcttgagattttatagagaacacacacgtaccccataaatgtagttttaaagaattgttcaaagtaaatcaatttttgattttaagaaaagctccaggccggacatggtggctcatgcctataatctcaccaccttgggaagcctaggtgggctgatcacctgagatcaggagttcgagaccagcctgaccaacgtggagaaaccccgtctctactaaaaatacaaaattagctgggcgtggtggcgcatgcctgtaatcccagctactcgagaggctgaggcaggagaatcgcttgaacccgggaggcggaggttgcagtgagccgagatcgcaccgttgccctccagcctgggcaacaagagtgaaactctgtttcaaaaaaagaaacgctccacatttttaaataatacacaggttttgcagtgtaactactggtgaggac

SEQ ID NO: 48084 - DNA, 1041 bp, Homo sapiens
agttgcattttagatgttttctttgggtggttcttgtagccatcacagaaataaacataccttagtttgcaaaccgctatttacttggatctgaataggaaacattgtcacgatgttacgatatactgtatttccggataccttaacaattattagataaacacgatgaagatggaaaatattgaagaaataatgatattataaaaacttttgaatggttttagttgaaaacaaaccaagaatatattggtatagacataattgcaaagtagagctaccgcactaccaaaaaaagttatttgaggtagttgctggaagcagaattttcacggttagaaatgcttaaaaagaggctcttttaagtagaaaagaatgtgagactttagttattgtaacagtaggcttcagagtagccataaatgaagtttagctggagtaagactaacagggttttaatctgttgtttttctagttaaggcttattaataacatttatgtatggccttgttcatttgtgcactgggacagaactagaaccttgggctccccattttgttctttggtacagggccatcgtatttcagtaaatagagagttttttctcttcttagacgtctaaacaatggcaataatttataactaactgctcttcgttatgttgcagaggcaaattgcgcagaaaattatggataattttaaaaagatgaaatacaggtggctcatctaaaacagactccaattaaaaccacattgtattaaatagagcctgctttagataggctcctcttcatgctaaatatgaatgaagcaacaattttagatataatagctggtatctggattttaatatgatcagttctcatgcttcggggcccaaatattgccagctggtattaagaaacctaccctcctataaaactcgattatattgttttccctaagagtattgctttaggaattattgagaaagtggtttttacagggtatagacttttgcataaaagttggtgctaaaatttgactcatcaaaatttgcatcac

SEQ ID NO: 48085 - DNA, 1030 bp, Homo sapiens
ggagtagtccaaggaacattcctaagattattttgccatatgctttgtgcagattttgagtctttttcaatcttaagtttaaattgtttccagtttctgaatattaataaaacaaacaaaccaaccctcttaatgtatcccctgttctacacattcccttactttttgggaactcttttgtcccctgccctcaccaccatcctaccctttgccatatggagtgtgggatgtattgtttgttaggttttaaataagcaaatttgccttctctgtgttgaagaaacctttacttttaaaaactgattatggcctctaggcaccaaatcttaaacatttctgtagcttatctgttgagtttattatagatcgtatctagaaatttatttagcttgtttgagttgccaacaaaagttggccaagaaatctgtataatagaattgtctgtccaattttgaaatatgacttctaattatatcttttgcatacacacaaaaatctgcagtattaatttgagctctgtcctaatcacaattattttttgttactttccagtaaaatagctttttcttgtaaatttttgacataaacaccagaccacatttattaaaatgaaaaaatacttgctgttatcaaggtattcaaaagtattataaaatattaaataaagttagagtttgtggcacattgactaacaaattttatctgacagagaccaagaaaaaaatacataaaattataaagtaaataaacaaaatcagtaatttccacaaacaagtatgtttatgcaggagcactgttaacctactagtgttcagagtaatttctgaatcaagataatttctgatggtgcttttaaagagtctagttatcttgtaactaatatgacatgggattaaagttaatctctttttaactacagtgagaaaatttaaaagccttggcttcatagactaaatacctgaacagacaaattgctgaaataatgcagctaagactgcaagagaaactgcaaaagataccccaagttatg

SEQ ID NO: 48086 - DNA, 1030 bp, Homo sapiens
ttttgcttttttttaaataaatattttggccagcctcagaaatttagtaatggctttgaacacttggaattagcatgataaagccagagtttattatatactgttgtgatttaaatcacacactggttattttggggagttagagcaatctacttgacacagacaggtcttccctggcggaggcttgcccctgcatgttctggatagatggctttgatgttgggtgaacatcacaacttgaactgctgtgtttacactgtaagaatgcttgctgaatctctcactgcatctctcacataattccaacttcactttagttctgaatacatgaacagtaaagggggcagtttgcttttaaattttgcttgtcagttaggcactttaagagtcttatttctttatgtgatttcctgtaagagctcatatatggggattgttattgagtaattttgaacacaaaattaattctataccctttgatgtggctaataaaagccataagggtatggtaggaaaagaagataagaagatagagaaaaaaaaattgcctctttctatatggcaagaagaagaaaaaaaaaattaagagcagttgtctttgaaccacagcagggtttactcttaagggtcttctagcttgtttttcccattagctaggaaagcactatgtgagctttaaaaaaaaaatacatatatatatatatttaaatcatggaataatataggacaaatgatttaaattgaatctagattttgcatgaacactcttctagtttattggttaaataaatgctgtagtttcaaataacatcccacctgtttgccttgtttgaggatctggtgagatgtagaattccagtagcttggctaaaaaaggaagaaataaaagatagaataacctggaagttctccacttcccttcaggtattttcttgttgttctttagatttggaatctgttactggattcttctttcatccatgcttcatggcatatagatatgtaggcattatacaaaaagcttatctag

SEQ ID NO: 48087 - DNA, 1024 bp, Homo sapiens
cccagaatttggaaggataagagaattgttaagaatttgacattggaactgttccctctaattgtggcttagaccatttgatgggaaaaaaaatattaaggaatccaggaggtgatatgctgaacaatatggggactattcacggtgaaaacaagcatttacccaagcatttgaccagggtaatgtgtgttttagtttcaggtagtagaaactgaagtggctttgtttcacagtgacatttaggaacattgactaaaatatactgggctgtttaaagttttgttttcttttttccccctctcccttacagtactccccctgactccaaattctccagccttatagctgtttccatgttttgagattactgcaaaaacacttaatggcacacatatgaaaatttttgtaaatgtctaaatagtttaacaatgaaaattttcactcattctacatgtattactgatttggagaatttctaaattgctgcacagttttattgcaatgtagagatgtccccattcccttgcaaattagtaaattaggatctccttctacctctgagtgctatggatgccatcccttctcttgtcccgaaattccggtctattattgaacttctgtttattctacttagggggttgattcctttaaaagtgtattattacatatattaaacataagaattttagaaaatcagagattacaaaaagcaggaacatcatctgtaaccctaactggcctgccctaagatcaacacacctatgtatcccaagtagcccccacaaattatgcttcaggtgacatcatagtatgatatataatattgatatgatgtaatgtcattgatgcatttgtgtatttgtatgtctgatattatgaacagccttctatcatctttaagagtctgcacattattccattatatggataaaacagttctcctagagtttatttctaattctttcctattattaatacacgataagcctctttctggtccaagcacattcccttcagcctactg

SEQ ID NO: 48088 - DNA, 1054 bp, Homo sapiens
tttttaagaaatgaaatgcctacttagtaaggatcatgtttgtaatgatactaactccagagtgcctagatccgtgcagttccagggcttggtttcagaggaaataaattttgttctgattagaaaattaacttgcattatgcattttcatatctctgaatcagtcttgactataaattcatgatgctagtcaaatattaaacacactttcatgcttagtagcataaaatagtgtcaaatggtaaaataagatggtaagaactgctcaacctcaaagaatttacaggtctagtttaggaaatttgctgtgatttctctctctctctttctttctttctttctttctttctttctttctttctttctttctttctttcttttctttcctttctttcctttcttttctctctttctctctctctctctctttttttttttttttttgagacagaggttcactcttattgcccaggctggagtacagtggcacggtcttagcttactgcaacctccacctcctaggttcaagcagttctcctgcctcagcctctggagtagctgggattacaggcatgcaccaccatgcctggctaattttttctatttttagtagaaacaggatttcaccttgtttttcaggctggtctcaaactcctgacctcaggtgatccacccgtcttggacttccaaagtgctgggattacaggcgtgagccactgcacccggctgaaagttgctatgatttctaaggtacttccttaatttataaagaagttacaggtctagtttaggatagttgctgtgatatctaaggcacttccctgcttctgccatgaagcattgtgctaatgctgcctataacctgcctattctgaatttaagattcactatattctgaatctaagaataggcagggtgtaggcagcatcagcacaatgcttatggtataggtgaagcattctggtgctcacatttcacgtggacatgaattctgagagtttattccagagcagaacagcgttttcagctgaggacaacaaaaccttctccttat

SEQ ID NO: 48089 - DNA, 1032 bp, Homo sapiens
catataagtctatgtctaatacatgcaagcatcattcattatcttttatatgagaatgcactcctgtcacctaaagagcagaaaacagatacactaagacaaaacaaaataaaaaacccccccaaaactaaacagggattccagctcgtaggaaaattgtcagcgtcattatttactatttgattcaggatttttgcttcgtgttgtttaccctgctttctttccttgtctctattcctttgactccgtgaagttggtttctttatgtccccaaatgagaactttgtttttggaaagttaaagatgtagattttatttaccttgctcttagattgcttcactactccatggtgttctcttactctttagcagaatttggcgacagtgtccaataaagtaactaataaattgtaggaaaaaaatgtcacatgtaatctctcttgtaaaaccttttatgaatggagcctgatggctggagtttgttgttcctacttaatctcataaagagaatggatttagaacaatgttcttttaggattatgcatagggtgattatgagtgtgatacgataaaatcgtaattatgatttcattttgtcctgaacagttaggattttttgctctggattggtctatagttgatgttaaacattttctttttttttgagatggatcttgctctgtcgcccaggctggagtgcagtggcacgatctctgctcactgcaaactctgcctcccgggttcacgccattctcctgcctcagcctcctgagtagctggggctacaggtgcccgccaccatgcccagctaattttttgtatttttagtagagacggggtttcaccgtgttagccaggaccgtctggatctcctgacctcgtgatccgcccgcctcggcctcccaaagtgctgggattacaggcatgagccaccgcgtccggccaatgttaaacattttcaatttgacatgtcagatatttggatgtattattttaaagatcttttgtctcatcttcataggagtgccccag

SEQ ID NO: 48090 - DNA, 1033 bp, Homo sapiens
gtttcagattctaatgctgctacatgttagctttgtgactttggataagtgactttatccctgacctttattttctttgcttttaaaatggggaaaaggacatttagcttacagattgtcaggaaaatgaaatgagacaacacacttgaagttccagtacatagtagatacttaataaaccttaggtcatcctcctttgacctgctctgtggcttattctccagtttttatcccttgggaagcttgaatttttggaaatagtagtgtaggatggtaggggaataagtttaaataaaatgttttaggttcttcatttatctctaggaaaggcgatattaggccatcagcagatgtcttttttttttttttttttaagtaaagaaactctggcgttatttattagtctacatttttaccactctgcaaaattttcattaggttgatctttgtggatgtcagagtgatgctatcatttctgtgttaccagttttggtacaggtagtttacaagtaaagttggccgattctgttggatcctgtttacttttgtataatcttttctaatcatttgcttgaattaaagcttcctgccttatagtcattagcatttgatagtggatcttgaaacttgattttgcaagttagactccagcgtctgtccctggttttgtgaaaatctacttataatcatggaactaagaccacactaaagcttcgagtgtttacacctctgtagaattaaacaaaacagcagcagtcaacatacatgtatctgggcaatactttatcttcatttagaatcttgcagaatgcctaaagggtagttaaggacttaggaactatttgttgagcaaaataatgtgcttctttttattgttttttagcccaggattatgttttcataaaaaataattgtgttcccatgtgaagtacattaatattattgtggttggtctttttttttttttttttttggagagtctcgttctgtcacccaggctggagtgcaatggcatgatcttggctcactgcag

SEQ ID NO: 48091 - DNA, 1068 bp, Homo sapiens
cattgcctttttttccccttcagttctccaatctattttaccattgtaaaatgcttttgagtttcttactttgtgtaagtatatttctacttatgtggtgtggtgtgggggaagtattcacattcacacaatgtctttaacttggatgcagtgaaacctagtttggtggacttcataatttccatggtccatctctcactatcagtaaatgtgggaaagccaacagatggcctttaagtacttctgattctttaacctgaaatactcagaatcagcagcaaaaagcaattattgtggaagtgatacttgtcttcttccttctagttttaaataattttcatataaatgattccagagagttattccataattgtcagactatgtagccagtgaaaaaaactcagaagacatatttgtgccttgtaggtgtatttttttgtacctgtgtctgtaaaacgatacagatgtcccacttgctagatagaaattatcctaatgtcaaatgttctacacagtatgttatatgtggaagttcagatcatgtatcttggggatttatagagggattaaatgttcttttcaaatatttattttaaaatgagtgttagagaaacttaaaatcttatttattattgagtctggattaattgttgtctctttttgtaacagagcttgtcctctttgtaaatttgtgttacaaagtagttaagattttgtttgagcaaatccatttagcaggtgcagtactgtatatttatgaaaaaatattttttaaaacttagaaagatatcctgctgcttttaaggctcgtgttgtggcagtaacatgttatattgcagacgtgtttcagccagggccacctcagtccatgatatctgaaggagctcagtttgcctatactgggtagcattttgtcagaagactgctggctgggcagactagatttggatgtattagctagtcagcctaataaccctgtacagactgtattgattttctaggagagagtttatgaactaaataaacttggggttggtgtcttaataaactgcttctctcagtctgtca

SEQ ID NO: 48092 - DNA, 1031 bp, Homo sapiens
tgagatgagggagatattcctggattttctaggtggacccagtctaatcacatgaatcattaaaagctgagaacttttcccagctgtggtcagagagagatgaccatggaagaatagtaagagagctctaacattgctggctttgaagatggagcatctgggccctaagctaaggaatgctggtggcggatagaagctgagaaatacaaggaagcagattctgcttttgagtctcttaaatggatggcagccctgctgatatcttgactttagcccagtgagacctgtcaggcttctgaccaatataactgtaagataagaactgtgtgttttaagccactaaattagtggtaattttttagggtagacatagaaaactaatataccttgctttgtgtttgtaatttcttgaataaaattatcaccaaactctctaaatactgtaaaggaacaaaaagctatttgcttgcatataaaattgtaatttataagactttattataatggattgttacaattaattttgcttttaaataacagaacgaacttgatgcgaccttgcaagtatgctttttttttttctttttaaaatcaagggttgctttgctaccattgtaccaggaatatagtaggcagtcaataattgttggaaacagtaaaattacatagtcaacattttcattagctattgttaatgttgttgttaacaatggagttttgagaaaggggcttaaggaaatgtaggaatgtaagtgtgttaggtcttaagaagtatctccaaacttttgacagatatttctcacatttcgatttctgtcatgttcgacagttgtcaagaaattgctcaagggtttattggactcaagcgccagggcatgagtgagtttatctctgtcttgataagctggacactgatggtagccagaaagtagtggtgatggggagttctgattcttcagataatcgtttcctatttagttagaaaatgacaggattcaagatgttgtaccatatagcaagagatttaagat

SEQ ID NO: 48093 - DNA, 1027 bp, Homo sapiens
accttggcctcccaaagtacatgagccactgtgcttggcctggcaggtgtaattcttacatgtcactatagaactattttatatataatgtttgacctataaacttttctacttgctattttagaaaaagaatttgttggttagaaagtcactgaagagagtttaataagagtactgtttgttttttaataaactatttactgtggttcttgtaaataaaacaaagcaacttagttaattctattcaggaaacttagctcaatttcctagtatgaagaagactgatttgatagcttggagtagtagagacctaatatggtttcaatcattgtgtggaggaggacattacattgatgagacaaaaccattttctaggttcttgaaactacttgaccaattacagtaatttgaagggggcacttcctaaataatattaagttcaattcatagtatgaacttttgagttcaaggcttctgtaatttttcttggcttaaaaaaatattcaaatttatagaatagtaatgatgttggaacgtttgattagattttagtgttccacatagttgactataataatttctgaactacaatagtttcagctagaatatttccatttattcaacaccacattaatctttacttacttgtcacacagcttttaaaaaaatctgatgtgaatttgctttattgcatttgacacgtttgggcaaatgacaacaactttggtgtttttaaaatgttccagttccagaaatcagccttcaataagcttcaggcagtttcccagtaagttgttaatggattgccatctttctgcctctcttttaaattttttccttaaaggccatactgggggaaactaactagttcactctagatggctgtactaaccctactttaaataccactgagagtttaaaaggctgcgtttttgcatctagactcacttggatttgaataactgatctctgaccgtgggcaagtctcttaacttctgtgtcttgatttcttctatttaaaaagaaa

SEQ ID NO: 48094 - DNA, 1035 bp, Homo sapiens
ggaggttttaagcagggtttgagttcacatgattttcttgaagggcttgcttagccacccgtcattccctttggagtggtcttccttctggagtcagggacaccatttgtcttaagtgcagtagtaataattccttatggcaagtggccaaataaccagcaattcccagcatgtgaggcccccataatgggcctgcaaggacagtaacacttgaaaaacatcagagagaaaaaaaaattgctctttgcccttagtgaagtaaggctaaaggaaccataaaggaatatagtcaaccattactgctctgaggctaatgacctcgaagctcttggcttcccaagctagttttttttctcttccttcttggcatttcattgcttgagaaaactgttccaggaaatggaaaaagaatggagttcagactcaaagtgggtctttactttttgacgatcctggtaaaatgcttacagggacagaaggttgaaattgtcaagaagagtgtttttggatttgttaatcttggtcctctttgaaggcagagtgcttctaagagaagatcttattcatcgtctgatgaataggtcagttgtcacttgggaggagggagcgaaattggtggtggcaagagaagggtggatttgtaggaagcatatcactttcctgagggttttgttctaattcttctccagatacaaataaacgcaacattgggtgaattgatttacttctgtaagactgattcctggactgtaataagaaggaatttgggtagggcgggggggcttacacctgtaatcccagcactttgggaggtcaaggcaggcggatcaccaggtcaagagattgagactatcctggccaacatggtgaaacctcgtctctactaaaaatagaaaaattagctggttatggtggtgcgtgcctgtagtcccagctactcggcaggctgaggcaggagaatcgcttgaacccagtgggcgggggttgcagtaagccgagatcgcgccactgcactccggcctggtgacagagcga

SEQ ID NO: 48095 - DNA, 1028 bp, Homo sapiens
atttctatgatgtatgtgatactctattaggtgccataggtattacagatgaagtagaagctgtcatcctaagagagagcacaaaattcactggtaaagggatattcattatcttaaaagaattaaccatagtccatggtcttcctctggcatatgaagccttaggaacctaattttgttaacataccattgagaaagatcaccttttcatggatgcattcagtttgttcaccagctgaggagtggagatcacacacacacacacacacgccatgtgaacatgtatgtatctgtataccatatgaggtggaatactcatgtactcatattgaaatgattagtacgtcttctccttggcaggcaaatttaaatggggagtcagattataatccaaatgttgttcatctctttatggggttggaatttcagcagagaatattaagggtgggatgggggcctgagggtcttctcctcctatagagaaattctttccagtgacctgtgatgttcacggtgcacactttggactcctttcctgggctgtgcttgtaagagtattgacagtgtttacccctcttgctttttttctgctaccattgcccttgtgatagacaaatttctctttctttagatacgttaatattctcaagcagatattaggcaactgtcctgggagctagttgttaaggtgactttgcctctctttggttttttatggatctaatgcagatggcagtctcatttcactcgtttcaaattttcttgggggatacctcatgctactgccttacacataacatgttttgtatacggataagtggaaatggtggaaaaaaagatatatattgcaagaaaaaaaagacttagaaactagttattaaatacctggtagagaaagtttcttttgttaaatgccttatagagaaatatcttgatctgaaattgactttatatacaggtggaataaactgctctagaaatcaagagggagtatgtgtatttaatctctgtatctgttttctgtgtct

SEQ ID NO: 48096 - DNA, 1100 bp, Homo sapiens
aataagagccttgatgcaaaagaaccaccgtctgacttgacaagatgaagacgtacccatttaatataactatgatgcacttaaattgaagctatgccacaggatagaaaatgaattacaacttaaatacatgttggaagtgtaacactgtttttcaaggtttaaaaaaattcctaatgccttttagccttctttaatatttttaggtaaggaaagtatgtttggattttttcctctttgtaggtatatgagattgaaatgtgaagtatttggacaacaaacgtcaagcaatgggaagccattttgatttcttgagtaatcttgtaagcattaagtgaatgacaaagtagtagtgtaacttatttcttatgttataacttcagtcaattaatataaggatagtttttgttgtatgttcactaaatggttaatataatagccattgaatatactaatctttcatcttagagaactatacaacttttattgtttcttaatggaacattctggctaaccagaaaaagtgagaaaagtagtaccttgggatgtgtagtcaagatgacaaattttaagactggaaaagctctaaacaggcttaatgattcttcaggtagaatgatcctgagaagtgatgtttgatggaataaagtgcatgtgatgattaagtgaagactggggcagaatgatttaaaaaaaggaaaaagatggaagatgagtagacacttgcaaggaacactgtcaaactataaatccattcagtgggttgtataacatttatatttagtctaatttagactttgataatttaatgctacttttatattttaacaaaaatataaattaaaattttcattagtctgttttgttgttgggtttttttgtgaggtactccctgttgggggaaaggaacaaggaacaaccatcagaatcccccagtccctacagaatagcctcacagtaacttgagaaaactgaacttggggttaaataacttgtcacacttgcagtctcctgcctcactccttcaggtgccctgcctagaaaaagacttgtgtctagcatccaagtgaacacatactattgccctctgtgaaccagga

SEQ ID NO: 48097 - DNA, 1063 bp, Homo sapiens
cttattatccttatcaggggttttgttgcattctaccaatgggcttggtaatctttgctttactttttcttttctgttttaggttgccagagcagttttatctgattcaccacagctctctgaaggaaaagaaataaaattagaggaactaattgactctctgggttctaaccccttcttaacaaggaatcagattccccgtactccagaaaacttgagtaagttaataatgctttctgttacttttttctttcatcgacataaccactgttagaaccatggcctgacagatctttttagctgagttgccaaaggctgtttatttatgctgttgtaatcgacgtactaagtgtgggcattctcacataacagtcttttagcagtattttgtgccttcagtgtactcaatatacagagatataaaattttgataatgtacaattttgtctttgttgttatactttgcttttatctagaaagatcttatttgagcatttaaaaaaaaaaatctcttgcctcctggtctgacctgtgatctacatatttatagagtacataggctgtgttctgccagtcatcaaccagaagcatcagccataaaccatgtgtgcggaggtctttacccctcccaaatgagtcaaactgcccaataccttttttcctataacctgtaatttgtgtaggcaaagttctgatattggtgtccttaggtaggcacatcatcttggttgagtaattaaataatttctgttttgctgctgatttaattcagtttgaactgagccacagcctaggtcagcaaactatagcctatgaaccaaatttggccccaccttgtgtgtttttgtatataaaattgtattgaacataagcatattcatttgttgacattgtttatggctactttcatgctatcatggcagagttaagtagttgacagaatggatggcctgcaaagcctaaaatattgctatctggcccttatagaaaatgtttgccaaactgtggcttagatggacaagaaaaggtctttttaatacatgtaattcatatgtgctgtgta

SEQ ID NO: 48098 - DNA, 1034 bp, Homo sapiens
cagcctcccttccccttccccctcccctcccccttttgagatggagtctcactctcccaggctggagtgcagtggcgtggtctcagctcactgcaacctccacctcctgggttcaagcaattctcctgcctcagcctccctagtaggtgggattacaggtgtgtgccaatatgtgcagctgatttttgtatttttgtagagatagggtttcgccatgttggccaagctggtcttgaactcctgacctcaggtgatctgcccgcctcagtctcccaaagtgctgggattacaggcatgagccactgcgcccggtcccctttctttttatagtactattactttttttttttttaaaactcataggttgtatatataaagatattgatagagtgcctctaaaacacttgaatataatggaaaaatgaacttatagttcataagcttaattatattcaaaagggtttttagacatgattaatttgaaattctccaccccagtacaaaaagctctgcttgattgtagtataacctagtcagtggtattaatttatctaaataaaatggattaactgaagggagatgttaagtatgaaaggaaaatgaggaatcaaaatgagtctggtttggcaggagggaggattctgacaaatgaaaatgatctgaggcctccagagtttggctttgatgtgagttaagtattttcttaggttttctttttttttttttttggataaaatctctctcaagctctttgttgtgattctgtgattgccatgccaagctgctgtgggtataaatttggcttccaaggcacattgtcacctgtaaaggttagcgccctcttcaggaaatatttttattcagtgaatgtattgatcatctgatatgtgctaggtatctcgtagacattagggctacaacaatgaggagaacaggcaaggcaaagtcacttccttcatggaattttccatttaatgaatctctgattgcaaattatataattaaaataatttgcagaacctattaaagttttc

SEQ ID NO: 48099 - DNA, 1501 bp, Homo sapiens
gtctctacaaaaaataataaaaaaaaaactagctgggcatggtggtgcgtgcttgtagtctcagctactctggaggctgaggtgagaggattgcttgaacccggaaggttgaggctgcagtgacctatgcttgtgccactgcactccagcctgggcaatagagtgagaccctgtctcaaaaaaacaacccaaaataccaaaacaaaacattagttgttatatgtttgtggtatactagcttttggggagttgttagttacgtgatgttaatttaatttcttaatattgaaattcaacatttttggtatttattagcttgtaagtctgttttcctttttttaaaagtcaatcagatttagcagtgggagattgtataccaccaacgttagtgacactaatgttcatttctgataacccactactatcagaccagcctgttttctataatcttatttgtgttctgtgtagattcttctcatcattttgtagagacatttaacataaaaccacaggacttgcacaaatgcattgccagatgccatttcgcacgtagcagatttttacaaattttgcaaagacaagattgtgttacccaaaaatatcaggaaaatgcacagtaagtagtaccttgatagttagaaaataatttctttcttttgaacagatgtcaccaatataatgtcaggagaaataatccatgcctacctgaaaaccttggcggttatctttctattttaaagtcagataacttcttcttctttttttttttccctatctgagacagggtctggttctgtcacccaggctcctaggctggaatgcagtggcgcgatgtcggctcactgcagcctctgcttcctaggcttaagtcatcctcccacctcagcctccagagtacctgggattattggcgcaggccaccatgcccagctaatttttgtatttttaatagagacggggtttcaccatgttgcctagactgatctcaaacttctgagctcacgtattctgcccatctcagcctcccaaagtgctgagattacagacatgagccactgtggctggctatagtcagataacttctgcctaaaatattttaaaactttagggaaaaagaaaagatcactttacttatttatttatttattttgggatggagtctcgctgtgttgcccaggcttgagtgcagtagtgcaatcttggctcactgcaacctccaccttctgggttcaaacgattctcctgcctcaggctcctgagtagctgagattacaggcgcctgccaccacgcctggctcatttttttttttttttgtatttatagtagcgaccgggttttgccatgttgaccatgctggtctcgaactcctgacctcaagtgatccgcctgccttggcctcccaaagtgctgggattgcaggcatgagccactgtgcccggcccactttagtttaaaaagttcagttttcttatgtgctttgtaaaatatggaaatatattt

SEQ ID NO: 48100 - DNA, 1049 bp, Homo sapiens
ccggaggttgtgaggccctttgaggcgaaatcgctctgggcgtgaaaggagcaggcgttggcaatggaaggaccaccgcgacctcaggctgaccgtagggagggatcttgagggccctccgagtcccctgggcttgcgctttctttctttgcagccaccgtgcctaccgcgaggatgagctcggcctcggtcaccgctttcgagaaggagcatctctggatgtatctgcaggcgctcggcttcgagccaggcccggcaaccattgcctgcggaaagatcgtgtcgcacacgcacctcggagtgtaaggaggccggggccggcggggcgagggagcctgaaccgggggacgccgggggactcccccttttgtagaccccggaggttgattaatcagaattggttgagcagttactctgtgccaggcattggctccaaagttcctactcccagttgctgccagcctaggggcagagacagacagtaaataatgcaagagtgccggaagcgctctgtaggggagtgcaaaagtctgcagatggggagagtgcaagactggaggagcagcttaactctgcctatgtggtggaggggtggtctgtgaagtagtgggagggatggcgggtggtagtggaagagcatgggaaccatatgtacaaaacaccttttggactcaagggagcctttgaaggtggttgtttaattttataatttttaattttttaattagtaaggcatgttggagttagcataaaacaacggagaagggtattaaaaacaaatacccttttaagaaaagtatggaaagtaaaagccccttccctactttttccacttctgttttatcaactttagccagtatctctatttaatcattcccactgtaggccaagaggaattcttttctttcatatggagtctccctctgttgccaggctggagtgcagtggcacgatctcggctcactgcaccctccaactccctggttcaagcgattctcctgcctcagcctcccgagtagctgggattacaggcacttgccaccacgccc

SEQ ID NO: 48101 - DNA, 1059 bp, Homo sapiens
gatcacaaggtcaggagatcgagaccatcctggctaatatggtgaaaccacatctctactaaaaatataaaaaattagccaggtgtggtggcaggcgcctgtagtcccagctactcgggaggctgaggcaggagaatggcgtgaacccaggaggcggaggttgcagtgagccgagatcgagccactgcactccagcctgggcgacagagcgagactccatctcaaaataaataaaattaaattaaaattaaaaaataaatattaaaattcaatgtaaaacaattaagttatgatgataaacatcatacgatatcaactcacacaagattcatggtccttttcaatgtcaggtaaattcatccttgatttcatgaaaatccagggattaaagcagagtagtttcatctaagtgcagctaatgtctattccattttcaggtatgtccgtggagaacatacctgaaaatgatatgttcatggagaatcaacttgcctttcattcacttcaacttgtctttcattcaaatattcagatatttcatttcagatatttcctgagccatatgttaggtgcatgccaaattcatgctggggatattgtgttgaacaaaccaggcatggttcctgccctcacggagtttacagcctagtgtggtcctagcataccgccatgccaataatgtgcagttgtttttctttttttccagaaggatctcactctgttgcctacgctagagtgcagtggtgcaatcatagctcactgcagcctccaactgctcgctcaagcaatcctcttacctcagcctcccaagtagctgggactacaggcatgtgccaccataatcagctgattttttaaaaatttttttgtagaaacaggacctcactttgttttctgggatggtcttttattattattattattattattgtttttttttttttttttgagatggagtcttgctctgttgccaggctggagtgcaatggcgtgatctcggctcactgcagtctccacctcctgggttcaagcgattcccctgcctcagcctcccaagta

SEQ ID NO: 48102 - DNA, 1050 bp, Homo sapiens
ttttttgagacggagttttgcccttgttgtccaaactgaagtgcaatggtgcgatctcggctcactgcaaattccgcctccaggttcaagtgattcttgtgcctcagcctcccaagtagctgggattacaagggtgcgccaccacgcctagctaattttttgtatttttagcagaaacggggttttaccatgttagccaggctgatctcgaactcctgaccttgggtgatctgcctgcctcggcctcccaaagtgctgggattacaggcgtgagccactgcgcccggcccatagctggcttttatgggctccctaaagtattttatgtgaatggaacagtcctctgccctcagtctttccccactattgggtattagtgtctgtgctgacttgactactactttagcatttacctccaaatatggccaatttccctaagtggcacttgtccacatccgtctacaatagttagctatgttcctgtttcccaccttagaggaccgttgtctgtactgactgagcttgattcttacctgcttccccgaaccactttttctgggcctcagttctgatgttcctcacatcatagcaaattgtcctgaccgtggatccagaaatatatgtgttatttcaaagattacacctggtgaagtagctcccacctgtaatcccaacacattgtgaggttgcagcaggaggattggttgagctcgggagttcaagaccagcctaggcaacatagcaagaccttgtttctactcaaaaaaaaaaataatccaaaagaaattagccatttgtagtgatgcacgcctgcagtcccagctacccgggaggctgaggcaggaggatcacttgagtctaagaggtcacggctgcagtaagctgagatcttgccactgtactcaagcctgggtgacagcgcaagattttgtctcaaaaacaacaacaaaaaaagattaaattttaaaaatactagcattcgttttggccaggcatagtggctcacgcctgtaatcccagcactttggtaggccgaggcgggtggatcac

SEQ ID NO: 48103 - DNA, 1031 bp, Homo sapiens
tttctaatacactgagtacttcaaaactgataggataactctaacaggatgaaatgataaaagactgtggcttcagtcttaaattctttgtctcatcctcttggattgcttgctcttggggaaactaggtaccatgccatcaggtttccttgtgattttgattagaagtggatcctccccaaactgagccttgagatgagcatggcctcagccaacatcttgattgcagcgtcctgagagaccgtgatccagatcacccagctaagccactcccggattctttagtcatagaaactgtgaggtaataaatgcttcttctttccagctgcaaaatttggggataatttgttacacgacaacacataactaatacagcagtacctggaaggtaacaagtgctcattaatggtagctcttcttttagtgaatatgattggattcattcagcatatgacttggcatcctgtaatgctgatccaagcttattttaataccataatgatagtgtttacaattgcagtaagaaaaagtaggaaaagtagaaagactgacttttggtttttgttttttgttttttgagacagagtctcgcgctgtcgcccaggctggagtgcagtggcgcgatctccgctcactgcaacccgcgcctcccgggttcacgccattctcctgcctcagcctcccgagtagctgggactacaggtcccgccaccacgcccagctaattttttgtatttttagtagagacaggtttcaccctgttagccaggaaggtctcgatctcctgacctcgtgatccacccacctcggcctcccaaagtgctaggattacagcgtgagccactgcacccagccggaaagactgactttatctcatctgttatttataaaccacctttgatagaagagaaatttgttaagagtgtgtttcatatgttgtctaggatttgcttcaaaataatccgtgggagatggggaggagtgcgggaaagagaagggagtaggtaggggttaggtaaaaaagattagac

SEQ ID NO: 48104 - DNA, 1027 bp, Homo sapiens
tagcattttcacaataaattcacactagaattctgcataggtcagattaaccctgaaatgttgaaagactggtacaataactataatttgtaaatggttacatcaggtagaagggagttaggttgttactgtaccatatggaagtaattttactgtgtcaactcatttagtcatctgcataattactgtaaacacacacaaaaccaatggctttttaaaccatgcagagagttaaggcaaacttactgttcctaagggatatttttaataaaaggcatgataaatgtcaaagtgaggcatgtgagatcatgattttcttaaacctactggcaacaagcttaataaatttacagttttaagacttaattgattcaacctaaaaacacagtatttacaaatgcacatttttactcacaagcatacaaatctaaatatacaagaataaaacttccgtgtgcagtgcaagtttatcccacaggttttaaaaagtcatcaataccaacaatgtatgtgcctgaaaaaagatttcatgttcaatgacatacactttagcattttaagcacattccaatgaattccataaattattaggcagctgatttaatttcattttaactatctgatgattgattcatttgttcccattttaaaactattgcaaattaacattgggaagaggatggaagtaactggataatcaagataaaacccattaagcaagataatacataatatgaaaggtgtattatgttggtacaaaaataattgcggtttttgccattaatagtggcaaaaactacaattaattttgtgccaacctaatacattaaagttagggaaggcagctgtcatcagattttcaggtaattttaagattaatgactacagacaagtttagtagtagtcatttatttaatagtcaatgagacccctttcagaaaaccgtattgcaacatgcaatctattttaataaatatacacttagaatatggctgtatatacacatacctacacagccctacacata

SEQ ID NO: 48105 - DNA, 1050 bp, Homo sapiens
aaaaagcattttagaatagttctgatttgattttaaaggcctcattataggttttcatagatgctgttaagcttacgtttatttctgatgtttttaaagtagatgtggattctaacaaaacaaatattgaaatgattgagtcctttgaatttttaggtaagaaacctaggaccaaagcacccaagattcagcgtcttgttactccacgtgtcctgcagcacaaacggcggcgtattgctctgaagaagcagcgtaccaagaaaaataaagaagaggctgcagaatatgctaaacttttggccaagagaatgaaggttagtctaagatgatttgagggggtgggaggagttcgacctggctttggatttgcgtctttaacccagaaaggccttaactgtttgctgttttgttttgtttaggaggctaaggagaagcgccaggaacaaattgcgaagagacgcagactttcctctctgcgagcttctacttctaagtctgaatccagtcagaaataagattttttgagtaacaaataaataagatcagactctgatctctgttgacttttcattgctgatagaaaactacataaatgaagagagggaaagttaggtcatagaaaatggggatatgtatatatggtattccaatggtggataaagtcagacctattgtgtgtggtagtggaagacaaggtcagtgtacaggggttcctttcaggggatgggtggcacaggaagggattctgagcataagacacctgcctcttcagaatggcatggaacttaggggaaatgatgaggactattaatcttttttatatagtttatttttgaggaatatagctctttaaagcactatacacaatttaatacatgaaaattgaccttgtgaagatgaacatgtcttttttaaaaggtaacttttaaggcatagttttagtggatacctagttttagtggataccatccactaaatggtttttaagccatttcaaatttgttttaacaaagcttttcaactccagtgaattgttaggctgttcacaca

SEQ ID NO: 48106 - DNA, 1622 bp, Homo sapiens
ccactggctgccagaaactcattgaagtggacgatgaacgcaaacttcgtactttctatgagaagcgtatggccacagaagttgctgctgacgctctgggtgaagaatggaaggtaaaagttgacaaattgttgcaggtatttaagtcagagacggtaaacgccattggtaactggtatttggaatggggttcagactccgggttctggcttctgacctttggtaagttgcttccgaatgccactttataaagttagaggtattaccttggagggggggacgtagagtaagccataaaatatacgtaaagtttacatcaacataattcttgccctgcatcatgcatttggcaatatgtcacatagctgtcctcataatccccaaagtgccaaaaagggttgtatctgatttgtttgttgctgtttgatattttatcttcttagtgctgttatctctaataaaacatcggttagaaatgcgacttgaaagacatttgataattgaacttgacaagttgggaatatagacaaaactcactgaacagagaaaacgtgcttaagttcaaattggttttcataattatactttctcatataggtgtgttcacagaggtcacaatcctgtactgtataattttggaatagaaatagtaaatgtgtcattcattgtatgctcttgcagggttatgtggtccgaatcagtggtgggaacgacaaacaaggtttccccatgaagcagggtgtcttgacccatggccgtgtccgcctgctactgagtaaggggcattcctgttacagaccaaggagaactggagaaagaaagagaaaatcagttcgtggttgcattgtggatgcaaatctgagcgttctcaacttggttattgtaaaaaaaggtgagggttacttgtgttcaattttcgttgaaattgatttaaagccagttgtccaaatgcttattcatttgcagtatccagacttacagaccaatggatttgtttctctaccatcaattcaacattaaacattctgatttaggattcttaaggaagttgttgaattaaaatctcttcaactgtttcttctaaggagagaaggatattcctggactgactgatactacagtgcctcgccgcctgggccccaaaagagctagcagaatccgcaaacttttcaatctctctaaagaagatgatgtccgccagtatgttgtaagaaagcccttaaataaagaaggtaggagggattatgcaattagggcttgcttaattttggtaatttgtctatcattttgtgtgcatatcagaagataaatatgtgcctttggaaggccttagcactattcacttggagtttttacagaaaatatttgggggtggccagcatacccagttggtgttaatccttgcttattatatccagtgccttgtagagtgcagtaatttcgttgaaaatctgcttgtgaatctttgatgtatacattatccaaaaataacctgactttaaggtcattgctatctggtttaggagtcacatgtttgagaattctgggactattagcaccacacactttgtaattttatatcagatgttctaaattattaatattttttaagagatgaggtc

SEQ ID NO: 48107 - DNA, 1027 bp, Homo sapiens
aactcttcatttgttggaatgtattccctgggtgctaagcacctattaacatctcttttgaaagggacgctgttttaaataacacctcggtctagctaggacaggaaatagcattaaattaaaggtacacacgaatacggtccacaagcaatctaaataaaggtggactcccccaaaagcacatctatactaatgagaatgccaaatgaagcgcgcttagttcaaaggcggagacttcttaagggaagcttcttttattcaggaaacacgatgcccgacgatggcttttgagagacacaaatcattgccaactcacatctgaagacaggctgcttcatgaatatccctcagaattgttagatgtcgggagttttgactttgaatcagttgggggataaatcattgttttccaaattacaatacttatttgtttccatgtttattatctgtctcccccactagaacagaagcacctgagggcaagaagtttggtttgttcactgctgattccaggacctagaacaagtccaagacatacgagacacctctatttatcaaatgaaaatgtgggagcattttgtggaacatgaacctcttttgacatttcatgagaaatggttttgcgtttaagtttggaaaaattgcccagtatatgaccctcttggcaattcatgacgtactaaaatattaaatcttggaaagccacatgttccaccaatagtcaaacttgtttaactttatttaatgcaatatttcccaaacagtatgtaacacaatagtagttatgcaagataataatagctgtttggcatttaaaataatgtttctttatcaaaatagtttttattttattttattgtttttttatgagacggagtctggctcagtcacccaggctggagtgcagtggcgcgatctcggctcactgcaagtaccacctgccgtgttcacgccattctcctgcctcagcctcccaagtagctgggactacaggtgcccgccaccacgcctggctaattttttgttg

SEQ ID NO: 48108 - DNA, 1042 bp, Homo sapiens
ttctgaaagttggagccaatacaagaagaaatgaggtataactattccaaatgacaagacaaaggcatcctttctttttctagataatatttctatttaattgaataccttaaatatttaaaatctccccaaaatattcaggggaatcaagtgaacacaactaaaagtaataaatatgtttttatttttatgttaaagtataacaaagcattcaggtagatacattttcaccaagtgacaacatcttatgtaactagcacccaagtcaaacaacaaaacagttccagtactctagaaggctcccttgagccccctctggtcactatctgttaagggggtgggattgtagacagtttctttcttttcctttttttttttttttttttttgggagttcctgtattttccaaattattaacaattatataatgataaaggaaaatgattttatataggggtgtgtgtgtgtatgtgtttgtacttaagtaaaagtagttttgttatttctcggctggatttttcttatgtctattaagtataatcactgtctattgagtcagtaactaatttttaaaggagtcttgaaatgctatctccccctaactgctcactcacagttaaatattctgttcatgacttgaaagcagacatcagtttaaagggtatgaaaagcaagacaggttctcactgggaatttctaaggcttaatatacctttgacttatcaagttgactgagacagtttaatgctattcatggtatgggaccttgttgctataaatacgaatatttatcacttgattccatatttgatcgcccctccattactctctctttgccttttgatgtttgctgcgtattgcccaaactttctcttcttcactcctctagatcgtgaaccttatagaagaaactggacactttcatatcacaaacacaacatttgattttgatctttgctcgctggacaaaaccacagtccgtaaactacagagttacctggaaacatctggaacatcctgaggatataacaactggatgcat

SEQ ID NO: 48109 - DNA, 1065 bp, Homo sapiens
gagaagaatgtgtgttctaaattccagggcagacatgtagattgtttcgctgtttgaatttttttcttctttttttttttactactttcaaatgacttgacgttagtacttaatctaccccagctgtgtgtgggtttttttttttttttttaacatttaatggctggtggtcacatttatattctgtgtacatttttgcttacatctataaatatatactctcaaacttgccaagtttcctgactggcctgataagctttttaacccttgtagaattttagatttgaacaaaagactacagacctatgattcttaattgcagataagttgcatttcttgcagtttctttttagttagtatgggtaaggaagcaggacttaagtggcctaccatgagtggtggtctagtactttgctaatattcttcttaggcctcttttgaagaaccgaacgttgttttacctgtcattttccaaatatttggggctggcataatgctgattgcagatctattgcatgatctttctcgtctcttcccaaacaccagctctgaaccactgtggagcaattgtccaataaagctattaatgcccaagctgggcccaaatagtgagtctcataggagggtgggacagatgtttgtgcagggttgggacatcttcacaaagaaagccctatcagttagtcaaggatactaggccattgggcagatcttaccttggggtgtcattggcattcgcaatttaatgttgtcctttattttgaccttataagaattgcgaagaaaggtggcttactggagaactccatccaagtggattattttagtattctagagggagagagtaatatctgtgaatttttaacctggcataaaggcactccagggcacacagcatttcaccctaattgcattcccaggccggttgaaagctctcagtctttggccttttgccttgtaatgcagctgaggcttgtgattatgataccatgatgcatgtcctgtcacggtttactgcttaattaattccttttgtaaaacatagcactattgaggactaatgtt

SEQ ID NO: 48110 - DNA, 1029 bp, Homo sapiens
caatttcactggccccaaaataaacccataccctttagctatcaactctcaattctcttatctcccctagccctaggcaatcacaggcaaccagtaatctactttctatctgtacagttgcctgttctagacaattgatatgaatggaatcatataatatgtgatgttttgtgcttggcatctttcacttagtattgtatttccaggacttacttatgttgtaccatgtaccagaacttcattagtttttatgtctgagtaatattccattgtgtggatataccacaatttgcctttctgttcattggctgatggacacttggattgttttcaccttttggctgctgtgaataatgctgccgtgaatggctgaaaacaggtttttgtggattcagtgtttttttacataatatgttactgatgaaacattactttctgatcctactgcagcatttgcagtttctgacattcttgttcatgtaattttctatttctcttcagagcatcttgagaaggctgaaagaattctgatatatgttgagggagatggttgtttttctccccactggaatgtcacgttaggtcagttattaccaatattttcaccacacacaaaaaaacaagataaactatatggtctcacccacattcttattcttggtgacatcactctttttcccaatatgctggcatataactttcgtgagaaactgtcttgaaggatcccatcttttggaatcatggtggtttttttttcctttcttcctgtttattctttgtttttgacaattaccttattattgttttttaatgggagattcttttggagaatagttttgtttttttgagaccgagtctcactctgtcacccaggccatagtgcagtggcacgatctcggctcactgcaagctccgtctcccaggttcactccattctcctgcctcagcctcccgagtagctgggactataggcgcccaccaccacgcctgtctaatttttggtatttttagtagagacggggtttcacc

SEQ ID NO: 48111 - DNA, 1044 bp, Homo sapiens
ggtgatccaccctccttggcctcccaacgtgctgggattacagacatgagccaccacacccggccagaaggcattcttgataagaggaaacaacttggaaaaaaacacaaacaattgatgacaaattgtgtaaatagtttgtgttatcctctctgagaatgaagaagaatctcataaataaattcctgcagttaatttatcaaactggtttactgggaatgaaagaaaccttattgaactctactccctccatggtagacctgtgtgggactcttttattttatatcttcttacttaatctatacaataggtaagatagcttttgttctcatcttacaggtggaagtgacagagcaagaattcgaatccaggtctgaataatgccaaaattcatgcttcttgtattgtaccactgatgattaaaccttgttcagagggaagtcatgtcgaattaaaaccactgtgatattgactaaacacttttgagaaaataaaatttagtactgttaaccttcccatcatctgacatcctctgaccatctggtagtggtgccacattctggtgaaaagggaagagtaagaaataaaatgtagccacagtacttggaaacttgggtgtgagtaatggactctggcatgatttctaaaatgctgattgagtcttgctttatgtaacctaatatcattttctgagaagcagaattgcagaaagtactgaaaagctgtggtaccttagagtctatctgagggaacttttccctaatgttattaggttgtttcatatatctcatttctagggccaaggacatggccagtgttactacgagggctccaacctattgtattgatattatattgtattatctaaaggttgcactcatgcatctccgggtggattatgtcagaaaaaaattataataaaataaataaaggttgcgctcatggaggatctgaggaaggaaggtagggcttccttccttcctcaggaacatagccatacctggccagtcaattatctttgtgggctcaggaggagtggtccag

SEQ ID NO: 48112 - DNA, 1033 bp, Homo sapiens
ggcccaacttcaggggtgactgtgcacattgtcctagttgtgtgtctgcctctgagtaagtgtgattagatgacctgatctctctaaggtcctttccagctttattagttgaatatgagccagattcgtattcatttgtgggacatggggtgatgggtgattttagacataatgggcagagatcatggactttggaaacagaaaaaagacacaaataaatcagaagaatttgaagtataaggaaggctggggaaaatgattatttgtctagtatgtctataaagaaaacatctcgcctcagtataggtcttatagtttaaaaagatgaacattttaaagaaccttttctagaatcaaattctactcaggttttatataaaaatgtcagtagtattaagatgggttaggaagcttagattattaattgatatggtcctttttggtaggattttcatatcctttgtatgtgagaagagagaaagaagttggacatccatggtttgtatgtctggctggtgtttgagggatcgatcacttatttgttgataagtgaaaggtaggtagataggtaattagaattctgctgtctggtgtcagacaggctgtgtcttaaatttcagtgccactagggatcttgggcaaataatttaactttctctgtttcttagtttcctcttttataaaatggagatcataatagtatcttctttgtaggattattgttgaaaatttaataaatcaatgtgggtgaaacgttaacacactaataaaaaaaatgtaagttagctattgctatgtatgacttgacttctgggtacctatataacctgtagctttgaaagagattttttctctttcaaactcaagattttttctcttgcagaactctggtgtcctttttcaaggttgtgggtttatatgctgcaatatttggtactctaagccactttgttttgagttttgtcttttgtcactttgctctgaattttgtcgtcacaaggtgtatggtcttgatgttgatatggttctgcta

SEQ ID NO: 48113 - DNA, 1027 bp, Homo sapiens
tttctgtgcctccagagttttttttatatgaagtgctattttcattgttttcttttgatttatttgtctttaatttatttattttatttatttatttgagacagagtcttgctctattgcccaggctggagtgcagtggcgcaatcttggctcactgaaacctccacctcccaggtttaagtgattttcctgcctcagcctcccaaatagcttggattacaggccctcgccacctggcccggctaatttttgtatttttagtagagacagggtttcaccatgttggctaagctggtcttgaactcctgacctcaagtgatccacctgcctcagcctcccaaagtgctgggattacaggtgtgagccactgtgcctggcctaattttctaattttcttggagtagggtagccaatgtaatctatacaaacattttaaaaggggtgttttaaagcttatgttaccttatgattgatttttatcagtgttctatggatacatataaaacttctgaactttattcaaggatagcattaggagatacacctaatgtaaatgacaagttaatgggtgcagcacaccaacatggcgcatgtatacatatgtaacaaacctgcgcgttgtgcacatgtaccctagaacttcaagtataaaaaaaaacgagatagaaaaattctacgtataattattaaatgagcgtgtgggttgttttggtcaattatactgtgtctgtactcattgtgttttatgaggtctgtcaatttatgacaaagatatattgatttctcatttaactaagtatttttaaatcttcttattaaataccttttgctttatataatttagatttttacattttttatcctatttggtactctcaacgttgaattccacatgatctgatattaatctagcactcatactttcttttgggggcatttagctgatatttctttgcccattccattattttaaacttttttcaatcaattgatttaaagtatttcttgtaacagcctttatctgatc

SEQ ID NO: 48114 - DNA, 1026 bp, Homo sapiens
aatgcgttaatattaatgaaaagtataattttataaattaacacattaaaattctttttttttttctaaataaaaaacagttccagttttagcaatggctcggccagaagtagtacatggaagcctgggtaaaattttgatgccagagggctgtcccaaggtttgttttttctgctacctacagaaatcaaaaggcgattgttttaggaagtgatactcttcaatggttttttatatattttattttaaaaagccaccaagaagaactggggtttcagatgaccaacttttatgatgtagtagtacacactgaaatgaaaatgttcccaccaaatatgggaacagttcttagttactttcctagaagatcattttctgtgtagctagtgttgcttttccagatggactttctgaaatatgaatattttgcccaaggtttaactttaagaaaatgataataattcttggaatacaagtctcaagatttttccatttgtattattttcaataaaaaattaggtctgtttctaggttgaaccttctctgaagatacagtttttctatttcccatcatattagcctggacatctgtgtccactaggctaatcatttgaaacaattctgtatactgagttacattgaaggaacttgggggaagttgctaggagaagcactatcaattttagtgaaagatgtaagcctgagaaattatatttagtatttcctagcaattaataatattacctagttttgggaaacttctgaattttgctggcttatttgttatacgttccttgaagaaatgattgtgaaagcagtcctgttttaacatagctgttatattccctcaagatgaaatgtattgacttaacctcagctacatgggctttgctaactctaatgactaaactccttagaaagctgaaaatgttgtgcgtatgttaaagaaaatttctcctcccccccacccccttgaaagagaagccagggatatactgaatacataagtaaacattccaagttact

SEQ ID NO: 48115 - DNA, 1032 bp, Homo sapiens
tagattgccgaaagatgctcaattaacagattatatgaatttgtagattgtttgtaagcttcaaaacttaagaggtagatatcggtggaacttgatctggattcagctagtcccctttcccttcttttaaaggtcaattaactgctaaagtgatgttttaagaaacagttctctttcaaatgtagacaccgtcttgaaaatttactactcactttcgcattaagccagggcctacttgttaaaggttttagggggtgccttgcactcttcatactgccaattgaatagtaagtgttgatttggaacaaagagaattaattttacatgtttgagaaagattcgtttttaagtgatacccaccccctacttaaatagcaagtgattaactactactttaattttcaattaatcaaattaggtttctactggtagattttgattacatgcagttctaacagcttccagatacacttctctttcccatatgcttgccatatgctgactaaaatgaatgtagaataaattagtgtaaaagtaagaacactaagttcttttgtagagttcatcttgaatgacagaagacagctcagaatcattttagctatgaggcaccttttgaaaagtgatatggaaaaataacctatttatgtgtgccaaggtctgttttcataaatgtaaatttgaaagttcattaaaattttggcatgtgatttggaatgcataataactggaaatgagtcaacgccagaaatctgtatccttatactaacagcatgtttcactgaagactggctttgtatagttgtttaatatttaaaaggttaaaaaaaaaaagcatttacttgacggttatggctctggaattgtattcaggatggagaggctgcagaggaaagggagagccagcagtctaaccagtggtcccaggaagctcatcagccagttctcttgaaaaagcaggggccgggcacggtggctcacgcctgtaatcccagcacttcgggaggctgaggtgggcggatctcctgagct

SEQ ID NO: 48116 - DNA, 1067 bp, Homo sapiens
tgacagctaccctgtgccacagtaatttttatttactatttttatttaaaaatgttatttctgggagaattgctagagcccaggagtttgagttcacctggtaacacaatgagagcccgagagcctgtcattttttttaaaaaaagttatttttcgttagtcaccgttattccttttctctgctttaaaaagtatggaagatgattttgattacagtacatttcatctggtggaaacatttcaatattctattgtactatgcagtagttttatagaagtttttgcagagattgttataccagaactgagataaggatcttaattttgtatcttgatacaaatagtattttaagaagcaaaacacttactttttaaaaatttagaggaattttaggtttacagcaaagccaagcagaaggtacagagatttcctatgtaacccccaaccccacacatgcacagcttcgtccattatcaacatcccctaccagagtggtatattcttgctgttgtatactttatgggttaggataagtgtataatgacatctatccaccattatagaatcacatagagcagtttcactgtccaaaaaatccactgtgctctacctattcatcccttctccctgccacttcccctgacccctgacaaccattgatctctctgtgtgtgtctgtggctttttttttttttgagatgggttctggctctgttgcctaggctggagagcagtggcatgatcttggctcactgtaacctccacctcctgaactcaagcgaacttcccatttcagccttctaagtagctgggactataggcacactccacaatgcctggcaaatttttgtattttttttgtagagatggggtttctccatgttgcccaggctggtcttgaactcctgagctcaagcgattgccctcatcagcctcccaaagtgctgggattacaggcatgagccaccccatccggcccattgatctttttactgtctctataattttgccctatcctaaatgtcatatagttggaatcatacagatgtagtcttttcagactggc

SEQ ID NO: 48117 - DNA, 1048 bp, Homo sapiens
aaacctctggaaaagatatactattctagatgccattatgaacatttgtgattcatgggagggggtcaaaatatcaacatgaacaggattttggaagaatttgatgactttgaggggttgaagacttcagtggaggaaatgactgcagatatggtaggtgtactaaaagaggtagaatttgaagtagaacctgaagatatgactgaatttcggcaatctcatgataaaacttgaacagatgaggagttgcttctaatggatgaacaacaaaagtggtttctttgagatggaagctacttgatagggtttggctctatgtcctcacccaaatctcatgtcaaattgtaattcccacatgtcaggggagggacctggtgggtgttgattggatcatgggggcggatttcccctatgcgggccttatgatagtgagttctcatgagatctgaagttttaaaagtgtggcaggtcctcctttgtgctgtctctcctgctgccatgtgagatgtgccttgcttctctctctgccatgattgtaagtttcctgagtcctcttcaaccatgcagaactgtgagtcagttaaatttcttttctttataaattatccagactcaggtagttcttcattgcagtgcaaaaacagactaacatagaaaattggtactggtagtgtggcactgctgtaaagatacctgaaaatgtggaagtaactttggaacggggtaccaggcagaggttggaacagttcagaggactcagaagaatacaggaagatgttgaagtttgtgagttcctcaagacttattgtatggttttgacaaaaatgttgatagtgatatggacagtgaagtccagacaggtggtctcagatggagaagaggaacttattgggaactggagtaaaggtcactcttgctataatttagcaaaaaggctggtggcattttacccctgccctagagatttgtggaactttgaacttgagagaggtgatttagggtatatggtggaagaaatttctaagcaaagagcattcaagatttgact

SEQ ID NO: 48118 - DNA, 1035 bp, Homo sapiens
gttgtagttaattaattagaaaggaataattaaaattaagattaaaattattgtttcttacagacttaaattctctttccaccgttcattaggcagttattaatttagccacttccgtttgagtatctgcaaagtagttaatttagtttttcaaaagtagtcatttttcaccctcattttattggttaacaaaataataaattacttaagtacaagagcaaatggtcaagaacaaaagcaaaaagccaggtttcggaacaaacaagatgccttgtactaagtatattatgggagaggtacttaatagctatatacatttgctctttggagggtgtcacccatgtattttacagagggaaagtaggtatccttgtcagattgagaggtaagtgaagtcagttaaaagtttaaagtatatataatcagctttgttttgctgaactttgttttattgagagttttgtgcaatttataatattgtttcattgattttctttcttattgcatcttatatggactgttgtaacattctgtgagtatattttgttcatgtcatccatttttggtgttcagtaattttaaaaatgaattttaagtagggacaggagcttgaatatgtaatttggttttatgtaccagaagatccatcagaaactgagtagccaaacttgtaacaacctgtattggtgcatattctgccagactatgaattttcttaagtaatagagaacagaggtctttaaaaaattgtgaactgagatttttttaaaggtgaaatgaaagcagtactgtacaggaaattaagtttttgggtaaggaagtggaattggtttgattgaaattgttaatgtctctttaatgaggggttatatgaaaaatgttaggcagaaagtgtgatccagttaaaaatcctaaatatgaaattgattcagtttgaacaaacagtatttggaactgaacagagaggaaaaggaaaattcttatgtggaagaaactagtcattatcaagggtatgaaaagctgctggaccattac

SEQ ID NO: 48119 - DNA, 1079 bp, Homo sapiens
tgatttgcagttagtccgggcattatcacctaggaacttgttagaaatgcaaattattggacattatcttgaacttactgaatcagagaccctggatgtagtgtccagaacccggcaatctgcattttaacaagccctataggtgattttgattttcaagtttaagaactttgatatgaagtgatttactattctccttaataggagtaaccagtcaccagttcttctatttctatactttctcaaacccaaaaaatgaaaccaaacagcaaaaatgcaacagaattttatttttgagcaagtaacttgatctgtcttgtacctcagtttctcacctgtaagatggaaaaatttatagttttgggttttgatgaggattaaatgcaatagatggtttatgtaatgtgcaaagaacagctcaataattagttactgttaacactgtttttattatgttccagtttttcaaagcctttttggaggtagcaacatgattccattttaccaaggggagacgtatacccaacctggtttggttttagttctcttaaattgcttcagatcttataattcagacatcttttaacttattaaagctttttaacatctactttaaacattaactttatttgcattttctttaacttttctggtcttcattcatttccattttagttttttatttgtattatgtcttagtggtttttaaaatcttcctcgtggctggccacagtggttcatgcctgtaatcccagcactttgggaggctgaggtgggtggattccttgagcttaggagttcgagactagtctgggcaacatggtgaaacccatctttatgaaaaatacagaaaattagccaggcacagtggcatgtgcctatagttccagctatttgtggggccgaggcaggaggatcacttcagccctggaatttgaggttgcagtgagcagtaatttcgccactacactcagcctgggtgaccaagtgagactgtctcaaaaaaaaaaaacaaaacaaaaaaaaacaaacaaaaacaggaacaaaaacaaaacacaacagcgaaaaaaaaaaaaagt

SEQ ID NO: 48120 - DNA, 1030 bp, Homo sapiens
tctccctcaattatagcagtctgtttagtgtttggtattcttgactgtattagaaaggtcttaatatattgttactggttggagcccaatcttctgcatttctaataagcagtcctggtgatcatgctccaagatgaccatgagaccacactgggaaatagaacagtgaaaagagtattttgcgacaccttgccaaagaaaatgtacagatggcaaataagtgatgaaaagatgctcaatatcacgtcattagagaattgcaaattaacaaaaacaatgataccactacataccattagaatggtgaagatttagaatcaagtgctgggaaggatgtggatccacagggactcacattcactgctggtgggagtgcacagtgacacagccacttttgaagatggtttcacggttctttacaaaactaaacacactattactgtacgttgtggactgactgtttttgtgcccctaccaaattcatacgttgaaaccctacccttctacgactgtatttgtagatagagcctttgtggaggttaaagggtgggaccctgatctgatggaattagtgtctttataagaagggacaggatgttgtgtaccataaatatgtacagtttttgtcagttgaaaaataagagactgaaaagaggcctgcctgccccccggttgtttgaggacacggtgagaagttggccatctacaagtcagaaagagagtcctcaccggaaacagaatcagttggcccctttattttggactttccagcctccaaaactgtgagaaacaaattactaagccaccaagtttatggtattttgttaaggcaacctgaacagattaatgcatcatgtgattcagaaatcatgctccaaagtatttactcaaatgagttgaaaacttatgtccacacagaaacctgcccatgaatgtttataacagctttatttataactgcccaaaatttgaagcaatcaagatgtccttcaataggtaaatggaggagctggtgcatccacacaatgga

SEQ ID NO: 48121 - DNA, 1178 bp, Homo sapiens
agatggtttttaacatatctgtttataagttcattttgtgggccaggctgagtcgttctgtggctgcatttgctgaatacacctctgagaatgccccctacagtcgagtcatattttgttaaaaatgcttcctccacactatctgagacctattgactgggaaccttttcagagtgaaatctgggaatgtgaatttttaaatgcacccccagtgcccaaattgcagcacctctgctgtacagtagtggcaggaacttactcttcttcctaagtgtcaggcccccagtaaactagaaaaaaacatactaaataaattggagagaacaataaaactagattcaaaaaataggtccaataaattcagaatgccactaggtatatactaaaattgatttgggattgtgggttaatgtgactaaatgtcccttgtgttctttttaaaaactgtcaaggctaggtacagtgggtcacaactttaatcccagcactttgggaggttgacgtggaaggattgcctgaggccagtagttcaagaccagactaggcaatgtaggaagaccccatctctacagtcaaataataaaaaaaaaaaaattagctaagtatggtgatgcatgtccatcatccatcccaactactcaggaggctgaggtcagaggattgcttgagcccaggaattcgaggctgcagtgcatgatgatcaggccactgcactcaagcctggataacagagcaagacaatgccactaaggaaaaaaaagaagacggcaattgtattagttcattttcacactgctatgaagaactgcctgagactgggtaatttataaagaaaagaggtttaattgactcagagctccacatggctggagaggcctcaggaaacttacaatcatggcagaaggggaagcaggcatgtcttacatggtggcaggcaggtgagagagtgacagagagagagacagacagacaatgaacacgagagaatgaacaagtgaagcgccacactttaaaatcataaattcccgtgagaactcactatcatgagaacagcgtgggggaaactgcccccatggtctaatcacctccgactggggccctgcctccgcatgtggagattcatagggattacaattcaagatgacataggggacacatgcaacccatatcagcagtaa

SEQ ID NO: 48122 - DNA, 1031 bp, Homo sapiens
atctcagataagactttcttgatgctaagcccaacaacgggtttctgccctcaaatatctataagtttgtgtacattcctctcctctcgaggtcccaggataacttggggtttctgggcctgtcagaaagtgaacacacccattaatttttaaatgttgagatctgaggagagaggaggtggttccaagggaagaaacggatttgagtcagacgtttatggccatttaaatttacaatattgaagcccttgtttttttattttaaatatgcttgtggcttctgaagagtcatgctatctcagaagaaatttctgctatagtaaatttagctacagtacagaaaaatttgagcttttattaagttctgggcatggtcatcaaaaatgccataataatacttaacagctttggtagcaagtgttggaatgtcactatataaactccacctgcccttgccttctctttcattgcttctttagttttatcagtggggatggatgagaaaggaacttgtctgaaattttgttgctcataggaagtggcttaaaattcccaggatagttttggaactgattcttgatcttggaatgttggaatagacctcctggtaatcgtatggctgaagtgcacctgcattctaggagggatctggttagacctgagtgtgtttttctctttgcttgtgagtatttatttaggactttttcaaagtttttgaagtaatgattactttaagttataaaaattatagccagttataatgttatgtgccaaattatgtgccccctacccatgcaccacaaattcgtatgttgaagttctaagaatgactatttggaggtagaatccttaaagaagtaattaaggtaaaatgaggtcattggggtaggacctaatctaatatgacttgtgtccttataagaagagaagattaggacagacacaccaagaaaagaccatgtgaaggcacagagaaaggatagccatctgtaagccaaggagaagcctcagaagaaatcagccctgctgat

SEQ ID NO: 48123 - DNA, 1113 bp, Homo sapiens
tcaggctggagtgcagtggtatgtatgaagacgattcactgctgcctcagtctcctgggatcaagcgatcctcctgtctcagcctcttgtgtagctggatccacaggcacacacctccatgcctggctaattttttcttttcttcttctttttgtagagatggagatctcactttgttgcctaggctggtcttgaactccttggctcaaatagtcctcccgaattggcctctcaaagtgctgggatgacagttgtgagccacggcaccctgcaacccccatgcccagtaattttttttttaagtgaaagtaagtttattagagaagtaaagaaacaaaagaatggctactccataggcagagcagcagtatgagctgctgtttggacatttttatggttatttcttgattatatgctaaacaaggggtggattattcatgagttttatgggaaggggctgggcaattcctggaactgagggttcctctcctttttggaccatacaggggaacttcctgacattgctgtggcatttgtaaactatcttggcattggtgggagtgtcttttaccatgctaatgcgttataattagcatatagtgagcagtgaggatgaccaaaggtcactttcatcgccttcttggttttggtgggttttggcgggttttggctgacttctttacctcagtctgttttgtaagcagggtctttatgacctatgtcttgtgccaaccttttgtcttatcctgtgactaagactgccttaatcttctgggaatgtagcccagtaattctcagccttattttacccagcccctattcaacatggacttgctctggttcaaacacctctgacatattgcccccctcccttttataagagaacccttaatcctaagggttgaagagggatgaagatccatcttctgtaacttcttcaggctgaatagaggtgataatattcctgcctattagggtctcttgtattcagggtagagaggagctcagtcagaaagcattagtatgtcgaggagcactcataactcttgagttccaacgaaaggtgatatctagaagattaataaatgtttaatttaagagaacattggttgg

SEQ ID NO: 48124 - DNA, 1880 bp, Homo sapiens
tatcatctttaccctttaccacaaatacttcattaatatgaataatgaaagctaaataattacgaccttttttatattgaagaaacattcttctatttcacatagtattttccttcattttacttatttctctgtttctctataataagcagctgttttatagagtcaatgaaacatgggggatttgggctgttgagatttagttgcattgagtggaacacgttatttgaaaatgttgacccagttcaagattgtctgatgcttgttgtatgactttttctctgtatgcacagaaatagtaactagtgggctggaagctaacttccctcattttatggagcaccaaagcagcacgtgttatgtgttacatgctttcattagaccaacactcccttctctttgtatatgttatctctttttcctcctgtgttgcattagagttacacatcagaaaggatgggacctatgttatcactgtagatactacttatagctccatcaatgtaatgtcttgaccctggaattttttggcaaccgtataaaggcaggtattgcaagtcagaaaaagggttttagaatccctggctttactttccactcctgtaagttataaattattactcagatttctgaaactcatttcttctgcacctctaataattgactttgtgtaaacagaaccaccacttgaatttagcaggaaacattgtgtctgctgagaatcacattttctagaatgtgttctagcatttgtaataggcaaaaatgaatttttctcttttctcttttttcccttattctttcttcacttactttggatgcttaaaaagaaaagctagacacaaacttgaaggacttggccagctctatcatttttttactacctaatccatgaaatacaaccagccttttagctttaaaaataagagtctaatgtaattccagtaactggtaggagcagtatttagcagtgtggcaggaaaggccctggcctgggaggtagaaaggatgtgtttggactgaataagctgtgtgggcttttgcagctctgaaaatactgtttttcctttagttttaaaaaggataaattctgcaattgtcattgatctagtgtttttataacaatgaaataataactaccctttattaaatagctatattggttatcatgctagacaatagacatgtggagtatttaatttctgactcttcctaagtagtagttcggagaatgatattcttgagaaaataaaataccaatatatgaacatcagtgtattggaattttatcctttcttatggtgaatggacagtgaaatgggtgaaagacttgctgcagtaatagggaagtagaagataacatgagtaattcaccaaataagggattaagttacacttgtaaaagttaatttctgatcatatcggtgccattcacctcaaccatcaactattacttgtagattggagcatttcaagaactcagaagaccacccagtgttgataggaaacttcttcctcaattatggctcttgaccatgccattagatcgttgggtttttcatgcttttttgtcttttacataaaatagaccttgaaattgtgtcacttaatttgcttttctgaagtatcacttaccagatattacttgtgtttttattatcaatagagtaataattgaggactgcccatgtaagctaattgagggctgtctgtattatcatgtgaacagattagaagaaagtatatgaaatttttgatcatccaacatacttgcatacatacatataagaataaatagggttttctatttaataattcaaatgctgaattgaagttgttttgaaaagcaagtacttttctactcttcagttgtaacatgc

SEQ ID NO: 48125 - DNA, 1035 bp, Homo sapiens
tgcctcatttttttcttttatcttgatttatggtatctttttgccatatgcaagcttttaattttgtcaaactgatgtgctttattttgttttgttttcctctctgggcttagggtcttatttaagaatttagttcgtggccatagtaatgtgcttaaccaaaaggcaatatatatgtaggatacagtgaaagactgagggagatacaaataagagtaagaggaggtccctgccttcagtgtgctgtgtctttttagagctggaaaggacacttgagattcttcatcttcgattaccctttcattttacttttaatcagaagcctagaaatgtggagcaatcttgcatgtagacacaatgagtcacaagtatgcctgtgcaaagataactagtaataaatggtggtcaatgtttacttttaaaacattgagtaataattcacttatattagcagacaaatgttcagcaatagctgcttttgtagacatgatctaggatttaattaagtggtggtaaccatggtagatgctgtttaaaaggaaaaagttctatagctactttcagacaaaatcaaattctctatatgaattaaagttttcctttgagattaaatcattagaaaaaattgttgctgggtggtagttatctcctgatattttgtccccaattcacccagtggtaagaattgcaattacatgaaggatgcagggtgttgttttaagaagtaatgttgcatgacttaatccttttgacttaagtgtggtaagtttgcagtggttgacgactgaagaaggctattacgatagaatttctaaaaagataaggccagcatttgggtgtgatttagttggtatgtagcagttaacaattaactttttggataaaatcaagtcaccattttttttattaaagaaaattatggcttatctttaaaatagtgttcattagtgattataaatataattagttacctttaattagttacacatattagaaggttgatattctcaaagccaagttaatttttttctattt

SEQ ID NO: 48126 - DNA, 1083 bp, Homo sapiens
gcctcgatctcccaaattgctgagattacaggcatgagccattgtgcccggcctatcactgtccattctgtgatgcattacctgaattatgcagaagtcttttatattcattattgtaggtgcccctctgtagaactacctatctttatgaagtaggccaggcagggatatcacttggtttgataattttgccttaaaggtcctttgttccttctcttggttctttgaagtttctttctcatgggtcttccatggaccaaccttggcccctttcttgcctttctagtcatttattacaggtaatccccactacataacatcacttttacagttctaagatatagaacttttcttgttttgaatcttcaaaagagatgtcatagaagctgggaaattacatggcacaattttgtggtgtagcttttatgaagaaccttgttcatttttttaaacaaatgaaatgttttttttttctaatttgtagatatttgttcattgtagaaaagtcaaaccatggacgagttatctgaaattttcatatataactatagttaatatttgttagacatctttatatatatacacatacacatcaatattaactattaacattcattcattcaacaagtgtgtgcttttttttagctcctactatgtgcgtgcctgcctacctccctccctccctccctccctcctttccttccttccttctttcattttgggacagggtttccctcttgtcacccaggctggagtgcagtggcatgatcttggctcactgcaacttctgcctcccgggttcaactaattctcctgcctcagcctcccgagtagctgggattataggcatgcgccaccacgcccggctaattttgtatttttagtagagacagggtttcaccatgttggccaggctggtctcaaactcctgacctcaggtgatcctcccgccttggccttccaaagtgctgagattacaggcatgaggcaccgcgcccggccctagcacccttcttagagctggagataaagcacagaggaacattcctacccttgtggcatatcatcttttaaaattgttgg

SEQ ID NO: 48127 - DNA, 1048 bp, Homo sapiens
tcccagcgctgcgcaccacggccgcagcaaggcgccagaatgggttttcctgatgcccaggatttgggaaccgcgggtttgagtttcggggcgtcccgcagccccagggaaacgtcgtcgcggcttatcgcgccaactttgtgcagcttcgacctgagtaaaaaaatctcttttgctgctcaggaggcagctccgccgtggtctcccttgagacatcttcctcaggtagccagcagggcaccttttattttcgggattttcccctgggtttggggcttttatttcccatagagacttcagcgagacttgtttttacagagggacccgttgattccgggacttgagggctcgagatcgcacgggtttaatcttggggattccgtttgtgtgggggcgcagggcggggacgtcttggggaaggggacacgctggaccctggggcgagcggacgggtcctgggagcgcccggggctggggacgccgcgcaccgggccaggagcagagaggcgcccgtgcctgccccagggtgtgccaggagctaagctttcagcttcagacgccagtgtcgctgaaaccataattcaggtatgttaaaactcaacagcattattttaaatactttataccaaaacaagaatgttgtgatcttacttccctagctttaaaggaagcaaactcagcaatgctttcaagatccctactttgttttatctgggagaagtgccatgtctgacatttccagtgactcagtgacactgagataattttatttaactttggtttactgaaagcccttcctcaagaccccaccttgacttgtgttgctgaaaagagaaatgagcagtgttgcctacaaagagtagaggagcaggtcagaactttttattttctagggtaagaattttatagcctgagtggagtttgccataatttgttacactggcccctctcctttgtaagaccctcagggtcatcttacatttcctgcctttacttaattaaaattttgatatttgcctcatcatggatgtttaggcattaatttcca

SEQ ID NO: 48128 - DNA, 1042 bp, Homo sapiens
gggaacaatacacctggtctgagtaatgtattgctgatcatacattatcagaccactagataccattaatttgtgatatcttaccaacagcaaagtttatcccaggctctaagtaattgatattatgctgccatcctttggttgaatttaaaatgcctcgtttactaactggaactgtttttgtgtgttttaaacagagggtatcacaattttaattacattttttagattgacagtaatgataaataatttatggagacaagtgaataaataaaacttgatacttatgtaataaatttaaaagtcattgaaaagcccattctagctaaagatgaactaccagtcgtttgtttaatttattttagagacttcgtcatactgactgatacttaagatttagcccttttttcatcatcatgacactttccattgtctttctctaagcaatgtaagcatgcagtgaatttccttaataccatccttagattcagacaagagtgacctatgctctactctaggtcttgcccttttgagaaacctgaatatcagacatgattcaatttatacaacacatgtgtatgcacacacggaagtgcacatacacacacatgcatagacacacacaacattttaaaaaagcatctagtacccacatcacttaggatctggtactcagtgctcacatatggcccaataactctaaatatacatgctcattagtaattccatttggtacccagggagatatttctccacatctcttgctttcagtcccctacaaaaaattgactgtacctgatgccatgaaggagacgttgccttggaatgtaggggatttgagctgcagaggaaagagaagacacattaattgcctagtaaacccttcctcaaggacagcaggaacgcaatagattcttacaaaatgaaataccatgtctcaatagtccccagtgtccattctcttgcttgtctttacgtaacaattagtgattcagctgtttggtggtctcttcacacggacgcgcatgaaatttggtgcctt

SEQ ID NO: 48129 - DNA, 1071 bp, Homo sapiens
ttcacagtgccttatccattcgttatattaatggtaatttgttgcagggtcaattggccaggacatacagtttattacaagaactggtttatttattttacctataacttagttttaaaaacttgtttcatcagtttatttgggcttcttttgccttttgcagagttccatgtaccctcatctacatcagttacagacatatccagtgcccccttgacctcaatgtagttgatgagctgggttccatgtgtggaaatgaacattgcttgccaagcgccatcctccatagctgaaacgtgttttactctaattactaaacacctgaagcttcttttttgattcgaagtgaacaatgtttgtggggagaaacccaaacccctaaaacttcagatttaggaacatcagtgtaagagactaaaataataattaatattctgaagtgtccaataacttcttgaagtcagtggtttttaaacttcattgttgtattatcacctagagagcttgtttaaaaatgcagattcccaaaccattccctagacattctatttaatgcatcttgactgagacttcaaatcttcatttttaataagcatcctcctattgattctgatccagcttgacaactgtgctttgaggccgggtgtggtggctcacgcctgtaatcccagcactttgggaggctgaggcaggtggatcacctgaggtcaggagttcgagaccagccaggccaacacagtgaaaccccgtctctactaaaaatagaaaaattagccaggtgcaatggcacgcgcctgtaatcccagctacttgggaggctgaggcaggagaattgcttgagccagtgaggtggaggttgcggtgagctgagatcacgccactgtactctagcgtgggtgacagagcgagactccatctcaagaatatgtatatatatatgtatacatattctctagaatatatatatgtgtgtgtgtgtatatatatactgtcctaagtcttatacaattcccagtatagaacttggtcgtggtcttaaatgcagcctgctttccgactgtatctgtgctt

SEQ ID NO: 48130 - DNA, 1051 bp, Homo sapiens
tctgaacaaaagaatattctaaagcagtttgaaaagaggaagccattgtctctttttgtgtctggaaatgaaaaacagggactacatttaaattcatctgaaacataaggtttcgaaagaaaaaaagacaaacaagtttgtcatcagaaatagagttagtggaacctatggaattctagaaaatgacactagtttatgcatagtcatgtatgagagtgaacaatgaggaaatgagcagatgttgcttatcagttaccacggcctgttcaatctaagcagtacctgggttaagagggttgctgaggacagaagagtcttagcatacaccttggtttctccctccctgaccccaagattacagatgccatgcagagtcatgaaatgggtatggactttaatggattaaaagaaaggataacctatatgtacactggctattcttccagagtaaaagattccagttatacaatttaaaatatcttaaggttgtaatatgaagaaatcgtgccctggacaatacgaggcatactcatttcactttgtatcccagaaaagtacatctctgtcatgcatggaggattcaggccaaacttttaccagtgcactcagggaggaagagtatagtgaatgacaaatagtacacataccctgcagtttaaataccttcctggcccctgtcaatgatggctgaacaataaggtggtataaaacacttacttggaaacccaaacgaaaagataaatgtttatatttcatttttaaattttattttgtattttgctgttgtgcatttgacttatcaaaaatggcaataactgagatgactctgctcccattggtctttgtttaaactgtcagcactcacgggatgtctgatatatgtgcattttcctccccaaatagagttttagttccttgaggtagcaatcctttcttgccgtattctgtgctgattttatttagcacctaaaagataattgaggagataatactggtctacactttaggtagttgagatttttaaaaaattgcaccatattgttctttgcta

SEQ ID NO: 48131 - DNA, 1069 bp, Homo sapiens
ttttggtaagagtctagatgaaggggaaaaatcgattgtatatatgtgtgctggtttgcagtatggaggggagtaaaaagagtctgagaacaaaacttactttcggacttcctagaagtttctgctttattatgtaattgaatttttttgtcaggatgtagttattggttgtactaaaatacagcagacaacagaaaaaataaatctcatttgaaaatccttaatcatggctttatcgaatacacagcttactctattttgtctaaataccagcttccaagctgtcagcattaatttagaagccaatttctaaattaaatgtgttattaagtaatttccatttaagagcaatgtccaaatagcactgattctttaagtaaaataataattatattaataaaaattatacttttgggcaaatggcaggggaaaaatgccatttttattggccttggaaacatttatgctaagcagtttgtggcccagtttccatttctgtgattgtgctgcctctgacaaaggatcgactactgagcggtgaaagattgtatagggaaaattaataaaacctgctacgtgggttgatcatagttctgcctgataagcctgagtccatatgaatctgagccagttaagaagttctgagtcttaattccccacagctctttcacattgattcctgtgagttagcagtagtgaaggagtccccttctctgccatttgcaaagccaacttcatgatccgcagcaaatcaaacccacgaaatgttttggtcttgtccaattcagctttacttccttgccaggggcataacagttgaagttaaaagacttagacccaaatgggaaaattagtgccatttgtgtataggcagtagccttgttcatactactttcaacctaattagaaagaaataaagtatgatttgattgtaagtccgccagggtaggtagcatataggggagtgtggctcaagaatctaagtttttcacttattttgaattattaagagtttgcgttatagttctcttttttgttttacttctatagagtgcttctacaatttgga

SEQ ID NO: 48132 - DNA, 1044 bp, Homo sapiens
ggcatgcgtagggaagctacgggattccgccgaggagcgccagagcctgaggcgccctttggttatcgcaagctggctggctcactccgcaccaggtgcaaaagatgcctggggatgcgggaagggaaaggccacatcttcacgccttcgcgcctggcattgtgagcaaccactgagactcattatataacactcgttttcttcttgcaaccctgcgggccgcgcggtcgcgctttctctgccctccgccgggtggacctggagcgcttgagcggtcggcgcgcctggagcagccaggcgggcagtggactagctgctggaccagggaggtgtgggagagcggtggcggcgggtacatgcacgtgaagccattgcgagaactttatccataagtatttcaatgccggtagggacggcaagagaggagggcgggatgtgccacacatctttgacctcaggtttctaacgcctgttttctttctgccctctgcagacatccccgattgaaagaaccagagaggctctgagaaacctcgggaaacttagatcatcagtcaccgaaggtcctacagggccacaactgcccccgccacaacccaccccgctttcgtagttttcatttagaaaatagagcttttaaaaatgtcctgccttttaacgtagatatatgccttcccccactaccgtaaatgtccatttatatcattttttatatattcttataaaaatgtaaaaaagaaaaacaccgcttctgccttttcactgtgttggagttttctggagtgagcactcacgccctaagcgcacattcatgtgggcatttcttgcgagcctcgcagcctccggaagctgtcgacttcatgacaagcattttgtgaactagggaagctcaggggggttactggcttctcttgagtcacactgctagcaaatggcagaaccaaagctcaaataaaaataaaataattttcattcattcactcatttattgtcaacatttattgagcacctattacaacaatttcatcgcatggaagacagcat

SEQ ID NO: 48133 - DNA, 1022 bp, Homo sapiens
gatatattatcaaatgggtttaagcatcctacacattttaattcaattgattcattttctttttgctttggatttctatcatgatttaaatatttacatatgggttactttttagatttttcatactatgaaatataagaaaaacctttaaggctagttttatgaccaagacgaaggacttcattgaatacacaaaacaataaatatactgcaacattttgtctttctttttgtagctgcaatttggtttgcttatactttctctttgtctctttgaaaactgagtcagtttcactttctcaggacaggatttaataaccataatataatttagtataattccttgatttaggcaaattatgcaatttgtgtttagtatgaaatgtacctaaaaataagtaactcctctttaacaccaccatcctcaaactaatataacaaataacagttatcctaaaataaattgtctacttccaccatgcagcactcaaattttaaggttgctatgactgcagacagtattttaaaattcctctctggaaatggctttgtttccaagatgatttaggaaccaaagaggtgaccatctcttgtttaatgaactctcaaatcataaacctgggaagtgttttagtttcctactgctgctgttacaaattatcacaaatgtgttagctaaaacaaacacaaaattattattttacagttctagagatcagaagtcaaaaatgggtccacaaggtttcattccttttggaaactctaaggggcaatctgtttccttgtcttttccagcttctagtgaccatcaaattccttggctcatggtctctgtattttctctgtggcctgtgcttccattcttgtatcttctctctgactgtgaccctctaataaaaacacttggggttatgttgggcccaccctgaaaattctggataatctccctcaagaccattaattaaatcacatctgcaaagcctcttttgccacataagttaatgtattaaaagtttttgagg

SEQ ID NO: 48134 - DNA, 1024 bp, Homo sapiens
aacttctatgcctttgcacatcctcttacctctgcctagaatatctttctccttcttttccatctttaaactctcacatcattcttcaagactgggatcagctctcagcatccggaagcctttgcctactagagacaaatgagaatgagtttggtcaccttttcattttcttgtatcattctgtgctttattttgctcttctaagagcgttacatgcttcatttaatccctaaacaactgtttgaggcaagtacagttattatcctaatcatgcaaatgagaaaacagaggcccagacatgttgagtaactttgataaaagttaaagaaccaataagtggaacagttgaggtttgaaccctggcagtctgactgtagagatactatgtttgacctactcccctctgcccccaccccatgtctgcccttagtttctgagcttgttgaatgaatgaacaggtggtagtctttttttgttataagactgatcagaattaagacaggtttaaatttcacgtgtagaattttcaaaactgcaaaggcagtgcaaatctaaaaaaagaatggcattctcaggaaagaggaaaagtaagtgtgagaataataataacaataaccaacaaactttagtaaatttagtaaatgtagtaaatttttacattaaaagcttttggacatacattatcatattttatggccacatgaaatatattataatcccattttgcacataggaaatctgagactggcataaggagcacagagatccaggactttatattttcattcttctaggattttgcacctcaggtcgatatgtatgagtaaactgggagtataatgggctctttaacagaaaaactaggaaagttttcccactattattaattatttacataatatttttttaattttattattatttatactttaagttttagagtacatgtgcacaatgtgcaggtttgttacatatgtatacatgtgccatgttggtgtgctgcacccatcaactcatcatttag

SEQ ID NO: 48135 - DNA, 1141 bp, Homo sapiens
atggacatagtacaaaattcaaacaatataaatcatggaatgtgaaaagtaagtcacatgcccatcccagttcttcatttccttacctcacaggtaacagcttttcctgtatctccccagagatattctatgtatattttgtttttaacaccaagctatatttaaaacaattatctttaataataatgttaatattgaaactggtaaagaaatatgtgtgtattatctcacctcaagcgtaaacaatagaacaagagagagcccattttgaaaattatggacaatgaatctagaaataatctcaaaagattttgcagtcaaaaaatagttcattagatacatgagaactgtcacttggtctcagtgtagagctattgcctcaactccctttattttcctaacaaaatcatcttgcttatcccatgaaatacgtgcatattgccaatcctacaatgccgcatcagaaccagaacccaactctggaacactaccttctcaagtatctttctgtctctttatggtaatatgttgaattaatattcacatctattatgactagtctttgatttgtagggttgctgaagtagtagcaccactgcagggctttctttagtttaaagaaagtaatcaggtgtccctactgtgtcatgatctccaccctcagctgggttctccagtctggttttaaagaacaaaacaaaaggcttctctgtctgagtcttactcaacccatcctctctactcataagaggtattccaaacctttacgattctcaaacttcctaaccgaccatcttattttcactctgcaaacaagctaacctcctcattcatagaaggaagtgcctcaacttcctccccgttctgaccttttctccctcccaaatctatgtatctcttgtgacaaaatctataaccaccgctgtactttgagttctatttcttcattatttttgagggacctcaagtcctcaaaaatatcctatcttgcctgtgtacttaacttttcttttattcttttctaactttcccttctcttcacttggcacttgcccttccaggtatatgtgtgctcaggtctcctccaccttccatctgcctcacttcatggcatagggccttgaactatcacaaccaagct

SEQ ID NO: 48136 - DNA, 1057 bp, Homo sapiens
caccatgctttattgcaacaactagttacattgtctaggcccaagaaaccctcaccgctcccactccattcctccagtatctttaaatgacactatgctggcatccgacatcgtttttcttccaggatgaactaaccctttctaaagcgcccttcctctgtgggacagaaaacctaatgcccccctacagaggcggaggccggctgaaggtggtggtaggaggggaatgctgggggcgtggcataggtgcagaggaagacccataaaaggatctggttcccatagagctgacattctacacaacaaacaagtaaacaagtacataagtaaaataatctcttcgtcctaagtgctataaagaaaaaaatcacggtggtatgagggtgcctgaaaagggaagcatttctgaggaagggctacttacttcagaagagacctgaaggaaaaagagctatatttgcgaagagggagaaagagcagccatactagacagaaaggtggcatgtggccccagcacaaagcacggtgttgggtaaattctgagtgaaatctacctaccggggaggtgcatttgtaaatatctagatagatatttagagtggctacgtaagagtgatcgctaaatctcactttttccaaagggccccgttttgtcttgggtttgtaccgaggtccggcagcaacgtcaagtgatggggcgggggatggggaaagagaagtctgccgctcctctaggctaccgcaccgccttaagtgggtggctcggccagtgcaggcctcactttcctcccctgtaaggtctggggggcttgacgtctgatctgtaaggccctgtcggctcacgctgtggttccacttcttcaactaggccactaggcccaagcgcatgaacaggaagccactgagaagcgggccacatttccaggttcccggagctgggcctagtcccgaatcctctggcacacacccacccactcaggccgcgggtccagcccgcgaggtttaggacggatccaggcagaccgcaggctccgggtcggggcaccgggtcagcgcg

SEQ ID NO: 48137 - DNA, 1052 bp, Homo sapiens
atgtatacataaatacaattatttgttaattaaaaattaaattttaaaaagcatatattaaaaataacattttaaagataagtaaatattaaaaagagggttgaagggtaatatcattggccatagccaccatatgcagacatggaatgagcagtcgtccatggactacagggagaataggaaggcctaaaagaaacagtcatgaaaggcaaaggaataatcactgtgactctgagatgatgtgggcaggcagaaagaaagcaggggaggctgggagcaatgaactctcccataaataccagttaaaaaatattggtagcagagaggtctgaagttaatatggaacaccagcactaattggaaataactgagggactgttataattatttaaatcctagtttggtcttgtggggggtggtggtagatttgctttattagtcagcttagaatgtgttatcccatggtaacaaacagccccatatctcagtggcttatggcaacgcaagataactttcttacctgtattttggctacggcaggttagctcgaatctgcttcacatctttttgctgtccaggctcaagaagcatctcctatccagagcatgcctgtctcagggtggaggaaaaaaaaaattgatggaagcacatgataagtctcaaggtttttgttgggagttgtacgtgtccctttcgctcatattttatttttatttcatgagtcaaagtacgtcacatcattaagcctgatgtctatggggacaaaaattatactcctcccataaaaagaggcaccaggaaagggtcactaagaaggggcagtggatatttttgaataaatagtgtaatcagccacagttgcattttttctatttatattacacagatatgaaaaatcatcatagaaaatacagaaaagcacatggcaagtatttccaatcacccccaaaatttctctcactagaaataactcctgctattagtatgttgatgtaaatatcttcagacatttttccctgggtaatgtttataacagaatcaaatgatatgta

SEQ ID NO: 48138 - DNA, 1033 bp, Homo sapiens
caccttctgaatccttccctgttggtctaaaatctgttgtagtgcctgtatcatggttagtgggtcacacttctgacacgttgaccacatatgtcttgattatttgtgcctgtttttctcattatacctagtagtttctcaataaaagcatgcacagatgtttattagaattaaaccacccaggattaaatctgtcctgtttacttcttggcactgttacctggaacaacttaatttacatctttgagcctcaacttgctcatttgtaaaatgaacatgataaaacctaccttagaaatttgttgtgaaggggtagataatgatgcatatccagtacttagtgtcatgtttggcacatgacagatgccattattgagagttattataatagcaatgtgtggatattgggttacaaggagcccttcccataagaatttctcataaatcacaaaggacacctatactaatggatgtcccagagtgtatggatgaggggacatggaaatgatacattctaatgatttttctctacttctggaggtgctggcagatacctaaatcatatcaacaagaagtttatggaaaagagaactacaatcatcataaacccaatcatgttttacttggtgttgaaggacattaaaaaatacctcccaccttaatttactaaattatcaaacaaatcctgttccccgatctcagaagaccacctggctcagtatcacaaagcaccctgatttctccctcatcttgagatgtcaggatccctcagaaaacttcgtagaggtgccctagtaagtaatatgcctccaaaaggagcaagtctgatagtgaatgaattcatgtgtatttgcttcacttaaagactgtttagctctacttatttctcacatttatgctgaatctttaaaaaaaaaaaaaaaaaaaaaaagacgaggtcttgctctgtcatccaagctggggtgctgggttgcagtggcatgatcatagctcattgcagccttgaactcctgggtgctcaagcaatcctcct

SEQ ID NO: 48139 - DNA, 1069 bp, Homo sapiens
ttcgagggtgtgtcagggttgaaaataatgcctaaattataaaacagtgactccaggaaaagtagggaaaaggaattactatgtttcaaaagaaagtgcaagtgtacacactcagtaaactttgttgtgtgttgtttctgttctccttggataagaacatcttgtaagtgtgaatgtttcttatataaagttagtgatataaacagttaattataacgtcttccatcttggacaatatataaactggtcctgtgtctgaagtgtgtgtgtgtgtgtgtgtgtctctctctctctgtgtgtgtgtgtgtgtgtgtgtatcagaaaaatcagacgaatgtaaagaaacgttgaaatgtctgatgttctatttcttaagagaccaggtgagtggtatttagcgtacacttataaatacaagacttcataactttcctctttttgatggtaatattatggtgttaatagccaaaaggtaacctgacctgcttgaatttactattagtagtagaatatcctctacttagagttgatagcttgactaatgccacttattcaccaaaagccaaatcctaagagacatacaacaatatcaggaggttacatgcatgtggagttcttgggtgtacttgggcagatatttctctgacttagtatcagactcttatataaaactgtcttgtcattattgctttcctttgctgaatgtagaccatgacctgattactaattttcgtaattctgaaagatacatattccctaatggaataaggggttaggggttagggtttagcttctttcatcgtcacagaataagatggaaagatgagttatctgtttctaggtaagtgagtgaaaaagacgaaagcatgtatcctgactaaagcatggtcagagtcagactttttggagtagaacccagattatttcccttttgtcttgcggtatgtgagcctctaacaggtaagaaagcttgcaagctttaatggaacccagttcagattaaaatctttgattaaaatctttatttttctgtcttcagagacaaaacatttgttcttttggtggcaag

SEQ ID NO: 48140 - DNA, 1058 bp, Homo sapiens
cacacgtacaaccacttctaggccaagcagcacaccagggcttatgtgtgggaagctctgatttaaatagtttacttttttaaaatttcctttctttcactaagtgtacatcaagcatctacgctgtaccagtcactatgctgtaagatttaggctgaagacttaatctatgttctatttctcagtctggttttgagttggaagacacttcagtggtcttgttcagcacaccttattttgcagatgtatgagccagacccagagagattaaggttctccaagattttttgctaacctgagacctggcactgaaacccagccctcccccactcttggagctctgtccttcctaccatcaaagtactaaaacacaagctgaattaactttaataagctgtgtccttttaggaggtcagatttttgaaatccttcaggatatgtatggcatctagaagttgaacataggtaagtgcatatagtattttttgatgtgctcaatatcgtttacctcccttaagaataatttcagtcaataatagtatagtcactgtcgaaaatgcataaagtacaaaaaaattcaggtcaaaatttactcagtcctttcatggaaagaaaacattttttagtacattttgtcgctgcctctttatttttaatcctttctacaacatttttaaacgttcagatttgcttttttctttaataaagtttttttgcttttttaattgtgttctatgcgtatatgaataatattttttgagataaaataacgtatttctgatttttaagacatgtcaaagctgttgtctgttttttgttacattgattgttgctgacattatgtcagggaggtgtaaaaatcaggagttctatgtggtttcctattacaactgtatttctccaggctttttttttttttttttgagacggagtcccgccctatcgcccaggctggaaggctggagtgcagtggcaccatctctgctcactgcaacctccgcctcctgggttcaagagattgttctgccttagcctcttgaatagctgggattacaggc

SEQ ID NO: 48141 - DNA, 1047 bp, Homo sapiens
cttgaatacttttcctctttcttagaggacagatgataccatctaattgaataaggcagtaaggcagtaagaagatgatcttgttgtagataatttccaagcagttctcggttggcgctttggagagattttgataatcattatttgtgggattccgagtatattttcttacccatcaataacttatcttcctatttttatttctgactttaatcgggttcacatttccccttacttacatgtaggccttcccatagtccatcagctaatttttttagaaattaggcaggtactttatttttattttctacttatgaacacctagctttaaaataggaatgatctgatacatggttctgttcaaaattttgacaggttataattggagctttggtcctgttgatagaaaaatgtttatacacatctctctcctatgtgcctttttcataaattacatatgtacatgggcgtgtgctattcattaaattataaactctaatcaaacataaaaaaggataaagatgagacaatctgtattaaatgtcttgctaattactatactggttggcttcattttccatgtacctaatatcttaataaatgtcttttaaagcaagaccataaaataatttcagatatctcatctgacttcatgtgatgcatgttggattatcttgtgtctaaccttataatgtagcttgtactaagagtaggagaaataatcggctctccctttccttatttacttgtatttcccttactggtaccattctttactctgatttacatttgtagtaatctttttttaagttactttttctttaaatggaggtcattttaattaaagcaggttatccagtctaatcctccatatctgcttgctgtgttatttgtaaaatggattttgttcaggctaaagagcaggagagagtgccactcgccgcctctccccttcgatgattgctcagtcttcccccagggaggcaggtgatacacaggactgagaaggtactgggttcagtgcatctattaaatataagtaaaaaa

SEQ ID NO: 48142 - DNA, 1047 bp, Homo sapiens
cacagaatgtctgctggtgtctgtgcagctctgagactctaggcactctgtacttagagaacatgtagaggttaagtgttcatcaggagacctgcgatgtttgtgttggaaatactaagagatgtgaggtttaggatgttttgtgttgtgttgctctgtgtgctcgtccagagcagacatcctcaagtcagaacttaatgaggtatgcggaaaatcaccaggggaaccgtaatatataaaacataaaattaaagctctgggatgaatggctaatgcctagttacattagatagtcagtttatagttatttgctccagcctaatttggctgtctattcaaggtaatcagcagagagtcaaacctttaactttttcttgagggactgcagtgagccttttagctttctttacgttgagctttatggtgacagatgagatgaaggatactatttcacttccttcaagtttttagtgtggcctcattatatttgaaagtgaattcccagagcagccgatatgcctgtaactaatcctaagtagaaaatctattccaaagcagaaaatatattttggctttacctgtgcagtcacagactgggaaagcgggtattggggtgtctaataatgtggatttaaatggtttggttagaatatctactctcctttcatccaaccaggcatttccatatatttttgtattccctctctttttttctaccacagaagtttaatttcaagattttctgtctcatctctctctggtattcattacacctgttacatctgttttgtttccagtacaaaacagcactcggacctgcctcttttacattggtcctctaaccaaagaatgatttaggagaaaatttgtcatttgttgaaaggttgttttttttttttccccttttttaccatcaacctgtcattttgtgtatcttaatggattattcaagcatttatagccctttgaaaactttggtttcaggcattagaaattaatgtaatttaggaacatggttaccccttaccttacctctgagtgtcctac

SEQ ID NO: 48143 - DNA, 1045 bp, Homo sapiens
tttcatcttgcactgggacccacagattacgtagcttttcctggttagttgccttcccacttgttagtatttagctgtcagtattgctgctttgttgatatattatagaactgtttgaaggctttatgtctagtgatgccacacctgactatcaaattcactatggaggacataaaatgcataaaattttttcttgctttggccattttcattttacaggtgtagaagtcttcaccggttctggttacgcacagagcccacatattgtagttcagtgccaaatccacacttttgtatgttctaatttgggaagaacatttattgtatatttatttggttcgagatactagacggtttatagtgctagttaattatttaaggatttcacataacgtaaatttgccaagtggaaacagaagacacttaagcttgaaaggcagtgcttattttaaggcttttacatattaaaagataagtgttttattatgatttaaatgataacttttggagtctgaattaaaagtcaaagtttgcgtaataaaatcttagatttttgtggggtacttaggacatttttcactagtaaatttaacagatttggctttcagcttgtgtgatgtgtatcatatgtttcattttagtaaggctagaagaattttttatttcaagggaagaattttttttatctctaagcttgtattccattgtgcaaaacaaaacaaaaggtaactcttgtgtgagcaacgctgtgctaaatgcattctcatagacatcttcatctttaatatcaatgttaagtttctagagattggtcttaataaaaataactatttttgcaacgagcattcttttctcagagctttgagttaggctctcaatgcgtgaactgaattgatatgcttaatgacatggtacctttttgaatattgctgaatagttctgtgtgacaacagatacaggttttcgttgtaagaaatctttatgaagagaaggatgggggctttgaggagtaaaataggtaaaataacccagaaagtcataagaa

SEQ ID NO: 48144 - DNA, 1025 bp, Homo sapiens
cctccttgttatccttcagggccagagcgtaaaaccatgcctctagatgcgagctatgagcatgcagttgtagctgcccagatggtcatttagaattgtgtgcatttttaaagaccatctttatgacaaagattttcaagtcctatcgtctctacattttctgaaaacatgggaaaaggatttgctacgagttgtccactctcctttattccctccctcaaagaacggttcttagaagtgccaaaatgtaataccttcggcaaggacaaaagcgcttttaaaacttaattttctagtggccctattcctaataattcttcataaaaatttagctcagcctcaaaacttacggcgaatcagtccatttaaaaccattcgaatatcaattgctgtgtaatgtccccattccctcaagtaaaatctgtttgtttgaaatattgttttgttgcccttgaagagttttctcaagaatcgtttcgccagagtcgcttgaatttcccatttcttgtggaagctgacctggagtttccattttggtgagcgggtggaaaagctgtcctgcatctaccttgtcttagtaacctttgggtatatataaatggtgactgtattgctgagtggacccgaatgttactgcatttgtggtaggggccttctttataggaggtttgtagggatgctaaggtaacaacacttaaggttgtggggaggatatacttacgggaagttcgcttgcaaactatggggagagaaagaagaggaagaaaacatctggaagataaaggccagaatggggtaggaaaaattagaatatgaagaaacatgttacattaaattttctgtgattcctcctttgtaattttcctttttgagagagtatttttatttttgtgtggttaaaaccagccccttgttgcctgttatttgggtaactttgtgctgccacctttcagggagttagttgtttttttcttcctttgaaagacaactttaggtgttaagcccctccctcttccttatctgta

SEQ ID NO: 48145 - DNA, 1034 bp, Homo sapiens
gggaggctgaggcgggcagatcacctgaggtcaggagtttgagaccagcctggccaacatggcggaactccatctctactaaaaaaaaaccaaaaattagccaggtgtgatggtgcatgcctgtaatcccagctacttgggaggctgaggcacgagaatcacttgaaccccagaggtaaaggttgcagcaagtcgagattgtgccactgcattccaacctgggggatagagcaagactctgtgtctcaaaaaaaaaaagttatgtgaatgtggtctctctctctctcaaatcatcttattgtactgtactcacctattttcaggtggtggttgtctatagataactaaaaccatgaaaagtgaaaccagggtctactgtgaatacagcctaagggtcagagtgagaaaatgcttaactcctttcctttcttaacctgatgtgttttcttcttatttgagtaaactgatttacatttcctttccctgaaataggtgatcctttcacagaccggaagaatgcggatggtcaacatgcttactcaaagagctgagtcataggccatagggcttagtggaaagaaagctaggatagttgtgagtatgcctaactgtgtgtgatcttgggaaacttatttaacatctctgagactatatcctcacctgtaaaatggagcaattaatatctttagggcagggttgttgttaggataagagaaaatacatgtaaacgtatgacatttagttgatgcttaataaatggtagctaattttccttttatgattgtaaggagttgagatgcaaattgcaatgccactgagaagggaaaccaattaaccaatgaggaatataaaaatagaagtaaaaccagaaagacgaaaccatgaactcacagaatctgtagatgtgctttggtgaaggaatagctttgtttacctgaagcagctaagctgtattttgttttgagaagaatagagtgatatcatgtaaaggggcccagatgagactggaaacatgggttctaggtccacttctt

SEQ ID NO: 48146 - DNA, 1050 bp, Homo sapiens
ttcatttctgttttgtcccaattctgctattaagcccatgtagcaatttaaaatttttttgatactattgtgttttttcaaataacatctccatttggtgttttttcaaataacatctccattggtgttttacatataaaatttatatttatatattatataaaatttatatttatatattatatattatatataatttatatacatataattatatataaatatataattatatataatatataatttatatacatataattatatataaatatataattatatataatatatattaggagacaggatcttgctctgtcacccaagctgtagtacagtggtgtgatcatggctcactgcagccccaaacttctgggtccaagcgattctcttgcctcagcctcctcagtagctaggactacaagtgcactctactgtgcccagctaatttttaaattttttttgtagatatgtggcctcactatgttgcccaggctggtcttgaactcctgagctcaagcagttttcctgccttgctcttctgaagtgttaggattataggcatgagccactgtgcctagcctaaaatatattttctttgcctgtgctaagatatttatctcttcattcatctggacattatttatttttactttattgaatgtagtcataataaatactttaacatctttgtctggtaattccaatatcagggttatctcagtttgcccttcatagattgtcttctcccttttgaataaatcaaatttcacattttcttgggtttacattttttgggcacttttggattcttttgaatagatagtgtgattattatgttgtggagaccctgaattctattatattcctttatgtaatagaatatgatttattttcttatattcctctgaagagtgttggcgttttgcttcaacaggcagcaagctcaattagactcaaatttcaaactgtaactgattgcagctcaaatcttagtttagttcctctagccttaaaaacaagttgctttgattctgccctacatatttc

SEQ ID NO: 48147 - DNA, 1050 bp, Homo sapiens
gtacctttgttgtattacactgtcgtctagcctgtatactttcactatttctcttgttttcctgctatcttcagtcctaccgacttgattcatatctcaaactccgcacccaagtactgaagattttttaaataaacgaatccatctaggcttagtgtctagacagcagaatgaaccagtcactgctcagattcatcactgacatataaataaatggaataatttttcagaacaaaacaaaaaaaatttatatgtttatgttattcagtgagccatagttgtgaatatgggataaaaccataaaggcaaaatatttggcagctaaatagaacagccaacactctaaacattttattagccaggagaaaaaataaacaacataagacccaatctctctaaaagtaatatactcctaatataaataaaaaggagtgtgccacataatagaaaaaactaaaatgtaataccactgtttttattatcatctataacaaacctcagtgcgtgagagctgtgggattctctaaattagataaaagtaaacacttgtggcataggtttgctttctgttgaaagttttaaatagaatatccaatgaaagtaaacaaacatataagaactattttttctttttttgagatggagtctcgctctgtcgcgcaggctggagtgcagtggtgtaatcttggctcactgcaagctccgcctcccgggttcacgccattctcctgcctcagcctcctgagtatctgggactacaggtgcctgccaccaggcccggctaattttttttgtattttttggtagagacggggcttcactgtgttagccagaatggtctccatctcttgacctcatgatccgcccatcttggcctcccaaagtgctgggttacaggcatgaaccaccacgcctggccacatataagaactgttaatcacatcacaaacattctgagttataaaaataaaaggaacttttaagttatgctaaagtatttaaaccttgataggacttataaatattcgagttgataataattcagcttat

SEQ ID NO: 48148 - DNA, 1023 bp, Homo sapiens
gggggatcacctgaaccggggaggcagaggttgcagtgagccgagatcgcgccattgcattactccagcctgggcaacagagcaagactccttctcagaaaaaaaaatatatgtatacacacacacacacacacacacacgtatatatgtgtgtatttatacgtgtgtgtgtgtgtgtgtatgtgtctatatacacacccctgagatctaggcgtcttgggaattacccacttaggaaattgacctgtgattcagacaacttagataaccactctggaatgcatcgattgttatgtaccagttacttatttgcttaactctacgtagagaaattttaacctacaaaaaagacagcagtaggatgaacccttgcatatttatcactcactgtgtcccttccatattattttaaacaacctcctcccagtttttctaatctgattactttgaagcaaatcttggtatagttacttttaaataggaagcagataggcacctttccagaatctatagaacttttccttagaatggcagggcatgagtttgtcagaagccccagatggggtcttcatttcaatcaggtgttatgcttggcaacggtttccctgtggggaactttgagggacttgggaagcattgttatctgtttttgtagctgcatctgcgttaaaaaaaaaaaaaaaaaaaagttattctttctattacagaaacctaacttttaaactgtatctattgtcatttttccatcagtcaatttactgcctcatcctgctgctcaagcactgggttagatgattagcaggtatttttccttttttctactctttctctatcacctttttaaaaaattgaagtttctcttaatcacttaactgatttgttttattaattgttcatttcatttgaaaaataaattcactaatgttcacagtgtcctaaattggttgttaataacttctctctaataatgcccatgtacctctcccaccatttaaactgttggcttaccaagagttactcatc

SEQ ID NO: 48149 - DNA, 1058 bp, Homo sapiens
gatctgcccgcctcggcctcccaaagttctgggattacaggcgtgagccaccgtacccggtgcaggtatctgtaaaattttttaaagagtgaaaaaaggcgaggaatggtattgtcaccttagggaaaagaaaatgagcaaatttatattttatttcgggttgtctaaaaactttagcatgtatagttttatagtgttttaaaactattaggaattgtgacaacatttgtaaaagttacagattaagataaaaccgcttaacaacgcaacaattttaagtaagtaggtaatatgaagtcttggaattagagtgttgtctttgatcggagatgggctgggaaaaaagctttattccagttaaaatagcactgaaaatgagaacaggtattagtttggcctgtaatgttagatgattatgttccaaagaatgtgcttataatgaaatttaagtcttgaatagcacaataaaataatcaggattgagatttcatatataaggaataaaagtatactgtagggaaatcttagcagttttaaaattgctttctctaaatatctttatgaattttaaatgaatgtgcttttattgagtgattttgagggagataccagtgaaaatggtgctgcattttcctacagataataaacagtgttgagatagtatcatggttgtagaagataaagaaattttaaaaatctcaagttctcaaaataagttaaaacacaaagtaggtactttttctttttgaggcagctgctcacttgtcaccctggctggagtgcattggctcaatcacgggtcactgctgaagtgataagtgatcctcccacctcagcctcctgaggagttgggaccacaggcatgagccatgacaaccagctaatttttaaattttttgtagagaccatgtgttgcccaggcttgtctcaaactccttggctcaagagatccttctgcctcagccacccaaagtgctaggattataggcatgagccactgcacccaatcaaagtagcttctatatgagtgttttggagctgttgtttctagccactac

SEQ ID NO: 48150 - DNA, 1031 bp, Homo sapiens
aagtgctgattcttttactttttcagtctaattatcatagtgttcattaaaactgacccattttaaaactgctttgtaaacaactatctgacctctgtggtcagggaagattttccagaggaaatgactgttgaattgtctgaagtatctgaatttgttaatcttgtgaatatagtgtgatagataaaggagggaggaaagactgtcataggaaaatggtatgcaaaagccctgcttctatgagctgaaggaaggagaataggttacagtcgagtaattcaaagaagattgtgtcctaaacacaaagaatgagcatgaaggccaggtaggccatattaccttaggagcaatgggaattcattgaagagttttaaacaagaaggatgagtacgtatacattttataaaatccattctgctaacagtgtacaaaacaaagagacctcagattagatgcagggagtcccattaaatggctattggtgtaacccaggcaaaaaattgtggtagtttggaacagaattatggcagtagatttggagagactggatagagttgggagacagaaagtaaaatggacagaaatatcttaaattactgaaattacttggttactttgattatgattataaagttttaaaaatgatgatagctcctggtacgtatgttacttttctgtataatatttgtgatttgtaacatctttacttcaatttatttatatgaatttaagtacagtgataatgcatacatagagcttttgggtgaatggccttttaggggaaaatcctaattcttcaaaagtctaaaattttaagaaattattcaatatttactatacttttgtttgtgtatcctaaatatctcttcccttatagctactccttgagttaattgcagtgtggagagaaaaatcaagtaatattaaacagatattctctcctatggttttgataaataattatgcaaagaatttgggaatttttgatgaagaagaatttattaaatgaaaacgtatgatgtcatgtacgt

SEQ ID NO: 48151 - DNA, 1029 bp, Homo sapiens
gggagagagtgtgagaactgaaattcctgggtcaaagtttatgctattaaaaacttatgaatgccaccaaatgctttccaaatgagactttacagatttatagtccaaacagtatatatataagaatacctatttctgagattcttaactagcttttgatgacattttgatggcattttttaaaaaaattgccagactagtgggtcaaattaatagtttgttttaatttttattttccttattagtgagattgaacattttaatatttttatttgccatttgatttcttcttatgtaattttctgtacatatcctctgctcattattctctttggtagagtagaaacagtttatgtagagattttatcaggtggttttctggcattctgttgagatgatcacatactttttctcctttagtcagataatgtaatttgttgataagttagttgatgttgaacagtctttggagtcttgggacaagtgctgtttggtttgttgagtttgttgtacttggctggaattcagtatttttactttcatgtatgtgtttctttttttttgttttttttgagacggagtctcgctctgttgcccaggccggagtgcagtggcgtgatcccggctcactgcaagctccgcctcccgggttcaggccattcccctgcctcagcctcccgagtagctgggactgcaggcgcccgccacgacgcccagctaattttttgtattttcagtagagacggggtttcaccgtgttagccaggatggtcttgatctcctgacctcgtgatccacccgtctcggcctcccaaagtgctgggattacaggcgtgagccaccgtgcccggccaacttttatgtatatgtttctaaattagatcagactgtagtttttatttttgtaatggattgaattaggaagctttgtgtttttttggtgtgttctagaatggtttatattttcttctcaaatatttgtcagaagtatctgggtctagtggagttttttagagtgattttttaaga

SEQ ID NO: 48152 - DNA, 1034 bp, Homo sapiens
ctttcattgcatcctgtacttttccatcagggaacttttcattatacttatttggatgatatttgattaatatttgcattcttaacacagctcctagactgtaatgaccaagaatgcaggcaatgtgtgtatggctcatttttatgtcaagaaaaatttattgtttataaacaattaattttgtacaccaatctcactaagtgtttcgtctttatctaccttcatccctttctattcctaatgtaatcagaatattaagataaatcttttattcatatttttgcacaatatcttaactgtacatttgaacaaaatagggtttaaattgattaagatttgaaatgtgagatgtaaattagatttaaattatactttagttgaaggtcactttatttattgaatattgctgaattttcatcatttgccagtttgttcatgatcagatactgagtttctgttaatataatagagacttaagatgtaaaaaaaagtataaaagactaggactcagacgggcctggtggctcacgcctgtaatctcagcactttgagaggctgaggtgagcggatcacctgagtcaggagttcgagaccagcccaaccaacatggtgaaaccccttctgtactaaaacaatgcaaaaattaggctgggcatggtggcttatgcctgtaatcccagcactttgggaggccaaggcaggtggatgacgaggtcaggagttcgagaccagcctggccaatgtggtgaaaccctgtctctactaaaaatacaaaaattagccgggcgtggtagctcatgcctgtaatcccaactattctggaggctgaggcaggagaattgcttgaactcaggaggtggagattgcagtgagccgagattacgccactgtactccagcctgggcaacagagcgtgactctgtctcaaaaaaacaaaagggctaggactcctcagcaaaccaccatggcatccatttacctatgtaacaaacttgcacatcctgcacatgtaccctggaacttaataaaatact

SEQ ID NO: 48153 - DNA, 1085 bp, Homo sapiens
cttctgatttttgctttttcctggagtggttgtgtagattccctcgtgacttttaaatagcatattattagaattcattgttttctccaggggtccttcccaccaggagagcagtatagttaagaatataggttttagagtcagacaaaccttggttcaaaattgggctctaccacttacttgctatgagaagttggcaagttacctaacctgtctgagcctattttttttatctgtgaaattagataataggggaacccaccaaccaagacacagcatgagtgctatcactggcgagatgctaccaatcacgagcagagaaggagccatgtgagccctgatattggatggagcagtacaatcaagaagtctccccaggcatattttgacttaacatggaaggagacattccacccaactacccaggagtagtcttcctaatctaagttattaatgtccttcttgaagcccttgaagtgttggtgtatctcttcaaaatgaatttatttaccaaggtatgcatgcctcagcatcaacactactggaaaaagtgccagagttggactttaaggcagctgaagaagtctctattttcagaatggcttttgatatcttgtataatgctgttgttggatcttcagacagagttcctcgacagtatactcagtttgggaagagatcatagcgtttaggtatccactggccttgcagactggtactgtgagctataaaaatgacaacctacagtcctctctaagtcatagagattggacaaacatacaacgttaggtcagcatcatgaagttgtggattgctgtccgtgagcttcctttttcctgtgaatttattgatggcccagatggaaatggttgtaccatgtgcattgataacaagtaaatgaaaataattaactatcacactaaatgctgttatggcacagtggctgttaaggaagtctttgataacataatgtgatttcaaatggtagtaaggatctgaagagtagataagatggctttctctctatcagcagttcagaaacagtgatgccctgaaacttaataccaagtgagaatccaaatcac

SEQ ID NO: 48154 - DNA, 1050 bp, Homo sapiens
ctcacacctgtaatcccagcactttgggagggtgagacaggcagatcacttgaggccaggagttcggaccagcctggaaaacattgcaaaaccccgcctctactaaaaatacaaaaattatccaggtgtggtgatgcccaccagtaatcccagctactcaggaggctgaagcacgagaatggctagaacctggcaggcagaggttacaatgagccgagatcctgccactgcactccagcctgggtgacagagtggagactgtctcaaaaaaaaaaaaaaaaaaaaaaagtaaagtgttcagtaataaaagaggctatataatttgaatatacttcatgagtctggtttttaactatttcatgcaatgaatgcatttattcagaaaactaaaagtatttaattgaagacccagagcagtgtgtttagggctctggtattattgaggagtatttaatatatttgaatattattttctgtgatttgtgtatattcctgattctgtgataattctggatttctgtgtggcttaacagttctttattgtagaatgacatgcttaatcggtgcagtaagtgtacttttttaaaaatataaatgaaatagtttggaacatgtttcataaacacttaaattcctttaaacaatttgtataatgtgccaggcaccatggctcatatgtgtaatcccaacactttgggaggctaagacgggaggattgctagaggcaaggagtttgagaccagcctgagcaacataggaagactccatctctacaaaaaattaaaaaattagctggacatggtggtgcatgcttgtagtcccagctactcagtaagttgaggtgagaaaattgctttagcccaggagttggaggctgcagtgagctgtgatcacaccaccacactccagcctgggtgatagagtgagaccctgtctctaaaaacaaaaaatttttttttttttttttttttttttgaggcagagtctcgctctgtcgcccaggctggaatgcagtggcgtgatctcggctcactgcaagctctgcctccc

SEQ ID NO: 48155 - DNA, 1058 bp, Homo sapiens
gggtaactgctactgtgccaagagcaggcattgatcaaaattaacctcaatttacaatccaagccttcccctagaagttgcaagctttcaaatgactgcaaagtttcataatagttacatcagacagattctgccagtgccatcgttgtctaggtgggaaaacagatgcctggtgcttccgactctgccgacttcccagaatattctctagttcttaagccctttgttggtaaattggttcttcggttgtcctgctgcctgctaggactcaggtctcctaaggcccttactacttttctgtaagctttaaatattcaaagttgtattcatgtattttttttttcattctccttggccttgtgggtttaattaagcctttattaaaaaacataagtatttattgtttttagtggaatttgggaaggaagtgaaaatagatgagtttgtttagtctttatctgggagtcttacctctttatgtacacttatcttcttcaactagactgcaaactctttgatttagctgagtcagggatataattctttttatccctctcagcaggtaatttattgctttccacatagtaaatcataatctgctggttgaacttgttaagtaaggcagtgatgctaagtgattgatacatgtcacaaactggtaatcattttaatcccagtgcaattattaatgtactgtgttcattgatatatataattatatataacattatatattatataatattactctagccatttatatatttctgtattaggtggggtttttttgtttatttgttttagcttatcagttatcattagtgttagtatattttatgcgtggctcaagacaattcttcttcttcagtgtggcccagggaaggcaaaagatttgacacccctgttctagctatgtagaaacacatgctgtactatactactgggctctaagtcaatgcttcataatgtgaaaaagtcctcagtatatttaggtcttcttaataataaatttcattatcttaattgcatgtatgtttcgtttaaccagggatttctta

SEQ ID NO: 48156 - DNA, 1048 bp, Homo sapiens
gtcctgtgggctgactttggcctgcaggcaccagtttctcatctctgcttgtgaatgtcaagttctagagagaccattgctttagtcacctctgtcctctccctcctcttcccactcctgcctcaccaagaccaaattccaaaagaccagttctcctcaaaagttgtgtttcataaggaccttaaaattggctactagtctaacagtaatttatttcagttgaggactttttaaactccatgactaaccattgagggtactttctggatgattaagttaataattttaaaggaattgccttggtttttgaggggtagagggtatattatttgggaagtggctgtttcaaagtgagtgggatctaggtttaaatccagcttcaccacctgtatcacttaagcaagtgatgcagcctctcttagtttctcattatttaaaaaaaaaaaaaaaatacttcagacagattaatggagtttattcaagcaaagaattattcatgaattgggcagccctgagaaccagaacaggttcaaagggactccagggctgctgtttggttggataacatttatcaacagaaaaagcaaagtacagaaaacggaagtgacgtatagaaacagctggatcggttacagctgggcatttgccttatttgaaccaggtttaaacagatgtctgtctgtggttcagctactgtgattggctaagactaggctacttgctgcaagagtaggatatagcctgtttactcatcaagttgggttcattaggtactgacaaacctttagaccagacttaaagtagaggaggcggcttttggccaaattcaatttaacagtattttttcatccacaaaatagggaaaacaactgcagagtttgttggttttttttgggataaggatatttacatggctggtgccattggatgcccaggaaataaaagtttctcttcggagccaatgtaattgagactttaaattgcaaatattatataatagtcacaaaaaacttttatgtattttattttggaacttaagaaatccttt

SEQ ID NO: 48157 - DNA, 1049 bp, Homo sapiens
gtcatcgttaatgagagttagttgaataaggcatttattcaacctggaaaatgcccagtggcttcagcccttatagtatggaattcctatctcttggcggggcgtggtggctcacacctgtgatcccagcactttgggaggccgaggcgggtggatcacgaggtcaagagatcgagaccatcctggccaacatggtgaaaacctgtctctactaaaaatacaaaaattagctgggtgtcatggcgggcgtctgtagtcccagctactcgggaggctgaggcggaggttgcagtgagccaagatcatgccactgcactccagcctggcgacagagtgagattctgtctaaaaaaaaaaaaaaaaaaaaaatcctatctctttttctgcacttggcccctccccagaactttgtgattggtcccaagagggaaaataaaacatatttggtggagaatgggtatgcactaaagttgcactgctagtgggggcccatagacctcgtggtgggtgaggatttagacacaacttgcaagatacaggggttgatccagcttttcccagaaaggcgtgggtgggttctgctgaactggcacatcaggagtttcactggggttaatgttttaaccgttgtgtcaatatacttaatgacactttgtttgaatattctataactgaatggaagcacttttaacgaacaagttttgttttatttttaggtgagcgaatagcagtaagatttacctaggtacactttgtactatattgaaaagtttacattttgaaaaaccaaatatgatatatttagaccaaagaaatagttagactttatgccttgagagctttgcaactctttcagtgcttataatcttttcaagatctgagggtctgtttcactctcctggtgcttcctggactgtgtagtttttatttgggagattaaccactgggggcttttgttcagaacctgccttggactgaatggctttggaccaggtctcacttggtgccttctgctcctatggtaaggagaaaagatctgcagccctcac

SEQ ID NO: 48158 - DNA, 1023 bp, Homo sapiens
ctcatgccaagcaaaaatgaaaacaaaacaaaacgtataacccctttccttcctatttggtgcttgtaactgagaaaattaggtttgagtaacactcaatgtacatgactttatttataccaagttaaacaaattaagagtgtgggctctggtatcaacacaggataggttggaatcccagttttgccacttcctggcttactaagtctctgtgtcctcataggtaaaatgggggataacagtagcacttacctcctaagatttactgagaggatgaaatgaaaccatatatttaaaggcttagctgtggtaagcactgtgtaaatattcaactcctcctgcttttccataaagaaacagagcaccctcctccttctgctgggtgaatcagggctatttcgtctaacgtctaatggataagtcagtttgccgtcactcttccttccttacctatgacttttccagtccctcatttcaggccctttgtggtttgattgatgaaaagatggtagaatgtaagcttgaaatacattgtttggaaataccttggggagggggatgctaggaaaagggaaaggaagagaaggctgacaaaagagcctcatgccttctaatgaacacactgaacccttgaccccttttagacataagcccactgcattggactttgggttataaatataggactacaatccattattctgaagtctagaaaaagcctgaaaaccatgagtgttttcatctgcatgaaactatttgtattctttatttatctaacttaatatgaacattcatgtttccctgaaaaggtattaatgtgcttgattccaaggtgctgccccaggctctgctgggggtgttatgtaatgggtactatatgtatcacagcaccattctgaattctgagaaatcctgaattttagaaacagatctgcccccagtgactttgtttttttgttgttgttgttttgttttttttttttttttgagacagttttgctcttgttgcccaggctggagtgc
